United States Patent Application Publication US 2007/0054278 A1 - sequence listing, part 63

SEQ ID NO: 95476 - DNA, 292548 bp, Homo sapiens
  misc_feature (1)...(292548): n = A,T,C or G
caaattaagaaattgaacattgccagcatcatggatgctctttacatgtctgtgcctctggtcctccggtctctttcctcctcccaatctttatttttccatgttttgtaaaatcattgaactatcagccgggcgtcgtggctcatgcgtgtatcccagcactttgggaggctgagttaggtggatcacctgaggtcaggagttcaagacacgcctgaccaacatggagaaaccctgtctctactaaaaatacaaaattagccaggcatggtggcagatgcctgtaatcccagctactcggggggctgaggcaggagaatcacttgaacgcgggaggtggaggttgcagtgagccgagatcgtgacattgcactccagcctgggcaacaagagtgaaattccatctcaaaaacaaacaaacaaaaaaattgaactctctatatatgtatcactaaaaatattttgtttacttttgaatgttatataaatggaatcaaactctatgtatttttttttttttgagatggagtcttgctctgttgcccaagctggagtgcagtggcataatctcagttcactacaacctctgcctcccaggttcaggcgattctcctgcctcagccttccaagcagctgggattacaggcatgtgccaccaagtccggctaatttttgtatttttagtagagacggggtttcgccatgttggccggcctggtctcgaactcctgacctcagggtgatccgcccacctcagcctcccaaagtgcagggattacagggatgagtcaccgtacctggcctaatttttatttatttatttatttatttatttacattatttttggagacagagtctagctctgtcacccaggctggagtgcagtggcacaatctcggctcactgcaacgtccacctcccgggttcaagcaattcttctgcctcagcctcccaagtagttgagactacaggcacacaccaccatgcccggctaatttttttttttttttttttttttagtagagactagttttcaccgtgttgcccaggctggtcttgaactactgagctcaggcaatccgcctgccttggcctcccaaagtgctaggattacaggcgtgagccaccgcgtctgggctggaaatttcttttatgtgttctcccagtcactcctcaccatcaaaagtaaatattatcagctggacactgtggctcacacctgtattcccagtactttgggaagctgaggcaggtggatcacctgagctcaggagttcaagatcagcctggccaacatggtgaaacaccgtctctactaaatatacaaaaattagatgggcatggtggctcatgcctgtagtgcagctactcaggagtctgaggcaggagaatcgcttgaacccaggaggcagaggttgcagagccgagattgggccactgcactccagccttggtgacagagtgagactctgtctcaaaaaaaaaaaaaaaggaggggccaggcgcagtggctcacgcctgtaatcccagcactttgggaggccaaggagggcagatcacctgaggtcaggagttggagaccagcctggccaacgtggtgaaacctcgtctctactaaaaatacaaaaattagatgggtgtggtggtacgcacctgtaatctcagctactcgggaagctgaggcaggagaattgcttgaacctgggaggtggaggttgcagtgagccaagattgcaccactgccctccagcctgcagttacagagcaagactccatctcaaaaacaaaacaaaaaaaagaatgtattatccagattcttgccatcacaaatgagttttgcctatttttttttttctagaaatggggtctctctctctctgtgtgttgcccaggccagatttgaactcctaggctcaagtgatcctaccatctcagcttcctgactagctgagactacaggggcatgcacctggcttgttttgcccatttttttgttgttgttttattttgacagggtcttgctatgtcacccagcctggagtggaattgtgtgatcaagactcactgaagcctccaactcctgggctcaagcaatcctcccacctcagccacccaagtagctgggactacaggcgtgtatcacttgcccagctaaattgtttataatttttgtgagatagggtctccctatgctgcccaggctggtcgcgaactcctggcctcaagtgatcctcctgctttagcctctcaaagtgctagaattataggcatgagccactggtacctggcctgttttgcctgtttttgtagcaggaaacatacattttttgctcaacattatgttggtaaaatccatccgtatttcttcatgtagcaatcatctgttcattctcattgctttataatatttcattgtatgaatgtatcacaatttatatattcattctcctgttgagagacatttgtgttgtttccagtttgtagccataatgagcaatgtttctggggcagttttgaaagtttctccagggtataaatccagaagtagacgctggttatagggtatgtagggtatgtacaactttaccaattaatgccaaactgttttctaagggattgtcctcattacactcctacttgtaatatatgcaggttcctactattacacatgcttgccaaaggggccaaagaatctttcctgtgtgatgcaataataagcctgagtggggccaggcatactcacacgtgccagccctttggttggtactcagaagctcaggccacagtcatttgctccttccaagtaagggtaaaggattcataatatcccaaggtccctgatcacatgctccattaacctggaaatattggggcggatgggttggtgaactgaattttcattttattattattatttttttagatggagtcttgctcttgtcacccaggctggagtgcaatggcgcaattttggctcactgcaaccaccaccacctgggatcaagtgattctcctccttcagcttcccgagtagctgggattacaggttcccgccaccacgcccagctaatttttgtatttttagtagagacagggtttcaccatgttggccaggctggtcttgaactcctgacctcaggtgattcacccaccttggcctcccaaagttctgggattataggtgtgaaccacagtgcccagccactgaattttttatttatttattttttgagacggagtctcgctctgtcacccaggctggagtgcagtggtgcaaacacggctcactgcaacctccgcccctcgggttcaagtgattctccttcctcagcctccctcatagctaagacagggcctccactctgttgctcatggtgggtgcaggaggcagtgaatttagtaatgacacaattttttgtttgtttgtttgtttgagacggagtctcactctgtcttgcccaggctggagtgcagtggtgtgatctcggctcactgcaacctccgcctcccgggttcaagcaattctcctttctcagcctcccaagtagctaggactataggtgtgtgccaccacacccggctaattttgtatttttggtagagacggggtttcatcatgttggccaggttcatcttgaactcctgacctcaggtgatccacccaccttggcctctcacagtgttgggattgcaagcataaaccactgtgcccagcaatcacaatttctgaattaattgaggatccataaagcattctgttctgtatcgattactaataggaaatgaaaggaaaggaacatggagagaaaggggaaagtaatattttctgtgtgcctactatctaacaagctctgtgccagaagcttaacatgttggttacatcatttaatccaaaacaccaccttagaaggtaggctttatatcctgaatataagatagatatatataatatagataaggaaactgaggctcagaaaggtgtcagttcctcaaggccacagagctaattagcgacagagtcaggatttaaagcatagcctgattaaagagctcaagctgtttataatacagagcacagagaaggtagagttgctgccgctcttgagactgacactgccaataccaagaatcggttcttctcagttttgcttgcctgtattcacccccaaaactatgttattcaactgattatgaccatcttgttcattgattgaagctacatttccttttcatggattttttgttgtctttattctttcttctttttttttttttctttttccaataagaaaattgggcacatcagcacaataggtccactgataaacaagacttgtgttggaaaataactttctacctgcaggtctaggagttaaccagaggtgagatgatatatatatatatatttttttctgagacgcagtcttgctctgtcactcaggctggagtgcaatggcatgatcttggctcactgcaacctccgcctcccggattcaacggattctcctgcctcagcctcctgagtagctgggattataggtgcctgccacaacacccaggtaatttttgtacttttagtagagacagggtttctctatgttggtcatgctggtcacaaactcctgacctcaggtaaccctattgccttggcctcccaaagtgctgggattacaggcatgagccaccacacctggcccagaggtgagattttttttttaaaaagacgtgacattgtggccaggtgcagtggctcacgtgtgtaatcccagcactttgggaggctaaggcgggtggatcacaaggttaggaattccagatcagcctggccaaaatggtgaaaccctgtctctactaaatatacaaaaattagccaggcgtggtggcaggtgcctgtaatcccagctacttgggaggctgaggcaggagaattgcttgaacccgggaggcagaggttgcagtgagctgatatcgtgccactgcactccagcctgggtgacagagtgagactccgtctcaaaaaaaaaaaaaaagacatgacattgtgaaatcttctgctctaagatatcacatacaggaaaattttaagacaaggtattaaaaggataaaaagaaattgaatgatggctcaatttttcttgacgataaaggctctacaaaattattaatgttatattttattatgtattgtgtttcatatataataacaacaatagagagtgaaggtagaagacaggtagaggcctaaatatgtagcaggaaaaacctgaacctgatataggaatgatggagacactagggaagtctaaagagaaggtagggatggggcaggaaatcaacttaccaggagcaccgtcatggctttagaggaaagtgaagtcagggatggctaggctataaagctgatcaacataaaatgtcagaatcctacgactgggcaaaatccaaacaagtcatcttgtccattttcctgtttttaaagagccctttaaaatttctccaggtattttagttgtgaggtgtgtaggacttagaaagggatcttaaaaacatatatattggaggtgtcatggaggaagaagttaagatttggtaactggctgaagtatagagactggaagtgtttgccattggataaggaaggagtgagagcagaaatgccatgtgaaaaccctgtgtccatgtgaaaacatcgtggggagtctctactactcatgctgtccttcattgtgcaattctacctttcatcattaggaccagacttatgaagtggccttcctgaggagattttctgaccttatggtatgaagttccttcaggctcttaattctggataaactggagtgattaacaagagcaaagagacatagtattcagataaggactttgtgtcttatttttcttttatatcacaactggagccacagttgtgggcaaggcactgactttcttgatgaattctgtccatctgtaaagcagctatatatcccactggaggctttgcctctcagagacaacgtgaagacggataagcaggcatcaggagcagagtggcctctcaggtacagagctaatctttatttcagtcaatgaagcgcttactaatagaaatacctagtcctacttgaagagctataaaagggggtagcaaactataagagatggtctctgccttcaggatttaactggagagctaaaaccagtatgcagacaaaaaaatatatcctaattaaattctgaactgtgggccaggcatggtggctcacacctgtaatcccagcattttgggaggcagaggtgggaggatcatttgaggtcaggtgtttgagaccagcctggccaatatagtgagactctgtctctgccggaaatacaaaaattggctgggcatgtgattccagctactcgggaggctgaggcaggagaatcacttgaacccgggaggcggaggttgcagtgatctgacagcacgctactgaactacagcctgggagacagagcgagactctgtctcaraaaaaaaattctgaactgtgtggtatgaccatattgctacaagaattcaaaggagagagagatcagtgaaagctggagaagtaagagaaatcttggagaaaatgggacttccaaggactagaaagattcagaaaaayaggagaaaagttggacaagtctgccaccataaacaaaggtataaggataagaataagcatggcaagtgccagaagccagattaaagtatgactattggtggtcagcaggaaataatatcccaataattcctctattctctgtcctaaaaattgatcactgaccttgttatctacgaatttggattcatggtcagacagccccaggacagggggctcttcatggttctattttcttttctttttcytttttttttttttttgagacggagtctctctctgtctcccaggctggagtgcagtggcctgttggctcactacaacctctgcctctcgggttcaagcgattctcctgcctcagcctcgtaagtagctgggattwtaggtgcccgccaccatgccaggctgatttttgtacttttactagacatgggattttgccacgttggccagcctggtctcgaactcctgacctcaggtgatccgcccgtcttggcctcccaaagttttgggattacaggcrtgagccaccatggctggactcttttcttttttttgagatggagtcttgctttgttgctcaggctggagtacagtggtgcaatctcggctcactgcaacctctgtctcctgggttcaagtgattctgctgcctcagtctcccaagtagctgagactacaggcacgtgccaccatacccagcaatttttttattttttatttttatttttttgacagagtctcactctgtcacccaggctagagtgcagtggcacgatctcggctcactgcaacctctgcctcctgggttcaaacaattctcctgcctcacctcctgagtagctgggattacaggcgcctgccaccatgcccagctaattttttgtatttttagtacagacagggtttcaccatattggccaggctagtcttgaactcctgatctcaggtgatccacccgcctcgtcctcccgaagtgctgggtttacaggcatgagccaccgtgccctgccgcaaattttgtatttttattagagacagggtttcactatgttggccaggctggtctagaactcctgacctcgggtgatccacccgccttgtgttcccaaagtgctgggattacaggcgtgagccaccatacccagcccatggttctattttctattaaggcactttgtttcctcccttgattcaactcaaacctgacttgagagactttcttgtcctaagagtgacaggtattgaaggccttgttgttcaacagagactctggcacacaaagaggggaacaataatgataaatcttaaacgactgttctcaaactttagggtgattaattattagggatgctttaaaaaaagaaaaagtcggccaggtccagtggctcacgcctgtaatcccagcactttgggaggccaaggcgggtggatcacaaggtcaggagtttaagaccagcctgaccaacatggtgaagccgcgtctctcctaaaaatacaaaaattagctgggcatggtggcacgcgccagtaatcccagctacttgagaggctgaggcagaagaatcgcttgaacccgggaggtggaggttgcagtgagccgagatcgtgccactgcactccagcctgggtgacagagcgagaccgtctcaaaaaaaaaaaaaaaaaaaaaagaaaaagagaaagagaaaagaaaaagtcaaccaggtgtggtggcatgtccctgtagtcccagctacttgagaggctgaggtggcaggatcgcttgagcccaggagttgaggctgcagtgagtagttgtgattaaaaaaaaaaaaaagggctgggaatctgcatttttaacaagcaccctggtggttttgtttttttttttttttttgagacggagtctcgctctgtcgccaggctggagtgcagtggcgcgatctcagcttactgcaagctccgcctcccgggttcgcgccattttcctgcctcagcctccggagtagcggggactacaggcgcccgccaccacatctggctaattttttgcgtttttagtagagacggggtttcaccacattagccaggatggtctcgatatcctgacctcgtgatccacccgcctcgcctcggcctcccaaagtgctgggattacaggcgtgagccaccgcgcctggcgcaccctagtgtttgtttcatcaggtggtcagtgggacatgctttgagaaacgatgccctaatctaaatatttgaccgaaaaatgccaaatgaagctgtctggacagtggcgcatataatgtttatatatatctgggtttatcaatttttgagaatttatcttttctcatctatggctattacaaattcatatggctatcatctaaagagtgtgacacagacactctgttttaatgtgctagttttgtcttcttaaatagactataatcaccttgaagacagggacctctcatacttttctgactttacccacaggaagataagaaagcaactttaaggttggaaggtagctgggatgctcaggatgagtccctaatacctttacatcaccttgaaaaccctggaagtcatatatttgggattttgtattcgttttctagggctgttatagcaaagtaccacaaactggtggcttaaacaacagaaatgcatttcctcagttctgaaggctagaagtccaagattaaggtgtcagcagttagtttttttctgatattttctccttggtttgtacatggccatgcatgccctatgtcttcatatgtgtgtctgtgtcctcgtcgcctcgtcttataaggacgacagtcatactggattagggcccacccttatgacctcattttaatttaattacctctataaagactttgtctccaaatatactcacattctgaggtattaggggttaggacttcaacaaatgaattttgggatacaattcagcccayaacagacctctagtatcagcttctagaaatgtaccactcatccttctcttccatttgttagtctcatatagtaagttctctccaccctttggttctcctcctccgcctcttacagacgtaatagcttgtgtagcaataactcatggagcagctctaaagaacctacagtagggatgggcaggttgtggcatgcaccaaacaccgtaacactcaggggttgctgaaattccagttgtactgtcttaaagacacagctctttgctcattctctgcccagctgtcttagcatttggtgataacaattagattattagatcctctgtaagtgaccttggtatcgtaactcatccttccttaattactttttttttcactgtagcttctattaggactttctttggccagttctttagaaagctcaattatttaaaataatcagtgaagtcaaaagcaggacatgcaggggctggctgaaatttcacataaggacagtttttgagggtaaatccctggttttgcagagcttgtaaagctggtaaacagcaacaccattaagaatcctggggagacttggcgtggtggctcacatttgcggccagcactttgggaggctaaggtgggcggatcacgaggtcaagagatcgagaccatcctggccaacatggtgaaaccccgtctctactaaaaatacaaaaattagctggacttggtggtttgtgcctggagtcccagctattcgggaggctgaggcaggagaatggcttgaacctgggaggtggaggttgcagtgagctgagattgcaccacggcactccagcctgggcgacagagcgagactccatctcaaaaaaaaaaaaaaaagaatcctggggaaagaattcctattacttaagaggatctaggaaaggtaaaagaaaagtaagaggcaaccgcatggtttttagttcttttgaagtcactcccttcatgtcagcttcagagactgctgttatggaaaggcaaggcttccctcttcccaggccatttttttcggtgagtcaaatcaaacatcttactaaaccaggaagtcttgcccaattatctttttcctcccactacatttgtccaactgattgatatattagtgatataattattgtgaaatatgaatccctgttctgtaaagtccacatctttcctaagttctctgcttccaatccctgttatttaattaacttatttatttagagatggggtctttttacgttgccagtgctggggtgcagtggctattcacaggcgcaggcacagtacactacatatagacttgaactcctcgcctcaagccatccacccacctcagccttctgagtaggtgggactacagtccaggtacgtgccactgtgcttgaccctattattttaaaaatgggttgataaattcttagggaagccccacttagtgggattatgagggctcctagataaatattgttccttgttgaccaatctttccctctttctgcctcagcttccgccaagaacttcttacctgggcatgtatttctatcctattcactttttactctctggcgtggaacttcttcctaccaaactgtcatcctctgcacctctcctggccttcctcacaagtttgtaagcattaagaaggtgcgctgcatgcttcattaaattcctccttggaagggctgagttcaccctgttcttctcaagtgcaattttctccaagtttcttccctacgcaatgtttgtattgtgttgggaccccttccagttattattaattttcracacacagctaccatgaaagtcttgctatgaagtaactggcaaaactagaracaccgactggcttcctctcaaaggctcggcgtgcccacagtggaggacgggaagcattctccaatccgaaaagtctggaacgctgtggcaactattttgctcagggcaggcagaagacggtggttctttggtacattccccttcttactgagcttcgtttactgaggcttctcctcaacacgccaggatccagcatgtataacacctttggagtgggctgtctcggggctgaggagcgaaacggggggctggttatggagttccagcatggggttacttagctcgcccagacttggaaaccagccagcgtgatgaggacaggtagtggacgcgattgcccaccccttgttaatgtgttaggattaaacagacaaacgggcccgcacaccgcctgccccattctagcccgccttaattctgggttccctttccccgcctctacaggccggctagtcctggcccctcacttgggacgcctctgtccctgatgcgaggcgcatgcgggaccgcttcccccactcccctctccgccaggaggaggagccgaggggttggccccgtacccggctgtggcagaaggggccgcgaaggccgggccaggggcgccacgactgcccagggcccgcccgcggcccgcccgccctctagccgctgggccccgaatggcagatccgcgctcggaccatcggcatcgcctcacatcgctccgccccgcgccgccctcccattggctgccgctgagccctcgggcccgcgcctcgccccccggcggccctggcagcgccgcagcccggagcggggtcggaggtgaacggcctggagtaaccccggacgtagtcacctcatggagctcgccggctgaggtgggagacaggggcggggcgggggcgggtcaggcccctgaagccccgccccttctccgtgtgccgggccggcctggtgctgcacgcctgtcagccatcgcccgagccgccggcgtctcctcccgcccagcagttcctccacgcaggggctccggaatcgcccgaccgcacacgttgccaccctgaggtgaggtgagggccggcccagaacctgtgaccggggacctggagaaactggggccaagggaggggcggcggcaggcagggggccgcctcccagcctccgctcacccgcacgcggcctgggctccacactatccagatcgggtgcggggcagcccagcccttcccgcagctctgaggccttgaggtcccctccctagagacatggagaggtctggggtctcgggaggtggggattcagatcccggaactgggaggcgtacagttcagggctcctctaggaaggggggctggagtttctgcctggagctcgcccgccacccctcttgcccagctccagcgtggtctgattccttccagacccctctccaatccgattctgggctcgggagagggagaagaccacgtgggaagggggcgttgcgggttgggtctgattgcattgaaagtcctttctctcttgcagagtgaggtgtggggtgcagacctcacttgctctctccgtgcctttgtatcgtggcgagagccagggccaggcaggttgtatctgccagttcctgttcccaggattttattatgttctctgcgagggacatagtaaatgtacatgccttttgttactctcctcgtttgccatgctgatcaagggaagttactggaaataggacgtaggaagctgatgtgaagctaatgatttcacaggaaaatgtgcgtgaaggtcctgcccggatcggggccaacattattttggatttgagagtgggagagtggacactaatggacacttgaaatcacctctaaaaatcagggacttcgtgtaggccttgtgggttctatagagacatttaagaatataactgctcaggagaaatagtttaatttcagatatttttgtttggaggtttaagactggaataaaaaaaaagaccctaggccttcctgattctgtttctacttaagcgatgtttcagtaatttcctaatgtgtggataaacctaataaccacatcttcagtctcagaagtttatttccttggattttctctctctttccattcattttttccctcccaattcggtagtatagattgagaagcatgctttctttggttacatggtctyttctcactcagcagggaagaatactcatatttgtcccttcttgagggggatgccctggatgtctgtgatgagaaggatttctgtggtgcttatttgacaggcacttttcagaaaagcattgtggcctaatagagcaggaccacagtttacctgtccagatagatgcctgcttgctacaaatagcaagttttttcccacttctcttgcctcagtttcttcatttctcagtaaaactgaatgcataacaggaggactgatgtgaacccaagaatattaaacattttaaagtgggcatatgaaagatgccaaaggtaaagtattaatttatgaagccatctgtgtttactagtgttgtagaattttgttgttgttgttttgtttgtttgtttgagatggagtcttgctctgtcacccagactggagtgcaatggtgcgatcttggctcactgcaaccttcgtctcctggtttcaagagattctcatgcctcagcctcccgagtagctgggattacacgcgtgcgccactacgcctggctaatttttgtattttcggtagagacagggtttcaccatgttggccaggctggtctccaactcctgacctcaggtgatccaccctcctcggcctcccaaagtgctgggattataggcatgagccaccacgccaggcttgttttgttttgatttaccagtgcataatagaaatacatcaagcataagattaaattgctttttaaaaaggaagtcttgggaaatggtggcatttatcttagtgaatttatagttcaaaaactaggtaatgctgaagacctggtattgtgaaagccagcctcagagaacgctctctcatctgatgttgacctctctaaagtgctgtgaacaggttcaggtgtagatcactatgtaacattatttcctttgcagtcaatgactaggaaaatttttatacctgtcacgtggactggtttaacaggtttagggctagtgtttttctttctttaaaatctttttttcctttaattggatggctaatatcctaatagtcttagttgaggaaagaagtaaattaaaatacaaactgtggaataatgcattagaaattagtattttcaattgtgggaggagaagagaatccttttgtaattcagaaaaaaaagttatctcattatctaacatgttcttaaagattaacaattatagaagctgccgggcgcggtggctcactcctgtaatcctagcactttgagaggtcgaggctggcgaatcacaaggtctggagatcgacaccatcctggctaacacagtgaaaccccgtctctactaaaaatacaaaaaattagctgggtgtggtggtaggcacctgcagtcccagctactcggaaggctgaggcaggagaatggcatgaacctgggaggcagagcttgcagtgagctgagattgcgccactgtactccagcctgggtgacagagtgagactccgtctcaaaaaaataataataataataattataggagctatgtgtcaagtatctttccaaacccgtaaaacagtaagattacaaaaaagcgaataaacagtagagactcattggctaaaaaattcctattaactattgagataattaccattaatcttctactttaacagattattaacagattattaactggttttttgcttgtttcaatttaattttattttattattttttggagtcggagtctcgctcttttgcccaggctggagtgcagtggcacgatctcggctcactgcaacctccacctctcaggttctagcaatcctgcctcacccccctgagtagctgagactacaaggtgtgcrccaccatgcccggctaattttttgtatttttagtagagatggggtttcgtcatgtcggccaggctggtcataaactcctgacctcaggtggtccgccctcctcatcttcccaaagtgttgggattacaggcgtgagccaccgcatctggcctccattttatttatttatttatttatttgagacagagtttcactcttgttgcccaggctggagtgcaatgatacaatctcggttcaccgcaacctccgcctcccgggttcaagcgattctcctgcctcagcccctcgagtagctgggattacaggcatgtgccaccacgcctggctaatttttttgtatttttagtagagatggggtttctccatgttggtcaggctggtctcgaactcccgacctcggataatctgcccacctcagcctcccaaattgctgggattatgggcgtgagccaccgtgcttggctattttattttatttttttgagacagagtctcactctgtcacccaggctggagtgcaatggtgtgatcttggctccctgtgacctccacctcccatgtgcaagcgattctcctgcctcagcctcccgtgtagctcggattacaggcgcctgccaccacacctggctgatttttgtatttttagtagagacggggattcactgtgttggccagcctggtcttgaactcctgaccttgtgatccacccacttcggcctcccaaagtgctgggattacaggtgtgagccactgcgcctggccactttattttttatgtatttatttatttttttggagatggagtctcactttgtcacccaggctggagtgcagtggtgtgatctcggctcactgcaaccaccgccacccgggttcaagcaattctcctgcctcagcctcccaagtaggtgggattacaggcgcatgccaccatgcctggctaatttttgtatattaatagagatggggtttcaccatattggccaggttgttctctaactgacgtcaggtaatctgcctgccttggcctcccaaagtgctgggattacaggcatgagccactgtgcctggcctttatttttaagtgtttttgatttattatttttttagagattctctcgctgtgtcacccaggccggatggagtgcagtgacgtgatcattgctcattgcagcctcaacctgggctcaagcagtcctccaccttaccttctggagtagctgggactgcaggtgtacaccactgcgcccagctaattttaaattttttttgtggggtggagtgggggtctcgctttactgcctagactggtctcgaacccctggcttcaagtgatcctccgacttcagcctcccaaagtgttgggattataggtgtgagccattgcactcagcctgtttctttaattttaaaaaactgtaatgagtactgtattcgcttgaatctaatggactatttgaaggtgatattaaacaggtaagaaactatgacaaatagtgtcataaggatgttgcacttacactgtataaatctgattgatatggcattaattcttatgagtttagctggccaatctcatttaagtgttctctaatgatgcagttctcttactaatttgttactttttcaagttaccattgggctgtctagtcttaggatgtttaaggaggcaagtgaaaagtggcttcagcaagggctattcagtgccctgcctaaaggttggtggccccagttggtcttgcctttcgatgatgttgagacttagactcattccatccttttagcatgccatactcatgctgttttatataaggaaccacaataatgtttaccattccatgacatcaggactggaaattgcatggcagtactatttatggagtggttatttcagatagaataaaattgtataaattattttctttattttgagacagggtctctctctgtcatcccggctggagtgcagtggtgcaaacatggctcactacaaccttgacctcctggagtcaagcgatcctcccacttcagcctcctgagtagctgggatcgcaggcacatgtcaccatgcctagctaattttttaattttctgtagagatgaggtctcagtgtaatgctcaggctggtttcgaactcctaggctcaagcaatcctcctgccttggcctcccagagttttgggattacaagtatgagccaccatgcccagcaaagttggaaaattccgaatgaactcatgaagtttaaaaaaacagactcagttttggggagtctttctcaagaaatataaggcctcatttatgaatatttggttatcccctttgatagaaatagagtataatactyttaatgaagttcctgtaaaattatctttttttttttttttttttttttttttagacggagtcttgctctgtcgcctaggctggagtacagtgacgtgatctcagctcactgcaacctccttctcctgggttcaagtgattctcctgcctcagcctcctgattagctgggattataggcgcacaccaccatgctcggctaatttttgtatttttagtagacagggcttcaccgtgttggtcaggctggtcttgaactcctgacctcaagtgatccgccagccttggcctcccaaagtgctaggattacagttgtgagccaccgtgcccagcctatcttctttttttataagcatttttcaaatctgttcttagttgtgtatatattttacacacatgccaagatttggaatagtaggttgataggagcttgattagtttttaagtttattaggagtaatatcagtagattagcagcaagaaaatgaattgctgggtcctgttttatgctttagcatttagtggtattcctggccctggcaaggcaagctgtttaattttactttgattctatctcaaaattcaataacttaatagaacatttagtactggaaagtacctaagggattttcttttccagttttccacttaatatgagagaatattttatctgatgtacgtttgaaagtttccaacgataggcacatctggcttaaggcatcacggggcaactgatttttgggagttcttcataattttcaacttaaaactgcctccctaaaactgcataggatgttgtagctacaaagraattaggaatttttgctttaacctgtaaatgtctccagcatagatctctgttaggtaatataaagtataatgccttaacacatccgtaggacttgaaggcaaaaaaaataagcagtatttccttaaggaagaaatttcttttcttttttttttttgataaggtctcactctgtcaccctcactggagtgtgctggcacagtcatggctcactgtagcctcactgcagcctcaacctgtcaggctcaagtgatccactcacctcagcctcccaagtagcggggactacagacacacaccaccatacctggctatttttttttttcttaattttggtagagatggggttgcgtcatgttgcccaggctggtctcaaactcctgggctcaagcgatcttcctgcctcgggctcccaaagtgttgagattatacagccatgagccagttcttttccttgagactctggttttctctaaatgcagctctatgaaataagattacgagcgtaaattaattcatcctagaactttctgaattcacaaaatggcattttacctggaggcctttaaatgtttctagaggataatgtttgaaataacgacttagtttatgtctcctagttttgtaactcaaatattcgttgcaattctgataaaacatgaagcctggccaggcacggtggctcacccctgtaatcccagcactttgggaggctgaggtgggcagatcacaaggtcaggagatcgagaccatcctgggtaacatggtgaagccttgtctctactaaaaagacgaatgtggtggcaggcgcctgtagtcccagctactcgggaggctgaggcaggagaatggcatgaacccgggaggcggagcttgcagtgagccgagattgcgccgctgcactccagcctgggtgacagagcaagactctgtctcaaaaaaaaaaaaaaaaaaaaatgcagcctgtgaaagcctggtgtttacacagcattgtgaggcattgagggtggtggatctaaaacaattagaagaggctgggcacggtggctcacatctgtaatcctagcactttgggaggccaagatgggaggattgcttgaggccagcagtacaagaccagcctcgttaacatagcaagacctccatttctctcctttttgttgtttttggaagagaggataacttttcccagcctcatctaggagataacccagagtcaattacatagtaacacatattaaagaaataagtgaataacatttcagttgtctggctaaatcctctgacagatatgagataagggatcagagtagcatggaattaattgaggaaagctttttattaaacttacttaaaatcttcagttggcaatacattcatgtggttcaacattttattttatttgtttatttattttttgagacagagtctcactctttgtcaccccaggctagagtgcagtggcaggatcttgactcactgcaacctctgcctcctgggttcaagcaattctcgtgcctcagcctcccatgtagctggaattacaggcgtgtgccaccatgcccagctaattttttgtatttttagtagagatggggttttaccatrttggccaggctggtcttgaacccctgacatcaggtgatcctccggtcttggcctcccaaagtgctgggattacaggcgtgagccaccgcacccagcctgtttcaacattttattttatattttattttattttatttttgagacaatcttgctttgttgcccaggctggagtgcagcggtgcgatctcagcgcactgcaatctccacctcccaggttcaagcaattctcctgcctcaggttcccgagtagctgggattatgggcatgcgccacgctccaccacgcccctctaatttttgtatttttaatagagacagggttttaccatgttggccacgctggtccggaactcccgacctcaggtgatctgcccacctcggcctcccagagtgttgggattacaggcgtgggccactgcacctggcctggttcaacattttaaaagcacaaaagggggccatgtacgttggagtacaatggcctgatcttggctcaccacaacctccgcctcccaggttcaagcgattctcctgcctcagcctcccgagtagctgggattacaggcatgcgccaccatgcccggataattttgtatttttagtagagacagggtttctccatgttggtcaggctgttctcaaactcccaatctcaggtgatctacctgcctcggcctcccaaagtgctaggattacaggtgcgaaccaccacgcccagcccgaaacacatttttttgtttgttcattgttttgttttcgagacagggtctcgctcttttgcccatgctggaatgcagtgatacagtcacggctcactgcagcctcaacctcctgggcttargtgatcttcccacctaagggtcccaagtagctgggactacaggcatgtgccaccacacccagctaattttttctgggtttttttttttggttttttttttctttttttgagacgggttcactatgttgcccaggctggagtacagtggtgcaattatggctcactgcagcctcgacctcctggaatcaagcagtccgcccatatcagccttctgtgtagctgggaccataggcacgtgccattatgcctagcaaatttttaatttttttattttttatagagacggagtctcactttgttgcccagcctggtcttgaactcctgagcagtcgtaatgcctcagcctccgaaagtgttgggattacaggtgtgagccactgtgcctagcctgttgtatacttctattgcatcacatccagtgatgcacacacagagtaaaccacacacacatcatacaaggatgtcagtttttcctaatattggtgatatttagtttgaatacttagttaagatggtatccatcagatttctccattgtaaagatacttttcccttttgtaattaatatgtaagaatatggccaggtgcagtggctcatgcctgtaatcccagcactttgggaggctgaggcaggcggatcacttgaggtcagaagttcgagaccagcctggccaacgtggtgcaatcctgtctctattgaaaatacaaaaaaactagctgggtgaagtggtgggtacctgtaatcccagctacttgggatgctgaggcagaagaattgtttgaacctgggaggcggaggttgcagtgagctgagatctggccattgcactccagcctgggcaacagagcgagactctgtctcaaaaaaaaaaaaagctatatatatatacacacacacrcgcgcgcacacacacacacatatgtaagatatatatatgtaagatatatcttatatacgtatatatgtaaaatatatatgtaagatatatcttatctatatgtaagatatatgtatatataatatatattatatatatgttttatatatatatatatatgtaagaatatgttgttttcactgagcatggtggctcatgcctgtaatcccagtgctctgggaggctgaggcagatggattgcttgaggacaggagtttgagaccagcctggccaatgtggcaaaacctcatctctactaaaaatataaaaattagccatgtgttggggcacacgcctgtaatcccagttacttgggaggctgaggcacgataattgcttgagtctgggaggtggaggttgcagtgagcggcgatcacgccactgcactcacatctgggcaacagagcgagactccatctcaaaaaataataataataataaataataaagaatatgttgttttctgaaaaccctttatccaatagttttaacatatatttacgatatttgccaacatcagttattgcattggtgttttttttttttttttgagacggagtctcactctgtcgcccaggctggagtgcagtggcgcgatctcggctcactgtaagctctgcctcctgggttcacgccattctcctgcctcagcctcctgagtatctgggcctacaggtgcccaccaccacccccggctaattttttgtatttttagtagagacggggtttcaccgtggtctcaatctcctgatctcgtgatccgcccgtctctgcctcccaaagtgctggaattaccrcgcccgtatagcattggtgtttgtaaaatgaattatgttttctaattgcatcattatcggaggtaattattttgagattttgctgtctgaaaatatgtcctgtcctcacaattgatcagcaacctattgtgtctaaaattctagattgaaaataattttccttcagaattttgaaggcattgtttaataaccttcaagcttctgttgttatttctgataagtctgaaaggcattcaaattcttgatcatttgtatgtgaacttttttctctcaggaagcttgtaggatcttttcttgtgttcagtttctgaaatttcagtgatgtgccttggtgtctctttttattcattatggtaggcacttgttgggcctttttaatctggcaatgaccatggcaatctggcatgattatcagattaaaatttttgccctttgttttgttcttgcttttgggagcttctgttacttagatatggaccttctgaacaggttctctcatcttctttttctctcctgttgttcatcactttaaatwttttttttttttttgagagacagagtctcactcagtcacccaggttgggtactgcaacctctgcctcccgggttcaagcagttctgctgcctcagcctcccaagtagctgggattacaggcgtgtagcaccacacctggctaatttttgcatttttagtatagttggggtttcaccctgttggccaaggctggtcttgaactcctgacctcaggtgatcctcccaccttgccctcccaaagtgctaggattacaggcatgagccaccgcacctggccctctttgactttttattctgatttgtgaaagcttttctttaaccttatcttctgagttgtttcattgctgtgatcatatttttagcttttaaaaattctttcttgttaaaaaattttttttctttctttyttttttttttttttacgtaagtagggatggcgttatgctttgttgctcaggctggtctggaactcctggactcaagcgaccctcctgcctcagccttccaaagtgttgggattacaggtgcgagccgccgcacctggcctaaaatagttattttaaaaatatttcagaccagctgttgtgactcacacctgcagtcctaacattttgggaagttgaggctggaggatcgcttgagcaggaggttgagatcagcctgggcaacataacaaaaccccgtctccacaaaaatcacaaaaaagctagctgggtgtggtagtgtgtgcgtagtcccagctactcaggaggctgaggtaggaggatcacttgagcccttgtattagtctgttttcacactgctgataaagacatactcgagactggacaatttacaaaagaaagaggtttaatgcacttactgtgctatatggccagggagacctcacaatcatggcggaaggcaaggaggagcacgtcatgttttacatggatggaagcaggcagagagagagcttgtgcagggaaactcctgtttttaaaaccatcagaactcgtgagacttattcactaacacgagaacagcatgggaaagacccacccccaggattcgattacctcccaccaggtccctcccacaacacgtggaaattaaagaggaggtttgggtggggacacagccagaccatatcattcagccgctggcccttcccagatctcatgttctcacatttcaaaaccagtcatgccttcccaacagtccctcaaagtcttaactcatttcagcattaactcagaagtccacagtccagagtctcatctgagacaaggcaagtcccttctgcctatgagcctgtaaaatcaaaagcaagttatttacttcctagatacaatggaaatacaggcattgggtaaatgtagccattccaaatgggagaaattgtccaaaacaaaggggctacaggctccatgcaattccataatctagcagggcaatcaaatcttttttttttttttttttttttkagatggagtcttgctctgtcgcctaggctggagtgcagtggtgtgatctcggctcactgcaagctccacctttcaggttcacgccattctcctgcctcagcctcctgagtagctgagactacaggcgcccgccaccacgcccggctaatttttttgtatttttagtagagactgggtttcaccgtgttagccaggatggtctcgatctcctgacctcgtgatttacctgccttggcctcccaaagtgctgggattacaggagtgagccaccacrcctggtctcaatagatattttttcttatcgtttccctcctcccatctgctaccctcaagtaggcaattgttaatatcttacatagccataatactttttttttttttttttgagagagagtcttgctctgttggtcaggctggagtgcagtggcatgatctcggctcactgcaacctccgcctcctgggttcaagtgattctcctgcctcagcctcccaagtagctgagattacaggtgcatgcctccatgcccggctaaccataatactttagtcaaaactatgaaattaacattggtacaatagtaactaaactataaaactgtatttcctgggttttttttcctctagagatagggtccctctctgtcgcccaggccagagtgcaggggctccattatagctcattgtaatgtgaaactcctaacctcaagtgatcctcctgcctaagcttcccaaagtgttgagattacaggcatgagccaccatgctggccttctgtagcttttcttttttagtgatgtgtttttctattccagtatttaatgtaggataccacattgtatttagtggtcatgtctcattaatctcccctgatctgtgatagtttcttagtctttccatttttgtaatggcttgatgattttgaatagtactcatcaagtattttatagaatgtccctcaattcaaatttgtctgatattttctcatgattaaactagggttatgggttttttgggaaaataccgcagaggtgaagttgctttcccctcccctcgacccctgtagtttttaatggtttcttgttccctgtaatctcttttcttcaagttgcatttttttaatctacaggtagttatttgtttttagtctttcatgttgaagtttttctcagacatctggtaatctttattgtctgtttatatttaagaggaagtgttgaaagctgattagaggtggttagcttactacagtgtaatctggttgggcaactcaattagggacgttgatgttagtaactttagttatttttctctccttgagctggtcagattctccgaagaaggatcctctaggctgggcacggtggctcacacctataatcccagcactttgggaggccgaggcaggtggatcacgaggtcaggagttcgaggccagcctggccaatatggtgagaccccgtctctgctaaaaatacaaaaatcagccgggaatggtggtgcgggcctgtagtcccagctactcgggaggctgaggcagaagaatctcttgaacctgggaggcagaggttgtggtgagccgagatcatgccactggactccagcctgggcaagaaggatcctctaatctctctccgggaaggtgacgattagggaaagaggaccggaaaatcttactcaatatattgacttaatttatttattttcagtattgtaccctgccccttactgttgctggtatcccccaatctagaaaccctctgtttaaccctctctagagaataaacctaaagtctcaggatggtagagcagcaggcacctgacttcactagttggggagaaaatgtaatgatctgaagcttcggaaacaatttcaaccaatcctccttattttctttagctctctttcacctccactttctgaacattttggggaacgtatgacataaattgtgttgatcgtaagtttaccacagttgggctatgattcagttttcttgggcttgcctagtcatttattgctcttctgtctgctttccaagaaaattgtcttgttgtctacccagactttttaatttcttttttggtctttttgtgggttatgcctttttagtttatttatttatttatttttatttatttttttgagaaggagtctcgctctgtcacccaggctggaatgcaatggcatgatctcagctcattgcagcctctgcctcctgggttcaagygattctcctgcctcagcctcccaggtagctgggattataggtgcacaccaccacgccccgctaatttttgtgtttttagtagagactgggtttcaccatgttggccaggctggtctcgaactcctgacctcaagcaatcagcctgtctcatcctcccaaagtgctgtgattacaggtgtgagctgccatgcccggcccaacccactgtcttcagacagttttcgccatggtgtccaggctggtctcaaactcctgggctcaagccatcctcttgcctcagcctcccrgaatgctgggattacaggtgtgaaccaccacacctggcctagaggtttttttttctttttaaaaaaatttttaaatttcttttttattttttatctttttatttttttgtttatattttttgtgttttcagagattattatactactgtaattgtatatttaggtgtcaatagccacttagctagggacaaatcttatttatctttgaataatcagcatctgtttcactatttggaacacaagttcttgttattttaaaatttaaaacttgtggtaaattaaaatagtttttaaaataaaattttctgtaatccttttatgaatcactgaattaataaccaaaatccattaaaaaataaatgacaaagtgaacaaggcaaattcacttattgtctttgaaaactttttttttttttttttttgagacagagtctcactctgtcacccaggctggagtacaatggtacaatcttggctcactgcaacctctgccttctaggttcaagcagttctctgcctcagcctcccaagtagctgggattacaggcacccgccaccaggcctggctaatttttacatttttagtagagatggggtttcaccatcttgaccaggctggtcttgaactcctgacctcgtgatccacctgccttggcctcccaaagtgctgggattacaggcatgagccactgcacccggcctctttgaaaacatttaagtgaacttactatgacttgagaggcaaggacatgttgtaaaagcttggatacttttatcagtggctatgaaaactaattgctgcctctttattagaattgcatggaaaatacagtgtaatttgagttcaaggagaatatgctaactaaatttggtaaaatctgttgtatttatttagaaaaatatctctgggccggccacagtggctcacgcctgtaatcccagcactttgggaggctgaggcaggtggatcacctgatatcaggagtttgagaccagcctggccaacatggtgaaacgccgtctctactaaaaatacaaaaatcagccaggtgtggtggcatgcatctgtaatcccagctactcggaaggctgaggcaggagaatagcttgaactcgggaggcagaggttgcattgagctgagatcgtgccactgcactccagcctgggtgacagattgagactccgtctcaataaaaagaaaaaaaaaatttctgaatgaaatgcaggctgactttttttgtttttgtttttgtttttgagacaaartctcattctgttggccaggctggagtacagtggcacttcagcctcaaccttctgggctcaagtgatcctcccacttcagcctcccaagtagctgggaccatgggcatgtgctaccacatccagcttttttttttttggtagagatggggtttcgtcatattgcccaggctggccttgaactcctggactcaagggattctcccrcctcagcctcccaaatggctgagattacaggcatgagccaccactcctggcccaggctgactcttaaatacattagctgtaattagctttaccacattttcaggaacataaggcacagtttgggagccttccgcaaaaattttcaagagtctccaaataaaagctgaataatacattatatgtatagtgtatatataggatatatatatgtatttaaaatacatatatatttaaaaatatatgtgtgtgtgtgtgtatatatatatatatatatatatatatatatattttttttttttttttttttttttttttttgagagacagtcttactttgtccacagcctggagcgcagtggtgcattcttggctcactgcaacgtccgcttcctgggttcaagctattctccttcctcagcctccccagtagctgggattacaggtgtctgccaccatgcctggctaatttttgtagttttagtagaggsggggtttcaccatgttggccagctgttctcgaactccgaaccttaagtgatctgcccgtcttcatctcccaaagtgctgggattacaggtgtgagccactgcgcctggccacatgatatattttttaaataaaagagaatttggcattgtcaacaattttatataatgaagaaaataatttttatttgagtaggcagactggatctggaaaaaggccttgtttcagaactaagacagcaattatatgagccttccccaaaggtcagcttcttttttagtcctctttctggagaaagaggtcttaacctaattcagggcaggagtttaggaatcccaaacctgtatggaatgaaaattttgtatgagggtacatttttgtcaagaaaaggtccatagctttcatcaaatttccaacagttgagacacttttaagaatcgttggtttatgtacttaactggctgtctttgctgtctagtgaggttataaagtggagggggtgagggagtaaggattagttgtggctttaaggcttttttttttttttttgagacagagtcttgctctgctgcccaggctacagtgcagtggggtgatcttggctcactgcaacctccrcctctcgggttcaagcgattctcctgcctcagcctcctgagtagctgggattacaggcacacaccaccacacctggctaatttttgtatgtttagtaaagacgaggtttcaccatgttggcccagctggttttgactcctgatctcaggtgatctgcccatcttggcctcccaaagtgctgggattacaggtgtgagccaccacatctggccgctttaagactttttttgacatacctcataataaaatgtcatttacatcatgacctatatataactgaaacaaaaatttacaaaactatggatactgtcataaactatggtatatcttaacattttctatcttatttcattttcaaaatattggttataacttgctaaattgatttcttaatgttttgctgggtggtaacccataatttgaaaaacactggcctattgcattatagtttacaaaatcctttcatatattcttagttttcacagcagtcccatgaggtacatatgaccttctttaaacttaattaaattcgttaatttatttatttttgagatgggggtcttgctatgttgcccaggctggagtgcattggcttttcacaggtgtggtcatagcacattgcagcctccagcycctggactctagcacacctctgcctcagcctcccaagtagctgggactgtaggtgcacactactgcccagaagactttcttttttatttttacagatgaggaggcttgtctgtatgatatacagagacgttaagtgaccttcaagtctgcagtcacttgcaatatttgacagtcagagtttgagcttgattggtcctaggttttaactccactttcactgcatctttggttacatgatccaaactttttccttcctcttctcagttgtagggaataatactagctcagactgcataactggataaatcctaatattcctaaatgttgtcccttgtcatttaggggtcctctcggaagttttagatttccctaccagtgtaataggttctttccttttgtttcttctctgcccttaacgagtggttctcaagcgtgtatttccatcagtgtcaattaactgtggaacttaaagttgatatccctgggtctccagctgcaattctgattcagcagatctagggtggwgtttagactttgtaaaatttttaaaagctccgcaggtgattcttaaacataatcagagttgagaatttctaccctagatagatttaaattgtcaggcttaagaaggaaaccgaggatttggggagttgctagagactgtttgatcccttacagtttagggacttagtataatgggcactctgtcttccacctggctcccaatctttgtgtgtaggtgtaaccgcttgtaaacataatcagagcttaagtgaattgtagagaatctagtggttctcttctccccactgcctcttttttgatgaaatattagaaatgaaaattttgaaatgtattcatsgagtatacaattggaaaagccaccttgtgaaatggtaagcttgttctattgtttaatattttcttaaacaatagtctttatgtaatgtgtttgatttacagaattgaacaaataataaactgctaaactttgtgctttaagttaaataatagatttgaccagtaaaatagatacttcatatattattacctttgtattatgctgagcaaaacaggaattgacaaaagtttgtttyttaaaaaaaaaaaccttaaaatctttctctctttttctctctaggtctttytggaagtggatatctactcagacagtaagaattataagaggtcagttacaaataatactccttgtttacaatgtgataaaaattttgttcatgttgtaaaatatcaaactgtaggcttttgtgttaaaagttgacttccacaaaataatataggcagatttagggtggataacctgaagtgaacaaagagtctaacaatggtactcaactgtattctctctttaattcaggactagaatcagtggaaatgggacaggctgtggagtagcttctagagtgtctggacagctactcagtaattttccatacatgacctctcttttctgttggtttgtaggctcgtgcctgggaaatactattcagtacagttgctggacaggctttttagctgttcacactgagttgcctccaatctatgtaaccgtttagtgaaagctgccttcatggtcttcttagytaggaacttgaagttggccttattgagactctcacttattagcccaggaacygtgttttattaactctctttttcttctcccatggagtcaaagaattgtgccttgtggattttctcttttgtgtgtggtcatctaacttcagtcagactgcaagctagaatctgcacctgagtgccttgctttcttactttgtgaagaaggcacccattatcttctgttagttgggatgggattttattttttggatctactgttacttttaaacttaactatttactgctgtaaatgtgaaagaaataggctttttgctgctgtaacttttggtgttcttcagtgtggtcagtctgttggaactttcccttccctccccctttctttctttttccctcccttttaccccttttccctccctttccctttttctctgccttttttcttcctttttttttttcttttgagacggagggagtctctgtcacccaggctagagtgcagtggcgcaatctcggcacactgcaacctctgcctcctgggttcaagcaattctcatgcctcagcctcccaagtagctgggattacaggtgcccaccgccacgcctggctaattttttgtatttttagtaaagttggggtttcaccatgttggccaggctggtcttgaactcctgatctcaggtgatccgctcaccttggcctcccaaagtgctgggtattacaggcattagcgactgtgcctggccaaaaataatgggagccctttaaaggttttttgtttttttttgttttttgagacagagtctcgctctgtcacctcccaggttcaagcgattctccttacctcagcctcctgagtagctgggattacaggcatgcgccacgctcggctaatttttgtatttttagtagagatggggtttcactgtgttggccaggctggtctcaaactcctgacctcaggtgatctacctgcctcggcctcccaaagtgctgggattacaggcatgagccactgtgcctggcctgtatttttagtagagatggggtttccccatgttgggcaggctgatcttgaactttttttaagacctaatatttcaagggagaaatgtatagtaaatttagacagcaaattttttttgttgcatgatactttttttttttttttttttgagacggagtctcgctctgtcaccaggctggagtgcagtggtgatcttggctcatgttgcatcatacttttatatttgattctagttttgttttattttattttattttattttattttattttatttttgagacggagtctcactctgttgcccaggctggagtgcagtggcgtgatctctgctcactgcaagctccgccccctgggttcacgccatactcctgcctcagcctctcgagtagctgggactacaggtgcccgccactacgcccggctaattttttgtatatttattagagatggggtttcaccatgttagccaggatggtcttgatctcctgaccttgtgatccacctaccttggcctcccaaagtgctgggattacaggcgtgagccactgcgcccagctgattctagttttaaagatagaagttagctaaagtaatctccagttcactttcagaaaatgttaggctgggctcagtggctcacactgataatcccaaccgtttgggaggccaaggtgggaggatcacttgagctcaggagtttgagactaggctgggcaacatgtggagatgctgtctgtacaaaaaaacaaaaagtagccaggcatagtgatgcatgcctgtagtcccagctattttggaggttgaggttggaggattgcttgagcccaggagtttgaggctgcagtgaacgaggatcgtgccactgcactctagcctgagtgacagagcaagaccctgcctctaaaaaaaagggaaatgtctatagttttctttacttttctttttttttttttttttgagacagggtcctgctctgtcaccaaggctggagtacagtggtgctatcacagcatactgcagtcttgaactcctgggctcaaacgattctcccacctcagcctccccagtagctgggactacaggtgcatgccaccacatgcagctaattaaaaaaaatttttttttagggatgggatctcactatagtgcccaggctggtataggttttctttagttttgttttagcagtcttgccaatttgttaattactgttttattcttgtaccacagtgattctcaacctttagggcttgtgaaagcatagatkaatggatgctggcctgtaggttctgatatggttagttggtctggggaagggcccaagaaatttgcacttctaacaagttcccaggtgatgccaatggtccagggaccacactttgagaaccacactactctagcatttataaatgctgtttgtctctgtaagtgagtaaactgactcacaaattacaccagaacaatcgtgcatatgtaattttcacatgttgagtggtgattcccaaacattttaaagtattgacggtttctcatctgatgtcaaggaacactgttgtccacttactttcatactttacagtgagttrtagcatacagagttattaataatacatttattatctattaatgtaccatatcttagagcacttcaaaatcacaattgggaattattatttttctatttttatttttgcagttgcaagatttaatagagtgaagacagagctcccatacaaagggaggggacccaaagagggtagctgtagctggctcgaatgcctgggtttatatcccgatcattgtccctcctgctgtgctgtcaggcaacagatgattggctatttctttatctcctgtttttgcctaattagcattttagtgagctctctttagtatctgattggttgggcgtgagctaagttgcaagcccggtgtttaaaggtggaagcggtcaccttcccagctagtcttagggattcttagttggtctaggaaatctagttattcctgtctctcagtcccccctctcaacaggaaaacccaactgctgttggggaggttggccaacaaccactctaactgcttcctgctgaattggggcgtagtaraggttgtgcagttgagatttcctcgggaggggtgcctttgatgtcattaacatcagagcatgggctagcaggccggtccaggggtccgtggtagattttactcatggactgcatctggggmtccatttgaagaacgatttgtagttttactgcttcgattctggaaaagacaaacttaacaaggaggttaaagatacagggtccaaagaggagtaacaatattatagctgctagaggtcctaagaaggggagaatccagggcatccattggctgaggaggccccagggtccagtgttttgcagctcctttgctctacgttatattcgaccttgaatttctttaactttctcggtgatgattccggattgattaacataacaacagcatttttcctctaaaaataaaaaggttcccccgctttccgcggttagcaagtctaaagctcttcgattttgaaggactactgctgctagggagttaagttgatcttgcaaggtgaccagggtatcagcgacccattccatgtcaccatttagttcttgagacagtttgtagtagaactgagtagaggttgtgataccgccaatgccagtagctactcygcctagcactcctgctccaataacaaaaggaagaatgggtactcttttgttgcggggcttaggtatgacatgattgtataaatcttgttcagtgtagatgggcataggggccactaagaatgagaggaagcacacagattctgaagagccattcaaacaatgataggctgaggtaccacagacaaaaaatattcctgagggtaggcagactattcgtgtgggaggagttacccacctgatgcattgggagttggytgtgtctatagtattgctaaattttacacaggtgaggtttgaggtatgggttatttccagattggaaagaggacctactaaaacagaagtggtgtttatttctgtgctgaagttgttccattgttcaggtatagggattgaaatgtrtggcctaaagtgcagggggaggcacatccaacagttagtagggttttgggccgagacctcatggagcccagtcagggtggtattaaataggcttaccaggccagtatgggtatggagggtttcatgtagttttgagagatctagtcctttgtaggggccaggggtgctatgtacccaggtcagttgggagattacttcctttatgtgtttttctrttgcctgatcttgaactccacccccatcagacatactggtatgagtgaagtgagtcctccaagtcctccaggacaactgggattaatcgtttttcctgtccaataatgagtatttgcatgcatgcaaagagtggcagagttatagcagttgtggggcatatgggtgtgggcagtgaaggtgggggttcccttagataaactcctatacaatggggcatcaatatttccgggacgctgcattctccatagaaactcttgctaaggggagctactggcatggacggggcatggacggggtgcagtggcatggacggggtgcagtgagagtgaaagggggtaagagaacagtaaagagaaaaatatgataagggagggccaggggatttacgattttagttactttccccctggttgtcatttgaagagcaggcgcagatcctctagaggttcacaggaatagctagcattgtctcatggatttttgagttcctttggcagtatccagggtttgacttgagtgtgatgtatccaagactccgctccagccactttaactgccgttagggtagataaaatggctgggtagtttccttcccaggatgtatctagggatggggaattagagggaagggacttgactaataccatgtcaccagggtggaatagttcctttccctcttcttggggacaggctccctgtaatgttttaagaacctgttgatatttggctaaggagatgatgtctgcaactaagttggctgtctctcggtcaagcccaagttcattggttaggaagggccgtccatacagcattttgtatggactaagtcctgctttttggggagagtttcggattcttagtaaggctataggcaacagagcaggccatgcgaggtgggtttcctggattagcttttttagatgtcatttgagtgttttgttcattttctccacctttcctgaggactgtggcctccaggcgcagtgtgagtgatattgtatacctaacacctgggatactccttgggttactgtagccttgaaagcagggccattgtcactctgtaagccttggggaagtccgaatctgggaattatttcatgaacgtttattacctcttgggccttttctgtcctacaggggaaggcctctgcccaaccagtgaaagtatctacccaaactagtagatactgaaatccctgagatttgggcctatgggtaaaatctagttgccagtcttctcttgggtagtggcctgttctttgttctcctgaaggagcttggcgataaggcaggggattatttctttggcacacttcacaggccctgactatctgcttgatagttttgaaaaggcctggtccagtaaataatgatttggccatctgatgggtgctatcaatacctaagtgaagggtttggtgaagggttttaagtaatttccattggttagctgcaggcaaaagtatttttccttctttggtggctagccatcctgaggggaggaaactatgtccccgtgaggttccccattctatttcttcttctgagtactggggcttggtttcctggaggggattaccccatactaggtgtccttctataagcatttctaatggagggtcctgccttgcggctcttttggctccaatatctggttggcggttcccttctatttccctttcctttcctttcctttctgatgacaccggcagtgtaagactgccacctctttaggtttctgtacagcctagaataatctcctgatggcttcccgatgtttgataggtgttccttggaagttaggaattccctttctctccatattgctgcatgggcatggaggactaggtaagcatacttagagtctgtatatatatttatcctttttcctkctcctaattctagtgcctgagtgagggctatgagttctgccagctgagcagtagttgctggagtgagggcattactttcaagtattccattatcactgaccactgcataccccacttttcaaagtcctttttctacaaaggaacttccatcagtatacaagttgaggtsgggatcagtcaagggaacctctaaaaggtccacaattgggaattattaatcttttttttttttttttttctagacagagtctcactctgtcacccaggctggagtgcagaggcatgatctcagctcactgcaacctccgcctcccgggttcaagtgattcttctgcctcagcctcccgagtagctgggattatacacttgttaccacacccagctaatttttgtatttttagtagagacggggtttcaccatgttggccaggttggtgttgaactgctgacctcaggtgatctacccacctcggcctaccaaagtgctggtatttacaggcgtgagccaccgcgtccggccaatctttttttttttttttttgtacagatgggatcttgttttgatgctcatgctagtcttgaactcctggactcaaacaatcctcctgcctctgcctcccaagttgttaggattataggcgtgagccaccgcgcccaggcttattttctgaattaaaataattgatctgggtacaagctatttaatactgagttgatctgtagttttgaaattttaaaataggatttttgagatgacagaagaaatattgtttcatttagtttgggtttttattgttgtgggctcttattttggtttttaaaaaatatttttaaatttttatgggcagcacttcattccataaaagagaatgaatgttgctgttttggtctttattaattagtttctttttctttcttttttttttttaaattatacttttaagttctgggatacatgtgcagaacatgcaggtttgttatgtaggtaaacacgtgtcatgatggtttgctgttaattagtttcttagttagctattggcagtatctaatcctaactggtaaggccctacatttagaaaaattatacttacttgaggtgattatagattttaaatttggtgatagattcattttcttctcatatcagtgtcagcacattagagccaaaagtagtcattttggggtgacattttaaaatgcataatttaagaaaaaactcatgaggacaagtaaagtttttttttttttaattaaaaattacctatctggagtttgttttaaaagtatacacatacgtaaaattcataggccaggcacagtggcttacacctgtaatcccagcagtttgggagcctaaggtgagaggattgcttgagcccaggagttcaagaccagcctaggcaacatagggagtccccatttctacaaaatatttaaaaattagaccgggcacagtggctcacacccatagtcctagcactttgagaggctgaggtgggtggatcatgagatcaggagttcaagaccagcctagccaagatagtgaaactccatctctactaaaaatacaaaagtcagccgggcatggtggtgggtacctgtaatcccagctacttgggaggccgaggcagagaattgcttgaacccgggaggcggaggttgcagtgagctgagatcgtgccattgcactccagcctgggcgacagagtgagactmcgtctcaaaaaagaaaaaaaaaataggccgggtgcggtggctcacacctggaatcccagcactttgggaggctgaggcggaaggtcaggagatcgagaccatcctggctaacacggtgaaaccccatctctactaaaaatacaaaaaattagctgggtgttgtggcgggtgcctgtagtcccaggtactcaggaggctgaggcaggagaatgacatgaacccgggaggcggagcttgcagtgagtggcagtcgcaccactgcactccagcctgggcaacagagcgagactccgtctctaaataaataaataaataaataaataaataaataaataaatgaaaaataaaaatagaattagccgggcatggtggcacgtgcctatagtcccagctactggggaggctgaggtaggaggatcacttgagcccaaagagtttgaggctgcagtgaaccatgattgtagtactgcatgctgtatgggtgacagagtgagaccctgtctcaaataaataaataataaaataaaagttatagcctctcaatatatagtgtttgaagccagatgagcattatgtagtttaaatattatttcaaacaaccattactctatccagacccttaccatttattcccccattactaacaaccaaaatatcaatatcacaacaagcagctttttcctactgcaaaggtttccccattgatcataattatttcctggacaccaccaaatgaaaatgagattaggaatgccttataggcttttgagaaaaatttctttgaggaaaagggaactggttttaatttatgggcatagttatcatgatctcaattttcctcccttgtagaaattaaaggccctgaaatagaatagccaaggaagttagttctcaaattgccttgcttccacgtctcagctatggtttattagatataacctctggctgacctcagatatagattattattcataacctgcctttctcacttttcattttctccatagctgtaagagctcattttggaggaataatggatgaaccatctcccttggcccaacctctggagctgaaccagcactctcgattcataataggttctgtgtctgaagataactcagaggatgagatcagcaacctggtgaagttggacctactggaggagaaggagggctccttgtcacctgcttctgttggctcagatacactctctgatttggggatctctagcctacwggatggcttggccttgcacataaggtaagagagagttcaatggtctacttatttaatctgtcttgttagttttgctgattatgttctgaaaagagcaaggatgatttcagctaagactgctttgccttttcctatgtcactgaactcaaagctttgttgaggaagtcagaaatgatgtatttttcagaaatcatgtatgttcccatcaaatttttcatgtcctactaggttttttttgtttttgtttttgttttttgagacggagtcttgctytgttgcccaagctggagtgcagtggtgcggtctcagctcactgcaacctccgcctcctgggttcaagcaattcttctgcctcagcctcccaagtagctgggattacaggcgcctgccaccatgcccagctaattttttgtgtttttagtagagatggagtttcaccatgttggccaggctggtcttgaactcctgaccttgtgatccgcccacctcagctttccaaaatgctgggattagaggtgtgagctaccccgcccagcctattttttttttttttttttgagatagagtctcactctgtcgcccaaatgggagtgcagtggtacaatctcagctcactgcaacctctgcctcccaggttcaagagattctcctgcctcagcctcctgaatagctgggactacaagtgcatgcccttgcgcctagctgatttctgttgtttttgatagacaccgggtttcgccatgttggccaggctggtctcgaattcctgacctcaagtgatccgcctgcctcagtctctcaaagtgctgggattaaagatatgaaccactacacctggccacttctacctgctaggtctttcagtgagacctagtgagtaagagttaggttgaggaacatcagtttttgtactactttgactaacattgttctaactatcttgatgattgataggacttctccaggtgttgtcaacttcgtagtaagtttttttgaactaattcatcagattgtcaggaagttatattctgtttctagcagggccagtccccaataaagggctgttaatagagctctcctttttctctagaaacacagttctccctaactgagaatgtcagtacatagtaacactagattgtttttatttatcgatgtttgattatataactagcgtgtgagatactaacctttggtcatttacttttcagttcttggattaaaaggtctggatcagtggttcttggttctcactgttcatcagaatcacctcggggagccttgggagataagccccatccccagagatttcgattcatttgatactggcttggtgtggaactggggcttttttttaaggtatccaggtgattgttgtgtacagccagcattcagattataggtgtaccctagataacataagttagggtggctgttgttgctgttactatcttggcacctttattattaatgggtcataaaataattcagctctattttatacactaaatatatcaactctataataaaatcctgtatgagatctggctggatgtgattgttctgtcttactgttatccctggggcttgggatcggggcttctgagagactaggcagtgttcgttagtggtcaccctcatttagctatgtagaggtcaaaagaaaagtgtaaagcaagttaattatgttttacttcacaggttcctagaattgtaataaacyagagagataatttagcctaacactttttattttattttattttaaaaaattaatttaaaacattatttaaatagagacagaggtcttgctatgttgcccaggctggtcttgaactcctggcctcaagcgatcctcctatcatggcctgccaaagtgctgggattacrggcatgagccaccacacctggccacaaaatactttttgatagttgggaaaactaaggcccaatgaggagaaataacttgcctaagtttgaatagccagagaacttggattcaaactcatatcctgattttatttcactaacttttctactctactttcccgtccatacaggtgtcttaattatataactagttcagacaaagttggttttatggagttagtgaacaaagcattatctctgggttaaaaagaggaatagagagcagtattttagtggcagggaaaagggattaggtctttatgtaaacattttttattttatagttcacttaatgattggctctaaggttaatactagtggtggcattcttctctcttgaggtcatttggaagtgtgttggggggttgtgactggcaggactacttgcatttatcggacaaaggacaaaggaccaatgatactaaaccttctgtggtatagtagataatcctacacaaccaagaaatctgctactcaaaatgtcgtagtgcccctgttgagaaagactggtttaactctaaatccataaaaccacacagcaccttgagaaatctgtccagtttgagtctatgtgaaacataatatccatttgctggattaggaaactgagtttggctatggtgagataaatgtgttataagaaactcagctagtgatatcacaaggcagtttgtagttgccaagtcattcccaaagttgatggttcttatgcaaagtctatgtggtcagtggcatgagtgtctggaatttctttgcatgccttactgttgcaaaaatcatgtccgtagctcgtggaggagccatggattgaagtgtgatcagcagcatggaaaggagacaatgccagttccaactcactcctcagctagctaatgttctaaaatagaaaaaacgttttctgtttatccattccttaagtcacttctggatatggtgacctttggggtaattttaattgagtcaaattcatttgataggtgaaagacctctgttatgacatctgccactaattaggtgtgtgaccatggacagtacatattatctccttggagtcatctataaaaatgaagatattgattcagatgctccttttcactcctggaactcaaagttaaatagagactaagttgagtttaggatcagctcttagaacgaatagcctaatccttcatgggtgacatagattaagggggcaggtacattcctaggagatgttaactggaggtcatctgaaaccaaatgaagtaattgccataatgtaagatgggactgagtctctctctcaagtttaggtgctgagaagtctagtggtatgatggatgagcccaaatagaaaatagacttttcctgcgatggagatgatttgcctcatgtattttctagagtccaatgaaagactgggtgaatcactttcttttttctttctttcttttttttttttagagggagactcgctctgtcgcccaggctggagtgcagtggtaccatctcggctcactgcaaccttcacttcccaggttcaagcaattctcctgcctcagcctcccaagtagctgagattacaggcacccgctaccatgcccggctgttttgtatttttagtagagacagggtttcaccgtgttggccagactggtctcgaactcctgacctcaggtgatctgcccgcctcagcctcccaaattgctgggattacaggcgtgagccagcatgcccagccttttttttttttcttttgagacggagtttcgctcttgttacccaggctggagtgtaatggtgcaatctccacttaccgcaacctctgcctcccgggttcaagagattctcctgcctcagcctcctgagtagctgggattacaggcatacgccaccacgccaggctgattttgtgtttttagtagagacagggtttctccatgttaggctagactcgaactcccaacctcaggtgatccacctgccttggcctcccaaagtgctgagattacaggcatgagcctgtaatctgtgcctgtcagcctatgcctgaccctggccatttttttttttttttttttttgagacagtcttgctctttcacccaggctgaattacagtggtgcaatctcagcccactgcaacctccgcctcccaggttcaagatattcttgtgcctcagcctcctgagcagctagtactggaggtgcttgtgccaccatgcccggctaatttttttgtattttagtagagatggggtttcaccatattggccaggctggtcttgaactcctgatctcaggcaagccnnnnnnnnnnnnnnnnnnnnnnnnnnnnnnnnnnnnnnnnnnnnnnnnnnnnnnnnnnnnnnnnnnnnnnnnnnnnnnnnnnnnnnnnnnnnnnnnnnnnnnnnnnnnnnnnnnnnnnnnnnnnnnnnnnnnnnnnnnnnnnnnnnnnnnnnnnnnnnnnnnnnnnnnnnnnnnnnnnnnnnnnnnnnnnnnnnnnnnnnnnnnnnnnnnnnnnnnnnnnnnnnnnnnnnnnnnnnnnnnnnnnnnnnnnnnnnnnnnnnnnnnnnnnnnnnnnnnnnnnnnnnnnnnnnnnnnnnnnnnnnnnnnnnnnnnaaaaaaaaaaaaaaaaaaaaaagaaagaaaagaaaataagaccctaagtaaaaagtagttatagcttggtgggaatatacagacctcattgtagacaactgatttggctttttatttttagatatgatcagctagaggttgatatatcagccaggttgatatatttctggaactcactagtattcaattgaacatttaagaagaaaggctgaatgtggactttttttttttttttgagactgagtttcactcttgttgtacaggctggagtgcaatggcgcgatcttggctcactgcaacctctgcttcctggtttcaagcaattctcctcccttagcctcccaagtagctgcgattacaggtgctctccaccatgccgcactaatttttttttttttttttgagagggagtctcgctctgtccccaggctagagtgcagtggcgccatcttggctcactgcaacctccgcctcctgggttcaagcgattctcctgcctcagccccctgagtagctgggattagaggtgcgcgccaccatgcccggctaatttttgtatttttagcagagacagggtttcaccgtgttcgtcaggcaggtctcgaactcctgaccttgtgatctgcctgcctcagcctcccaaagtgctgggttacaggtgtgagccactgtgcccagcccaccatgcctggctaattttttgtattttattttattttacttatttattcatttatttttttaatttaattttttttttttttttgagttggagtttcactgttgttccccaggctggagtgcaatggtgcgatctcggctcaccacaacctccgcctcccgggttcaagcaattctcctgcctcagcctctcgagtagctgggactacaggtatgcgccaccatgcctggcaaatttttttttttttttgagatggagtttcactcttgttgcccaggctggagtgcagtggcatgatctcagctcactgcaacctctgcctcccgggttcaagtgattctcctgcctcagcctcccaagtagctgggattacaggcgtgtgccaccatgcctggctaattttgtattttttagtagagatggggtttctccatgttggtcaggctggtctcaaactcccgacctcacgtgatccgcccgcctcagcctcccaaagtgctgggagtatgggtgggcgtgagccaccacacctggcttatttattaatttttttgagacagagtttcgctcttgttgcccaggccagagtgcagtggcgcaatctcggctcactgcaacttccgcctcccaggttcatgtgattctcctgcctcagcctccccagtagctgggactacaggcatgcgccaccacgtctggctaattttgtatttgtagtagagatggggtttctccatgtaggtcaggctggtcttgaattcccgacctcaggtgatctgcccacctcggcctcccaaagtgctgagattacaggtgtgagccactgtgcccagctaattttttgcatttttagtagagatggggtttcaccatgttggccaggctggtcttgaacccctgacctcaggtgatccacccgccttggcctcccaaagtgctgggattacaggcgcccggccagtggacatcttaattttgataaccagtgtatgatttggtggcatataacagagccatctagttgtatggatattggcagtttctctgctcctatgggatgtcacttgaggtcagatcgttttgcatacttaaaattcaccgcatgctatcaaccaaatagaactgtaaacagtttgtcaactaataagctgaatttctggttgaagtacagttggaacaggttatctccacatttgggtcttttacctcttagcatagtgtgatttctttcctcttttttaaaaatccacctccttcctctctagcatagtgtgatttctttaaatcttttttatcctatgctaaatgtatgggttttttgtttgtttgtttggtctcactctgtcacccaggctgaagtgttcagtggcgcaatcatagctcactaacttccaactcctgggctcaaacaatcctcctgcttcagcctcctgagtagtggagattataggtgtgcaccaccgtgctgagctaatttttaaaatttttttagagatggggtcttgctatgttgccctggttggtcttgaattcctggcctcaagtgattgtctggccttggccttcccaagtgctgggatgacaggtgtgagctaccttgcccagtgtatacttcatgttatagtgaaacaggagagttccctcatctcccttgcaggatgtaccacagggatgtgtcttgcttgctccttcggttgccccactgctcaaacccctaaggggaggatgcagatgggcaggtgcaacagccatgggaagcacttttgggctccagccccacggcaccatcttggggtggtgtctgcgactctgaaagcccaagtgagcatgtgttacagtgtgctctttcagctttgctgtctgcagacagcttgtgttaaccagctcaatagaccatctgccttattgcaagggcagagggccagtgtgacagctttctgtatcctgagctcttgcccagtgtaccagaaaaattggatcacatgtgggctcgaaggatgagtgcaaggttttattgagtggtggaagtggctctcagcgacatggatggggagctggaaggaggggctggagtagggaggtggtcttccccaggaatcagggctcctggaggccggactcttctctgacggccccgagttgaattcccctcggtgtccagacgtccctcctctctttctctgccttgtcgttccaccattgcaagtctgctggcctgctggtgtctgctggtctgttcctctgctcctcttgatgttcartcacttgtgtctgtgcctgctgtggtctcgggtttatttgggcacaggattgggggtgttgcaggccagagtggtcttggaaaatgaagcatttggatgcaaaaacaggcatgcctgttctcacttaggtccataggtacaggtcaaaggtggagcccttgacagggactctgcccttctctacccagcacttccctgtccccttcccatatcaatagtatttgaaacttgatctcaattttctctcatgtgtcttaaaacatatgttcaagtcactgaatgatcttcattttatggttaacataaaatgaagcatgtttggttaacaactttatctgagaacaatctgtatttgctgttatatgtgtatacctaaaaccagcgtaagatgtctatcactggggttcaagacaatagttgttgctttggaaggagaaagtatattcactcaggaagggctctgaagttgagttatatttctatttcttttctgatctagaaagaaaagtactttaccaatatttttgaaaattgagaattcagatgagattgcctgtaaagatgttggactcttcagaataatttaactagaaaattttgagctcttttgtaattataaataatttgtaaagtttctcccatgatactagtcatagtatgttaatgagtttggaataagctcctagataccacatttcatttttttttttttttttgagatggagtcttgctctgtcgcccaggctgggtgcagtggcacgatctcggcttactgcaacctccgcctcctgggttcaagtgattctcctgcctcagcctcctgagtagctgggataacaggtgtgcaccaccatgcccggctaatttttgtatttgtatttttttttaattatttatttatttatttttttgagatggagtctcgctctgtcgcccaggctggagggcagtggcgcaatctcggctcactgcaagctccgcctcctgggttcacgccattctcctgcctcaccctccccagcagctgggactacaggcacatgccgccacgcctggctaatttttgtatttttagtagagacggggtttctctgtgttagccaggatggtatcgatctcctgacctcatgatccgcccgcctcagcctcccaaagtgctgagattacagacgtgagccaccgcacccggccacgttttgtagttttagtagagacaccatgttggtcaggctggtcttgaactcctgacctcgtgatccacctgccttggcctcccaaagtgctgggattacaggtgtgagccaccacgcccagccagatttcattttcattcacaattcatataaagctgtgcagacctttatccttgggcagtaatagtgtcaaggtcagattctgggaggatctgggattgactttcaacttcttccattgggtcaaaagagaagtttagaggacaatagtgagagaaggcctatctattgttcctacattctatttttcacattaactttaggaaatattagtcaagttttctcagtggctaattagaaaaataatggtaataataggttacatttaataagtgctttactgtatgccggatactctgctgtgctttatgtggagtaccacactgaattatcaaaacaatcccatgaggtaagtattgtgctattatttcccacaatttttttttttcttttttttttgagatggagtctcactctgttgcccaggctggagtgcgatggcgtgatctcggctcactgcaacctctgcctcccaggttcaagcaatcctctagcctcagcctcccaagtagctgggattacaggtgcccgccatcatgcctggctaattttcatatttttagtagagacagggtttcaccatattgctcaggctggtctcgaacccctgacctcaggtgatccacctgcctcggcttcccaaagtgctgggattacaggcaggagccaccgtgcctggcctattgcccacaatttatggatggggaattgagacataaattaaataacatgcccaaggtggccagcttgggtattgaatctagtcagagctcgtactataaactactacactaaactaaaacctttggtgtaacagatatgcttttttttttttgagatgaagtctcgctctgtcgcccaggctggaatacagtggtgtgatctcggctcactgcaacctctgcctcccaggttcaagctattttcctgcctcaggctcccatgtagctgggacaacaggtgtgcgccaccatgcctggctaatttttgtttttttagtagagacagggtttcgccatgttggccagctggtctcgaactcctgacctcaggtgatctacccacctcagcctcccaaagtgctaggattacaggcgtgagccactgcgcccaggccttatggtctgttgagcagttcttctctaattaaatgttagccttgttagaaagggatagaagttagaaaatatatatttatatatacttgaaaaattttttttacagacagggtttctctctgttgtccaggctggagtgcagtggtgtgatcatggctcactgtaccttcagactcctgggctcaagcaatcctcttgctcagtccctgagtagttgggactacaggtatgtgccaccattcccagctaagtttatttatttatttatttattttttgagatggagtctcactctgttgccaaggctggagtgcagtggcatgatcttggctcactgcaatctctgcctcccaagttcaagcaattctctgcctcagcctcctgagtagctgggattacaggggcctgccaccacccccagctaattttttgtatttttagtagagacagggtttcaccatcttggccaggctggttttgaactcctgacatcgtgatccacccaccttggcctcccaaaatgctgggattacaggcgtgagccacagcgcctggcctaaatttttttgtagagatggggtctcaccacgttgcccagggtggtcttgaactcctgggctcaagtggtcctcccactttgacctgtcaaagtgctgggattacaggtgtgagctaccgtgcccagcctagaaaaaatattttttaaatcatgctttattaaagaagcagaatagaaaataaaaaacaacacaagcaagcaaacataaacgcttgtatatttgccacccaaaggttactccctaccatctgtatccttttctatgcatatatgtatatattcatatttttttactaaaatgaggtcatactgtacacactgttttataatctgctttttttagtcaaaaaaattcactttctatttcaataaattttaatctaatttaatatacacactctattcatttctccaaggaacctgaaaattctggttccttcatgcaagtatccaatccacaaattgtgtattatgttctttaaatttcttaatctgtcacattctatcacattaccacccyccacctttttttatgacagtgactagtgactcgtttaagaggaagttagcaaatcatgaaagtatatgattgctagtgaaaatttggtagcatatagagaaacagaaggaaaaataaaggaagatttaccattctacactttttatagttacagagcaacaattggtattaattgcattaatgatgatattttaatgaattttataatcattttatgtaccatttatgacagagctttttagttttagctatatatgtttgtgtttgactaggaaagacatacagattctcatttctttttagtctcactttaaactccttgagtttgaaatgactttatttaaatctagtggtagagatagagttaagtaatagctatgaaacttttggaatagtaaaatgtgccatattggtataatacattatttattatcaaggagtccttttataagataaaaattttttactggaaaaacctctttaagtcttttgcatgttagtgcttaaaacttggaaatttaggtctgaaagccttttgatgatggcaaatatatactatcaatattataattcamacgttgagaataaccactattgaaaatgcaggaggccaggcgcggtggctcacgcctgtaatcccagcactttgggaggccaaggcaggtggatctcctgaggtgaggagttcaaaaccagcctggccaacatggcgaaaccttgtctctactaaaaatacaaacattagccaggtggtggcgagcacctgtaatcccaactacttgggaggctgaagcataagaattgcttgaacccgggaggtggaggttgcagtgagctgacagcacgccactgcactgcactccagcctgagcaacagagcaagactccatctcaaaaacagaaaaaaagaaaagaaagtgcaggaaattttattcctgcttcctatctattggttcatcactatcaagctttgacatgggaaataaggaaattggctctggttttgtttatattaaggctttgcttatggatagtttgagagtgttcttatgtattgactttcttagcatttctcatttagctttcctgagcttcttcccttcccctaatagctctccaaactttctactttcagtgctccttccttgatattctgaggttcccagttgccatggtgcctttgtagtgagtagacagagaaggtcattatgagatctgcaacttggtactcctttgctgagggaactagtttcctctttccatctcccatcctccccttctttccattcagaaaacaggagctgtctgtggccatatatgtattttagtctctggagtgcattctataaacttagctaattgtggaaatgaaattatgaatgttgtaagtaaggctcggtacagctgcttgacagtgtttattacttttattatttcaagtgtaatgcatgcatttccccctcttttctttctgttagcataaatttacaaatgaagtttgcatttactactttatattgttaaattattagaagtaatgtaggtttattattagaaaagtaggaaatccaagaagtttttttttccagatagagtcttgctgtgtcgcccaggctggagtacagtggcatgatcttggctcactgcctccgcctcccgggttcaagcgattctcgtgcctcagcctactaagtagctgagattacaggtgcccgccactattcccagctaatttttgtatttttagtagagacggggtttcgccctgttgcctaggcagggccgcctgccttggcctcccaaagtgctgggattacaggcgtcagccaccgcgcccagcctcaaaaagtatttaaaaaaatagaaacactgaggaatacaatcattccatagtaatcactattcatattttatatatttcctttctgtattttttaccacttaaggataaatgtcattaaaaatatacatatagatgatattataatgaatatacagctctgctttctgctttttttccccatataacaacactttctcatgtcattgcaaatctttttttcttttttttttttttctgtgacagggtctctgtcacccaggctggagtacagtggcatgatcacggctcactgcagcttcaacctccctgggctcaagtgatcctcccacgtcagcctcccaagtagatgggactacagacgtacaccaccacacccagctaatttttgtattttttgtagagacacggtttcgccatgttggccaggctggtctcgaactctggaccttaggtgatctaccctcctcggcctcccaaagtgctgggattacagacatgagctacctcgcctggcctgattctaaattttggctgttgtgaatagtgctgcagtaaatatggagtgcagatatctctttgatatgttgatttcctttcttttggatatatacccagtagtggaattgctgggttatatggaagctctatttttagttttttgaagaggtttcatactgctttccgtagtggcagtactaatttatattcctaccaacagtgtacgaggtttcccctttctccacatcttcatctcatgacactacttcagagggttcttgttacccataggatatgttagtgtctagccaaacattgtgtcacaggtgcttaacattatttctaatactcacaacagtactaattattattatggtgggctcaatgagttctgttaagggtccaataaggtcttggagatgtttgaactagaatttgaaggatgaacagaaaaaaggctagcaaagttaggggkgtgtgtgtgtgtgtgtgtgtgtgtgtgtgtgtgtgtgtgtatgtaagggtagagctggtagggtagacaatgtgcagaagtatcagtgaaacgtctagcattttcaggcaattacaagtcattgactattactgcaatggaaggtgggcagcatggttggtgcaaaagaagaggccggtaagacagaggtcaggtcattaagggtctttcatgtcatactgtgataataaataagcatttggtctctatccttggttcctggcacacagttcctaaagcccttgggatttcttgaccggtaagtatcttttatgataatgagatgactggggtctgagggcccctggatagcttcaggctggggtctgttaaccagaaagaccaaggaataattagagaattggaactttcaagtctgctctctaacctccagggaggggcaaggggctgaaaattgagctaatcacaagtggccagagatttaatcagccatgcctacttaatgaaacctccataaaaccttgtaaacaacagagttcatagagcttctgggatggtcaacacatagaggttctggtagagctgtatgcctggaggaaggtttggaagttctgtgccccttcccccataccttgccctatatgtctcttcctgagttcctgagttgtatcctttataaagcagtaatagtaagtaaactcttttcctgtgttctgtatgtcattctagcaaattatcaaacacgaggaaggggtcatgggaatctccgatttatagctggttggtcaggagtataggtggctgggatttgcaactggtatctgaagtaggggacagtcttgtgggactgagccattaacctgtaggatctgtgctaactctgggtaattaatataagaattcaattgtgagactcccagttggtagctggacagaactggttgttgatatggaaaaaaacctgtacattcggtgtcaaagtgttgtaagtaaatacagctcagacataagacatctgtaaaatggaaaacaatgtttaggttctccttaactgtgcaacagactttattaaaaatatggattccagctgggtacggtggctcacgcctgtaatcccagcactttgggaggcagaggcgggtggatcacctaaggtsgggagttcgagaccagcctgaccaacatggagaaaccccatctctacyaaaaatacaaaattagttgggcgtggtggcacattcttgtaatcccagctactcgggaggctgaggcaggagaatggcttgaacccgggaggtggaggttgtggtgagccaagattgtgccattgcactccagcctgggcaacaagagcgaaactccatctcaaaaaaaaaaaaaaaaaaaaaaaagcattcctggccgggtgcggtagctcatgcctgtaaattcctagcactttgggaggctgaggcagacaaatcacttgaggtcaggagtttgagaacagcctggccaacacagtgaaaccacgtctctactaaagatacaaaacttacccgggcatggggacatgtacctgtagtcccagctacttgggaggctgaggcaggagaatcacttgaacccagaaggcggaggttgctgtgagccaagattgtgccactgtacttccagcctggttgacagagtgagataccatctcaaaaaaaaaaaaaaaaaaaaaaagtgtggattcctgagtcctatcccggatttattagattacagcctctggtcgtggagcccaggaatcgttattctaatactttccaggagagtctggtatgaatcctgagccaagaagcactttttcagagcttagaacaatgcttggcacatttcagtgcttaataaatgtttgttacattgaaattaaagttgtacaaatggaaatctacttgcacaagaatatatagtagagtggtcgggcgcagtggctcatgcctgtaatcccagcactttgggaggctgaggcgggcggatcacgaggtcaggagatcgagaccatcctggctaacacggtgaaacctcatctctactaaaaatacaaaaaattagccgtgcatggtggcgggcacctgtagtcccagctactcgggaggctgaggcagaatagtgtgaacccgtgaggcagagcttgcagtgagccaagatttcgccactgcactccagcctgggtgacagagtgagactccatctcaaaaaaaaaaaaaaaagaatatatagtagaaaggaaatatgtcttagggaaatatctacctcattcttttttatggctcaatagtactccattgtgtgtatggagtagatatactctctattttattacatatttctttttatccattcatctgttgatggacccttacgttgattccaaatcttggccattgtgaatagtgctgtaataaacatgggagtgtagatatctcttcaatatactgatttcctttattttttgcatttacctagctgtgggattgctgggttgtatggcagttccatttttagttttttgaggaacctccatactgttctccatagtggttgtatggagatttacattcccattgtgttttaatttatacagccatcaagggaaccaccaatacaagggttcccttttctccacatcctcttagcatttgttactgcctcttttgggtaaaagccattttaactggagtgagattatatctcattgtagttttgatttgcttttctctgatgatcagtgatgttaagcgccttttcatatagctgtttgctaattgtatgtctgcttttgagaaatgtgtattcagaacttttgcctattttaaaattggattattagatattttcctattgagttgtttgagctccttatatattctggctatcaatcctctgtcagatggagatactgtttgttgaaatgaaaatgaagttgtaataaccatagtttgatatctcatatttttctgagtattctttctcccaagattcatagttctttagttctttttttttttcccttcaacttctattttaagttatggggtacacctgcaggatgtgcaggaggtaaatgtatgcaatggtggtttgctgcacagatgaacccatcaccttggtattaagcccagtatccattagctattcttcctgatgctctccctcctgcaaccccccaaaattcttatctcaaaatgctaaatttaataattcttcataagtaaaaattctaacctcctccctagtaaaatctaatgatagtcatgaaactgggactccattagtcaggaaaatgtctaggagttcatcaaggaaagattcttcagagtgttcagaatattgaatttgggttccaggatatcctgatctgccaaatgtatcatgacccactaattgtgtcatgtcatctctatattttttccctttatatattttttttgtttctttaaaaattttttttgtagagatggggtcttgctatgttgtccaggctggtttcaaactcctggactcaagtgattcttctgccttggcctttcgaaatgctgacattacaggtgtgagccaccgggcccagctgcctttattatttcagttcccaccatcactgactttatgtaggtgttcattatctctagcctagtctattacaatggcctttaactattttctcttactttagtctctccctgtttcacatctgttcaaaaacatgtaatgttttccctctgctttcagagtaaagcccaagataacaaccccaacttttactgccatttattgagcatttactgtgagttaagcactaagtgctttcaatatttatcttatgtaaccaaacaacagtcagtcctgtaaaataggcgttaattatctccattttccagaagaggaggatacaggctcagagagattatgtaattttcctacctaatawgtggtggaggcattcagtcatggtattcagattcttccacaattaggccatagctgatttttccagtcttgtttctacccagtgttttttccctctttgcttattccagttgcagtagacaattgcctgtttcctaaaattccatatactttccatctttatgtcctttgatcattctatttgtgtctcagtctcttttcctgtgtctctctttgtcatgtatccttactgaaatgccatttccctgactgttgaaattccatttacccttggaggtcatcactcctttttttctttttaatgagatgaagtcttgctgtgttgtccaggctggtctcaaactcctggcctcaagtgatctcctcacctcagtttcccaaatgctaggattacaagtgtgagtcaccatgcccatctgaggtcatcaatctttaaagaccttctgaaatgctgcctctgctatgaagcttttcttttttctcttctccttcttcttcttctttttttttttttttgagacagggtcttgctctgtcacccatgctggagtgcagtggcatgatcttggctcactgcaaactccacctcctggattcaagcaattctcctgcctcagcctcccgagtagctgggattacaggtgcgcgccaccatgcccaactaatatgaagcttttcttgttctttctcctatattgtttttctcttctggtaatttggccttccattttctgcaacagtaatttcatttcttctccattgtccttaaaccagcagttccatttgtgccatttcctgcctcttctagacacttttaatttatagctttgccacattattttattaagaaaatagagactatctagtaattcttctaacacctcatttcaaacttacttttatctgtattctccttctcattttttcttcatgcatatgtatgtatgtgtgtgtgtgtatttgtgtgtgtgtgtgttttgtaacccagaacaatgctgacaacatttttccttctttcctgagaagtgttccaagtgcttggaacagaggatgaccaaaggagggagggtcctgagaagtgttccaagcactctgatttcttccatctttatagaaggcctttttttgatagccacattccctttggattattgccttatctctctgccccattttatggtcaagattttcagaagtgctatccctacttcctcatctcccattcattcttaaagctattctgttctgtcctctgcccaactatgctattgaaactgctctcgtaaaaaccactaatgactactgtattgctaaatcagtggatgcttttcagttctcatccttctaagtctctcaacagttccatacaagtgactacttttttcttgaaacacatgccttcttttctgctaaagactacactttcatgactcctgtgttacctccattctactcttaccaatctccagtctcccttgcaagtccttctgctttcatgcaacctttgagtgttgaatactttcattgcttggttctggtccttcttatctttttacttgatatacattttctttctttttttttttttttttttttgagatggtgtctcgctctgttgcccagggtagagtgcaatgttgcaatcttggctctctgcaacctctgcctctgggttcaagtgattctcctgcttcagtctcccaggtagctgggattacaggcgcccaccatcatgcctggctaattttttgtatttttagtagagacagggtttcaccatgttgkccaggctggtcttggactcctgacctcaggtgatccacctgcctctgcctcccaaagtgctgggattacaggtgtgagccactgtacccagccacattttctatatataaaattcatccctttgctactgcttatatgctgatgattcccaaatttataatatccatcccagacctatcctctgagatcacttgttatgttcacctattcatatgacattttcatttgaatgtcttatagacattaaattcttgatttcccctatcttcttcataaatttgatcctcccccaatcttccacatctcactaaatagcacctccagccactctgctcaaaccaaaaaacctgggaattgtacttcagtttggttgattctatctccagrattgaccccagtaccttcacttgcaatcaccttagtccaagccttagcacgtcagctcttgcttggactattagaatgatcacctaactagatttcctgtctgtattatacttttgcctccttatttcttgctgcacatagcataagatacaaaattctagtttttctgtttttttgttttgaaacagggtcttgctctgtcacccaggctggagtagtgcaaacaggactcactgcagcctcaagcttctgggctcaagcctcagactcccaagtacctgggtcaataggtgcatgccaccctgcttggataatttttaaatttttttgtagagatgtgttctcactatgtggcccaggctggtctcaaagtctcggactcaagtgatcctctcgccttcacctctcaaagtgctgggattacaggtgtaagccaccacacctggcctagatacaaaatttttaactcagctcatgagaccctgaatgatctgacttctgtcaacttccatttgctgacagggcttcaatcatactggcctttcagttcccctgaaaagatagtagtccaatatttttcctatctcaaggccacatgcactggtccttatgcctagaattcactttcactctctttgatcacttgaggtctttatcctttaggtttcagatcaaatatcatttccccaaagaggctctattgttacagtgttcctttttttcccattgcaatagcatttatcacaatttgtaatgtttttagtaatatatttatttgatttcttgtctccattatactgtaacatgagcacagaagccatatattttgtttatagctgtatactcatcattttctatagcatataatagtcactcaataaatacttgttgaagccaggcatcgtggctcatgcctgtaatcccagcgctttgggagactaaagcaggaggtttgcttgagcccaggaatttgggacaagcctaggcaacatagagagacctatactctacaaaaaaaaattttttttaatagctgggcatggtgttgcatgcctgtattcctagctactcggaaggctgaggcgagaggactgtttgagcccccaagagtttaaggccgcagtgaactatgatcatgctactgtactccagcctaggcaacagagcaagactgtctctacaaagtaaataaaaacataaaataaatacttgtgaataaatggtagaggtataaagactgattgggaacagtcacaaaagataatagtagtagtttttgtttttccattttcatttttattttattttatttgagggcagtagcgcaatcttggctcactgcaacctccgcctctcaggttcaagcagttcttgtgcctcagtctcccgagtagctaggattacaggcgtgcaccactaagccagctaatttttgtatttttagtagaggcagtgtttcaccatattacccaggctgatctcaaactcctgacctcaaatgatccacctgccttggccttccaacgtgctgggattacaggcgtgagtcaccacacctggctagtagtttttaaattatacatattatgtatttgatttctgtagtagatttaggattattcagattttcatgtctttctgggtggaatggaaagtcgttaagaaatttatcaatttttttctaacatttcaaatttattggcataaagtttgtaataatatgcttgtttttcatgtctataggatttatagtgattcccttgtcctcattcctgatattggcaattagcatttttttcttttatttttatcagtcttagtagaaatttatcaattcagttccttttcaaagaattaacttctggctttgttgatatccatctcttcatctctgtattcactcataaattcgtcttattatattcctcaagcttggatatacattttcattattattcaattaaaatattttcttaatttccttgtgattttttgactcataaattgtttagaaatatatcaagacacttgtggattttattacctttgttattgatttttagtgtaatccattgtgttcagagcatatacgctatgtgatttcagacctttgaaatttattgatactttatggcttagtatatggtctattttgataaagtttcataaacacttgcaatgaatgtatatgttgcagttggtgattataggttctatgtatgttcagtttttcagtttgttgttcttctgtgtctttgattttttttttctacttgttatatcagttgctgaagaagaatattaaaatatcctactataaggatcttatgactgggcacagtggctcacacctataatcttaccaccttgggaggccaaggtggatggattgcctgagctcaggagtttgaggccagcttggacaacattatgaaaccccatctctactaaaaatataaaaaattagccaggcatggtgccacacgcctttagtatcagctgcttgggaggctgaggcacgagaaccacttgaacctaggaggtggaggttgcagtgagctgagattgcactccagcctgagggatagagcgagactctgtctcaaaaacaaagcaaaacaaaacaaaacaataagaaaaaagacattcaacacaatagaaatatggggaaaagacttcaacaggcacttcaaaagaagataccaaatgtcaagtaagtatatgaaaaggtgctcaatattactagtcatcagggatttgcaaattaaaattacaatgagttaaacacatagcccaaccaaaaaaggtaaaattaaaaaacgagcaatatcaagtgttagcaaggaagtggaacacactgactcttacacatcactggtattaatatgaattggtacagccactttagaaaactatttagcagtatcatttaaagctaaacatgcacatacctcactagtgagcaatttcattttagtgtatattcccagaggaaattagttcatttatccatcagaaataagcaaatattgtcaaaattcataaacaacccaaatgtccgtgaatagtagaataggtaagtaaatcatggtatatcatatgatggaataccatacagaaatgaaaatgaacaaactactgctgtatcacaacatgggtgaatttttttttccataaattcgaccaagtggtaagcatagataaattttatacacataaggccaggcgtggtggctcacgcctgtaatcccagcactttgagaggctgaggtgggaggatcagttgaggccaggagttcaagaccagcctggccaaaatggtgaaacctcatctctagtaaaaatacaaaaaaaattacctgggtgtggtggtgcttacctctaatcccagctacttggaaggctgaggcaggagaatcccttgatcccaggaggcagaggttgcagtgagccgagggtgcaccactgcactccagcctgggtgacagagcaagactccattgcaaaaaaaaaaataataataaatttatacacataatattgatcaaaagaagtcagacattaaagtacatacattatataacactatatttatgaagttcaagagtaaacaagactgatcaatggttataaaaggtcagagtagtctttacctttaagggagaatattgactaggaagggacacaagtaagccttctgggactctggaaatattctgtatcttaatgaggtgattggttatatggctatatatatattaattttrcatatatatgttttatacttaagatttttccacttcattgtatgaagttatatcggtcattaaaaagtaaataaaacagggaggacttccaggtatagctgaatgaggagactggcagatcttcaacacaaaaaccaattatgaagattgacaaacttgacaaaattaaccattttaacactcttgaaatcaaccaaaaggcatacaataatttgagagaattttatgattaaaaaactgctggccgggtgcagtggctcacgcctgtaatcccagcactttgggaggccgaggtgggcggatcacaaggtcaggagattgagaccatcctggctaacacggtgaaaccccttctctactaaaaatacaaaaaattagccgggcatggtggcgggcacctgtagtcccggctgctcgggaggctgaggcaggagaatggtgtgaacccaggaggcggagcttgcagtgagccgagatagtgccactgcactccagcccgggcgacagaacaagactccgtctcaaaaaaaaaaaaaaaaaaaaacaaaaaaaaaaactgctaaaattccgtaaaacagtaggagtttgtggtattcttgtctgggattgttcctattcccctttccccagctgatttgtcatgaaagttttaccagtgtgggtagaccatgaagaccagctgctttgatgctgtggttgaagggagtttactcagtttgggtggtggatgatgtccatgctcaatggcattgttgggagaagtgaccacttggcagtgggtgagtggcacaggccagtgactttgcctgtttgtggttggggcaagcatattgcaggctgaggcatgtacatgcacagaagagacatgataaggcccaacggaaagtaacagctagggcagacttgaaaaacctgaactttgaatgcactactctatatcccccatactccagacccataaacagaggataaaagcctttctagctttaagtatatgagcataaactctatctaatcattggctacacagayataggggtgactcctcaaaagccacatttaaacataaaaccaagaaataaaaagaaaatgagctgagacatcagtggctgcacactgttagggaaacagaattcacagatttagctcaggcaaatgattaagccaagaaagaaaaaaacaaactagtaacaacaattttcatgggtgaaagaaatcagaatccaaattgttcatatgttcaatttgtaaattgttcatatgcataatttgttttctaatcccatgacaggttatattcaatttttaattaaaaagccgtgagacatgtaaagatacaggaaaatgtgacccatgtttaggaaaaaagtcaacagaaattatctacaagtgtccctagatactggatttaacaaagatttcaaagtagcgactgtaaatgtgttcaaagacctaaaggaaaacatgtttaaataatttttaaaaacatatttatttatttttatttttatattttatagggacagagtcttaccatgttgcccaggctggtttcgaactcctggcctcaagtgaccttcttgccttggcctcccaaatctctggaattacaggtgtgagccactgtgccccatcttaaatactattttttttttttttgagacagagtttcrctcttgttgcccaggctgkagtgcaatggcacgatcttggtcaccgcaacctctgcctcccgggttcaagcaattctcctgcctcagcctcccgagtagctggtacaggcgtgcaccaccacgcccagctaattttgtatttttagtagagatggggtttctccacgttggtcaggctggtctcgaactcctgacctcaggttattgcccgcctctrccttccaaagkgctgggattataggcatkagccaccgcgcctggccccttaaatactgtttttttaagcatgacaacaatgaatcaataaatagaacttctcagctgagtgcagtggctcatgcttgtaatcccagtgcttttgggaggcaagcggggtggatttcctgagcccaggaatttgagactccatctacaaaaattttaaaattatttgagcatggcagcatatgtctgtggtcccagctacttgggaggctgaggcaggaggatcgcttgagcatattgagtgtttgcaccactgcattccagcctgggcaaaagagcaagactctgtctcaaaaaattaaaaataaaataaatagaaattctcaataagaaaagagaaatgatttttaaaaagaagcaaatgaaaccaaagaggatatacctatggcaaataaacacatgaaaagatgttttataattatctaatagttattaggtattaggaaaatgcaaatattaattagtattaggaaaatgcaaattaaaatagcaatgagatatcattacacacttatcagaatgcctaaaataagaaatagacacaataccaaaggtttgtgagaatgcagaaaaattggatttcttgtacattgctggtgggaatgtaaaatgatacagccactctggaaaataatttgacactttcttttttttgagacggagtctcgctctgttgcccaggctggaatgcaatggcgcgatcttggctcactgcaacctccgcctcctgggttcatgcgattctcctgcctcagcctcctgagtagctggtattacaggtgcctgccaccatgcccaggtaatttttgtatttttagtagagatggggtttcaccatgtgggccaggccggtcttgaactcctgatctcaagtgatccacttgcctcggcctcccaaagtgctaggattataggcgtgagccactgtgcccggctaatttgacactttcttataaaactaaactctcaccatatgaaccatatgatctggcagcttcactccttattgtatacccaagagaaaggaaagcatatgtccacataaaagtttatacatgaatgttcataacattattaataagagccacaaaatggaaacaacccaatatccattaactgatgatgtataaacaaaatatggtgtgtccacacattgaaatattgttcaaccataaaaagaaatgaagtactgatatatgctacagcattgaaaacattatgctaaatgaaagaagccagtcacaaaaggccacatattatattattccatttatatgaaatgtctgtaataggcaaatctataaagacagaaagtagattagtggttggctaggattggggagcatattggagaaatgaggagtggctgctactgggcatggggtttcttttggaggtaataaaaatgttctaaaattgccatgcgtggtgcacgttcctgtagtcccagctacttgggaggctgaggcaggaggattgcttgagcctaggagtttaagtccagcctgtgcaacatagcaagacctcgtctctttaaaaaaatgacacatataatgaaatgaaaatgtccttaaatttattgtgatgatagttcataactatgtgaatatactaaaaactattgaattgtaccctttaagtgggtgaaatgtatggtgtgtgaattgtatctcagtaaaattgttaacaaaaaatttttaaatgagtttatcaagatcacagggtgtaagatctatatagaaaagttaagtatatttctatatgctagctagaaatgaacaatccaaaaatgaaattaagaaaatattctgttcatgatagcattaaaaagaataaaataggaataaattgagcaaaaaaggtataagacttatacactaaaacttgtggaacattgctgacagaaattaaataaaatcagccaggkgtggtggctcacgcctgtaatcccaaacccagaggctgaggcggatggatcacctgaggtcaagagttccagaccggccgggtgtggtggctcacgcctgtaatcccagcactttgggaggctgaggtgggtggatcacctgaggtcaggagttcgagaccagtctggccaacatggttaaaccccatctctactaaaaatacaaatattagcctggcatggtggcagtcacctgtaatcccagctactcgggaggctgaggcgggagaatcgcttgaacccgggaggtggaggttgcagattgcagtgagccgagatcgcgccattgcactccagcctgggtcacaagagcgaaaccctgtctcaaaaaaaaaaaaaaaaagagttccagaccagcctgtccaacatggtgaaaccctgtctctaataaaaatacaaaaaattagctgggcgtggtggtgttcttttagttccagctacttgggaggctgaggcaggagaatcgcttgaacccagatggcagaggttgtaagtggagatcgtgccactgcactccagcctgggagacagagcgagactccatctcaaaaaagaaaaaaaaaagaaattaaataaaatctaaataaatggagaggcagtccatgttcatggattagaggactcaatattgtcaagacagcagttctccttaaattgatcataaattcacagtccatatcaaatttccagcagcctttctttttctttctagaatttgacaagccgatcctaaaatttacatggaaacaaaggacctagaatagccaaaacacttttgaaaagggaatgtgaagttggaggtcttcatactacctgatttcaaaacctactataaagtcacagttatcaagaccatgtggcattgcttcaaggctaggcatataggtcaatggatcagaatttagagtccacaaagaaacctttaaatatatggtcacttgattttttgacagagacacatccttgatccaagatttctctgcttgtaaaaacccaatgtaaaacagtctctcacagtgtgtgtgctgcagtataactcagactgtgttgcagtcaagctagcgaatgcatcactgtctgccgggtaaactgctacgtcatccttggtgtttggcatgttacaatgctgggatcagtgtgggcttctagttggattttgtgccaggtatgtgtctacgttggacactgttcatggtagattaaaagggggatgctttaaatttggagaaatgaatgtggctttttatttcttgtattctaatattagagaaagattgtgagcagcagtgtctataaaagatctatatagatctctagctttgcttttggacctgggtatgctgtgttagtgtttggttgtcgtagaaagatccgtttggtgaaaggaagcataaactcgattattgagtgtgcctctttagtatatttttctgatatagttgagtgcaaaatagtctgccttatttttacacttagtgctttatttgcatttttgaatggtgaacttgtataacaagtttgttttgtagacacttaagtgtgtgtaaaattgagcagcttctcatctgtggctactgaactttcctgaacaaaggctgcagtgctctatttttgagacaggttattctgaagagacgtaaagatagaagggctcctctgtgtcagcttggttctttaaagggaaagtaaacttgactaacttaatgggcattggcacattgtggaagggatgatgtgaagtacagaccagagaacaaccaggacttccattttttattatagctggttgtcatgttgggtggcctgattgagttgctttcaaatttgggcaacttgagtctttacaacttaagttgcccgaatgtccttcagatcaatgtttgtttgttgtaatcatttatcttttatctgattatttaacttctatctatgctccaggtcatttgtgtacttctgtttttgaaggtttttctggaagcttaatatattctcagcgtggttggcatcagattgttaactatttctatccagcattttgatgggaataaattttttatggttcatgattcaggttagatttggtgtacagkcctgaggacttgcctcaggaagttgtctttctatagattctaagcctttagggtcttttgccattgatttttctcctaatacacagaatatcatgagcatctacttaagtaaaagctaaaaacaggaagatattacaagataacattcagctagtgtttatttctttaagagatctgtctgtggcaaatttgctttcatagtaatatatgtgtctcagtaagtagtctttctaggcaggatttttcttccctgcttaagggggttagacctccaaaatatttgtcagggtctcttttccttttaagggtttaacccacaatcttttctgtatccgttttgtaccagctccattcctattctcaagctttggtgcataaaaccttagtttaggtgtctatatataccactactttggcctgaaaattagaatcgtggctcacacttgattctaagttccctagtagtggcgtgtttcctttctacgtgcttactttcccacctgacctgcttttccccaccgtgcagtctgataattggtattatttgttttgattggatctcagaaattacctctttagaccgagctgtgctcctccctctggatttcatgagcccattattttcttggcttaattgtccttgtaaatttggtctttttgtcctgggctttccctgtcatgtgctcctggcagccaggagaggcagtggagcttttctccgttgactgtcagaagaaagtgactgttgttgaaaatgtttgctgcaactaaaggagagctgctaagatctactttctagttaaacaagcttttatatttctccccggctcctctcagttcccttgggaaatcaactaattgtgtgtgtaagctaagtgtgtggaggagagaagatgcaaaaaggaagagaaaggtggggaaagaaggaaattgggaacaattagacaaaaagactatagtttgaggccatcaggagtattctagtctgactgaagccaggcagaaggcacagtatctcttgtcctcctgggttttaagcagctgcaacaggaggaggaactgcggcttgtgtttacaaggccgaaatctgaagaaaaagcttccattcttttcccatcttgatatggagggttctccagaggaaaataaggaaatgagatattacatgcttcaaaggtaagtgttaggctaccacatttgggtaatatatatatctttaaaaaaacagtaaggtactgacagctaagccctgagatttatttgatcattttttttctatctttaaaaaatgaaggctattttttttaagaaaatgaataaaaatgggcatattggctcctgaatgtctaaacctttattttatattgggaatttgaataaaagatccctgagcccatgtgtgatattttagctacgttgaaaacaagcaccccatgcagaccctgctgtgctattatttcctgaagggaacctcagatgtatcagatttactccctggatttggctagtatttccagtgaagtctcttcaactgctgtaaaggaaagatattgtatagttttgcagaaaacttttttagawtgtgtgtctggggctaggaaaggtgcctgctgtaattgtggtatgtagtcagacagagttgttcaggatgccgaactccttcactttgggacctttcttattgccattagaactcaggctgaggaggaaatgagtcaggccttcttgggccttcttcaggcctcttgcaggtctgcacctccctgcagagaattgacataaaagacttgaatgatttgcttgtgcagtggcgcggtcatagctcacagtagccttgaactcttgggctcaagtgatcctcccacctcagcctcctgggtagctgggactacaggcatgcaccatcatgcctggctaatttttttttcaagttttttgtagaratggggtctcactgtgttgcccaggctagtctcaaactcctatactcaagcaattctgccactttggcctccagaagtgttggtattacaggccactgtgcctggcatccctccattatcttttttgtttgcttgtttttataatgtagagtttttattttgaagaaaattactgaaagttaaactaaacttaggcaaagacagaaaataaacaaaaaacactgagttggcaaaatctgtctttagatcatccttttccattcctttttttcccccaactgcctctgtaattgcccctttttcttttttaccacttcttccaccctttgaggggataaccaagcaaaacttccactgagaggcaaagaggtataaaagtaactacaatatagctgagtgcagtggcatgagcctgtagtaccagctactctgtaggctgaggccagaggattgcttgagcccagcagtttgaggttgyagggagatatattcctgccactgcactgcagcctggtcaacagtgagaacccatctctaaaaattttttttccaaagtaactgagatatatataatctatgtttgtgtatatatataatatagtatcaaaattttttatgtatatacatgtataaatatatatttcaaaaatgtatatataggctgggcacggtggtggcttatgcctgtaatcccagtactttgcgaggccaaggcgggtggatcacctgaggtcacgagtacgagaccagcctggccaacatggtgaaaccccgtctctactaaaaatacaaaaattagctgggcgtggtggcaggcacctgtagtctcatctacttgggaggccaaggcaggagaattgcttgatcgagcaaacccaggaggcagaatttgcagtgagcagagatcacgccatcacactccagtctgggtgacaagagcgaaactccatctcaaaaaaaaaktgtatatatatatatatacacacacatatacatacacaaacacacgcacatatatacatatatatgtacacacacgcatgtgtgtgtggttttttttttttttctttcgagacagagtttcacttttgtcgcccatgctagagtgtgatggcgcgatcttggctcaccacaacctctgcctcccgggttcaagcgattcccctgcctcagcctcccgagtagctgggattacaggcatgcaccactatgccccactaattttgtatttttagtagagatggggtttctccatgttggtcagactggtctcgaactctcgacctcaggtgatatgcccgccttggcctctcaaagtgctgggattacaggcgtgagccaccgcgcccggccttaaatgtgttttatatataacatagtttttatataaaaacctcatggctatacatatagaaataaaacgtgcatatatatctctataagtatatattgatatatagtgtctgaatgtgtctttgccaaaatttatatgttgaggctgggcacggtggctcatgtctgtaacctcagcactttgggaggccgaggcgggcagatcacctgaggccaggagttcgagaccagcctgggcaacatggcgaaactccatctctactaaaaatacaaaaattagccgggtgtggtggtaggatcctgtaatcccagctactcaggtggttgaggcacgagaattgcttgaacctgggagatggaggttgcagtgacctgacattgtgctactgtactccarcctgggctacagagcgagactctgcctcacacacacacaaaatgtatatgttgaaatctaattaccactatgtcaagaagtggggcctttgggagttgagtagatcatggggcagagccctcatgaatgggattagtgcccttataaaataggctccaggcgaggcatggtggctcatgcctgtaatcccagcactttgggaggccgaggcaggcggatcatgaggtcaggagatcgagaccatcctggctaacatggtgaaaccccatctctactaaaaatacaaaaaattagccgggcgtggtggcgggcgcctctagtcccagctactctggaggctgagggaggagaatggtgtgaacccaggaggcagagcttgcagtgagccgagatctcaccactgcactccagactgggagagagagcgagactctgtctcaaaaaaaaaaaaaaaaaaaaaaggctccaaagatctgcctttccccttccactctgtgaggacacaatgagaatcatgcaagcgagtaggacctggaggcagggaacccaagaactttctagaactaaatcaaatggaaacaagcacttcagttatgacaggaagcatcctcttcctttacataggatatacactgaataaatgactttgtaacttcatcatctttatttacacagggtgtataccaagtaacaatggaaatctctagagggtatttaaaccccagaaaattctgtaaccagacccttgagtggctggcttgcttgggccagctcccaacctgtagagtgtgctttcattttcttttttttattttttattttaattttttgattttttgaaatggagtctcgccctttagcccaggctggagtgcagtggtgcgatcttggctcattgaaacctttgcctcccgggttcaagcaattctcatgcctcagcctcccgagtagctgggactataggtgcccaccaccacgcccagctaattttttgtattttttagtagagatggggtttcactgtgttagccaggatggtcttgatctcctgacctcgtgatccacccgcctcagcctcccaatgtgttgggattacaggtgtgagccaccgtgcctggcctaatttttgtatttttagtagagacaacgtttcaacatgttggctaggctggtctcgaactcctgacctcatgttatccccccacatttacctcccaaagtgctggaattacagacatgagccactgtgcctggccgtgtgctttcattttcagttaagtctctgcttttgttgctttattctttccctgctttgtttgtgtgttttgttcaattctttgttcaaaacaccaagaacttgtacagcctccactggtaacatattttggcaagccagccaggaggtaatcccaaagtttggggtttatttttcttgtttgtttttcctgctccatacaggggaatctcagtctctctctctcttttcctttccaacttgggacggttggtgggcagcacctaaacacagaggcaactgcaggtttctggccggggccactctgaaggactcctttctatcttttccagttgtggtccctgatccctacgtgtggcacagcttggggcgagctggcatttgtttcagtgacttaaaccttgttttctcatgctaaattcttcccttcccctactctactggctaaggacaaaagaaacccacccagcctccagttcctatcattacagttcatggctatcactctagtggaacaggaagcatgggaaagtgtggccttatcaaattataaggatgccagaagtccaggccttcatccagggacaaaaggaaacctcatagtaggccattgcctctgaagggaaaacatgctaagcagcaccagtgcccacctaaggtcagagacgtctgacactctgagactggaccccaaagggggacggcccagggatcctccagacctcaacttctccaaaggggacaccctaggcagagttctgaggtctagtattaagccctccttagaattttctctcgcagttgcaatactgtttggcccaatattgtttggaatctggagcttgctgttgaatgggaaagtgggatggagttgcatgtgtcaaactgctgtggaaactgctatatctgaaattttggttcacagccttcattggattatctgttggggcaaacaaaggaaaaccccccaagcttgtattgctatctcatgccttaagattcccagttaaaagcgattgaatcttcgtttgtgtgcgtctatacatgtctagatgtgtttatttgtatgcacacttattgttacatgttgtgtctaccaaattggcttataaataaaagagcacttaaaaattaagtaaataagtctaagcaattttcaagttcacgtgacttaagtataactttactaaacaagctggctttaaaattattagtaaaataaaactagaaatgccttcagaattgtcagaatacattctttgtctggattttatatttgtctctgctaaatattttgagatgtcaatgtttggcatagaaggttataaaactactaacttagcccatacaaaatgatcttggtttgtgtgccyttttttttttcaacgaatgagagtaacttaatgttgttaactaagtcttctgagttattggcaaaaaaaaataccagtgtatttacctttaaggctgttacttaggtttaggtgagcaccttatgttcgctggctattaaaaacatggttagcaaggaaataactaactttaaatgatagtgtctgatatctctgtttatagaagttatctaaataaaccgttaaacatgaaagaattgagtacagtgaatgggataaatgttttaggtaatctttttgtgtaaattaaaatcttggccaggcgtggtggctcatgcctataatcccagcactttggaaggccaaggagggtggatcacccgaggtcaggagttcgagaccagcctggccagtggcgaaaccccatctctactgaaaatataaaaactagctgggcatggtggtgtgtgcctgtaatcccagctactggggggctgaggctggagaattgcttgaacctgggaaraggaggttmcagtgagttgagattacaccactacactccagcctgggggacagagcaagactctgtcmcaaaaaaaaaaaaaaaaaaaaagtcctaaaattatttttgatgctcattgaatatctgggtcagttccaattaagaaaaggttgtgacatggggaaatatgtttctacaaattgtggaattgttcttatctataatgcttttatctctgatggttcaggatttcttgctttttcgggtttcattgaagttttaggttactaaggataagaattctagttaacacataattctatatacaaaatgtgccagaaagtgttgtgtgattagtgagaaaaaataataattttgtctaattcggaagttttctaaaagttagttcaaattacagatttgaaaaggttatttatgaaacaatgtagtaaggaaccggtaaggaggggagaaagacgtggaaaagtttagataataaaatattgcttaaaacctgatagagaactggagaaatttggctaattaacattttcatagttaaagttcttagtcttgattaaagtaaaaataagtattgtaaaaaaaaatgtgtcggcagtttgccagtttttttaatatatagttaagcatgaagccggatttagtgtggagccaaatttcacatatgtgcttgcattgcttcacactttgtttcctgttttgcacgggtagtgccggcactgaagtacttattggtcatttgcctagagtcaatttctttttttttgagactaagtcttgctctgttgcctaggctggagtgcagtggtgcgctctcagctcactgcaacctctgcctcccagattcaagcgattctcctgtctcagcttcccaggtagctgggactacaggcacacaccaccacgcccagctaatttttgtttttgttttttttaagtagagatgtggttttgccatgttggcaaggctggccttgaattcctggcctcaagccatcctctcaccttggcctcccgaagtgctgggattacagatgtgagccaccgcacctggcctttcttaaactctttatccttttttattctcttcttttcattttgaaatctttcaggatgatgcacagaaaaatgcttatgtttaaagtctgatctttcttttaacttgcttatagaatgccttttttttgttaacttctggctttcccttgagaggactttatatactttgccctgtttagaaagttccaaggggaatcaaagcttgtttttctcaagatgctttgagaatttcatagcagcataatggcagcaagggtaaaccttgaaagactatcattacaaagtctaactgtttaatgctttttaactggtaagtttagtgtttgccccttactgctttacttagcaagttgaaactatattcacaaaacaaaatcatacaaatttacatgatgttatacagttatatagagctctacaaatgctcgtatcaccctctttaaaattacctattatcccttaggccattgaacaggtaacacatttccgcaagggtagttcagctttgcttactagatgcataagcacatttttaattgaatatatgacattcatactatgttttgtgcaaagttaaaaaattacttcttagagcagtcaaattaacattctagtatcttcacatttttacagtttcaatgaaaaaaaaaattctcctaaaaggcactgccttttactcttgccctttccttcatgtttaattttatcttaattttttgataactataagactacatttatttagtatatgtcatctcagattagtataatcgtatcagtcatttatttaataacatcatcaggtgttctttcagttcttgagagaattgagatttgtaatggttagtatgactggcatgtatttggggcttatatgtaaacattggaagacatgggcagcaaagatctaagaaatttgttctccaaaaactgttttaaagaaacatcacctggtatttgctctaaagtaagctcgtccaaatcactgcccatggactgcatgtagcccaggacagctttggatgaggcccaacacagctttggatgaggcccaacacaaattcataaacttgcttaaaatattatgagatttttgaccaggtgcggtggctcacacctgtaattccagcactttgggaggctgaggcgggtggatcacctgaggttgggagctcgagaccagcctgaccaacatagagaaaccccatctctactaaaaacacaaaattagccgggcatggtggcgcatgcctgtaatcccagctactcgggaaggctgaggcaggagaatcgcttgaacccaggaggtggaggttgcggtgagctgagattgcaccattgtactccagcctgggcaacaagagcgaaactccatctcaaaacaaaaacaaaaacaaatattatgagatgtgtgtgtgtgtgtgtgtgtgtgtatgtgtttttcatcagctatcattagtgttagtgtgtttctttttctttttttttttttttttgagacagagtcttgctctgttgccaggctggagtgtagtggcgtgatctcggctcactgcaacctctacctcccaggttcaagtgattctcctgcctcagcttcccaagtagctgggactacaggcacacgccaccacgcccgactaattttttgtatttttattagagatggggtttcaccttgttggccaggatggccttgatatcttgacctcgtggtccacctacctcagcctcccaaagtgctggaattcaggcaagagccactgtgcccgccagtgttagcgtattttatacgtggcccaagacaattcttcttcttccagtgtggcccagggaagcaaaaagattggatacccctgctctaaaaacataattatttacatggatatacagtgaataattaactgtgactatattcagtgcaggttaacttgaggcagtattgtagggtatcaagttcaaggacttagagtcagaaaggttgaattcagatctgttttgttacttctggctgtgtgaatgatcatgggcaagttacctaatccctctgagcctcacttgtaaaatggtgctcaaacatcatagcattattgcgaggattaatatgccagtgcatgtgaagagcttagcatagtgtctgtcccatagcgagtactcagaaatagtgttattttgtgtagttgtcaataattaataaataataatcaccattcaaaaatgtttgagcaggctaggtatggtggctcacacttgtaatcccagcattttggaaggctgaggcaggcagatcacttgagaccaggaagttgagaccagcctggccaacatggtgaaaccccgtctgtgctaaaaatagaaaaaattagtcgagcgtggtggcacatgcctgtaattccagctacttgggaggctgaggcacaagaatcgcttgaacctgggaggcggaggttgcaataagccgagattggaccactgcactccagcctgggtgacagagtgagactctgtctaaaaaaaaaacccaaagatgtttgaacagcttctatctgtgccaggtaccctttggtgctggagatacagcaataaataagaatctctgacctcaagggatgaataagagtatctgacctcaaggaacacacactatttatcagggaaaacagatgtgttaagctcatgtaacagtccagtgtgattgggaggaaagatgtaagtgcatgttctggtgtggcacagaggaagctcagttacctacctccttaaggggtgaagttggaaggatccccatcagcaaaggctcactgggagcactgacagtttagttgcattttgaagaatgaattggagtagtactgacaaaaatactataatgcagtggtggattcctgttgttgagaaagccaagctgtaatagagtagattatattactgccggagagcacatggtattggttaggtatctaaatgtatatggggtaatggaaaaatggaagttcctaagaagatcagtcctagtttgcattttgattgacatttttgtatcctcagactttgaaatactcgtgggatatgaagtggaggtgcctagagggttgaagataatgaggacagatgaagaaatgtttgattgtgccatacttacagttgctgattttcaaggtgtgggtacttccttagccttattctctgtgttacctttcaataccattagtaacagttctttaaaagccaactttactgaggaataatttacagccagatatacctgttttatgtggacagttaaatgatttttttgttttttgttttttttttgagatggagtctaactctgtcacccaggctagagtgcagtggcgtgatcttggctcactgcaacctctgtctcctgggttcaagcgattctcctgctcagcctcccaagtagctgggactacaggcgcctgccaccacgtctggctaatttttgtaattttagtagagacggggtttcaccatattggttaggctggtctcgaactcctgacctcaagtgatccatccgcctcagcctcccaaagtgctgggattacaggcgggagccaccatgcctggcaggtaaatgagtattttcaaaagtcaggtttgttgaggtataatttaagtacagtaaagtttaccctttttttttggtggagcgggggcaggatctcactctgtcacctaggctggagtgcagtggtgtgatcatagcttactgcagcctagtcttcctggctcaagtgattctcccacctcagcctcctaagtagctgggactataggcgtgtgccaccaaggccggctaattttttgatttttttgtatagatgagctctttctatgttgcccaggctggtcttgaactcctgggctcaagcaatccttctgccttgccctcccagagtgctgggtttacacgtgtgaaccaatgtaccaggccaagttcaccttttaaaattatgtagtttgatggttttaacacatatatctacccatgtaaccattactatgagatcaagatatagaacgtttccatcattcccatactcccttgcagtcggttcccacagccccagcccactgattcgtgttctgcactgtagattagttatccttgtcatataaatggagtcatatggtatatacttttttgtgtctggtttccttctctgaacatgaggtttttgagattcattcatgttattgctcagtctgatacactgataatgatccatggacttggggcccaaaagaaataggttcatgacaaagttaaggacaggaaggtaatttttatttatttaaaaatacatgcaataataaaaaaattaaaaagaatgtatgaaagaaaaatgaagtgattaaaaaaatgaaacaaaacatgtacactggcactgtttttagacctctggtgtttattatcattagatatgttgcatagtgtaattggaagaacattgaaatgaccatgaaacctggttttctggtctatatatgctacagacttcctttgtgaccttagacaaatcattctccttgtgggcctctttttctataaggtgcctcttaactttaaagttccagtccagatgcagtataactaaatacctggatagaaaaggatgaagaaaattttaatagattgaccagcttgaaatgtcagtctctaagaagggtacagagcattttatattgagtgccaacagcagagtgcatagcctttgttatgtctgtccttaagtctagtaggcaaagtagctgctagactctgaactgtcccttcttgtttttttttttttgtctttttgtttttgagacagagtctcgctctgtcgcccaggctggagggcagtggcttgatctctgctcactgcaacctccgccccctgggttcaagtgattctcccacctcagcctcctgagtagctgggattacagacgtgcaccaccatgcctggatatttgktttttttttttttttttttttagtagagacgtggtttcgccatgttggccaagctggtctagaactcctggcctcaagtgatccrcctgccttggcctcccaaagtgctgggattacaggtgtgagccaccatgcctggccttgtcccttcttgttatactcccgtaggtggtggttttgcaagttaagagccacmctaagtcatgtgaagtatagggaaaatgcccactcattgagttttatgcatagagacactcagagaagaaagaaagactggtcttatttatgtatgtatatgtaaaactatatgtgcacagaaagctagatattgtgctgcatgtgggaagattttaatcataccttcttattttgaaaagacaccttactgccccatcaagtttaaattgtaggggaarggaagaaaaggtgggaataggaaaagaaaacagctgtctatcaaacggtgtacaaaggagcttatgtccactatcttatttaatcctctgaacactcttttggagggtctatcagtcaaggtgcagtcacaaggaaaataaattgtagtaggtgttataaacagagaacattcaatagcgagaattgcataattgggtgttagaagaataaaagaacaacaacaaaaaaggcatgctgaggtaccccagagttaataactagaggaagtagctatcacctctaagtctgggagaacaaaaggggaggtagtgttaccagaactaggagcttggtggagrtctcctggagggctggtgcctggacctctgggcataagctttgggtagctggtactcagatccttggcctgacaggtgattgataggcccaggcagtgaggtccagaggatgagtgagcatggcaaggttgatattctgactgccaaagagccacaacccactgctgctggtacctctatggcttttcaccagactgttgaaagaagctagagactggaattaagtytctgttacagctggagcaatactgataacagctgggaaataggaaggaaggcccttttcttacctttctgccttccggtttggtgaacagaacaggaaggagctagcaaaggagtcttggaaatgaagtttgcagaatcttggccccattgtcacagagcacagcataaaagggtaggtttggagctgagagacaataggtaaataaccaggacagtaaatatcatgcatattttacaaagagaacactgaagctgaaaaggttaaattatttgcaaaagatcatttaagtggacagatctggaatgtaaacccaggcctgtgctgtttccactatcatattttgtctaatccaaggtgccattgattgttagaaacactgttattttatgtaccactaagaaaaaatacagtactgccagccaggcgcggtggctcatgcctgtaatcacaacactttggaaggccgaggtgggcggatcacctgaggtcaggagttcgagaccagcctggtcaacatggcgaaaccttgtctctactaaaaatacaaaaattagccaggtgtggtggcgcgcctacagtctcagctactctgcaggctgaggcaggagcatcgcttgaacctgggagtcgaaggttgtagtgagttgagatctggccagtgcattccaacctgggcgacagagtgagactctggctcaaaacaacaacaaaaacagtactgccaatttaataaggcatcaattgtaaaatacataccaatttcagattttttttttgagacacccatctcattctgttacccaggctagagtgcagtagcatgactatgacttactgcagcctcaaccacacgtgcccaagcaatttatctgcctcagctgcgccccccaccccccaccccaagtaactggggctrcaggaacacacgactgtgccagctaatttttgtattttttttatagacagggttttgccatgttgcctaggctggtctcgaattcctggtctcaagccatcctctcatctcagcctcccaaagtgctgggattacaggcatgagccactgcacccggcctaggagatttttttaaagtaaaaagaaaagaagtagaaccttaaaactgattaaatatggcatattatgctgccttgtaaagaattttgttttggagttgttgattttgaaatacctaggagatacccaggtaaaacatttagtaggcagttttaaaatgtggagttatagctcagaagaaagatagaagtcagagatacagaggtgaaggtcatctgcacaccagagtcgtgatccagaaacaaccctggtaacttgttttttggctttaacggtctctgagtctattatttctaccatttatcctttgcctatctctttgtgatggcatctgctggtaaaccttgatattatcttttattattcagaaacgcttttttttccttaaatttccacaagcaagatcattttcttttctctcttttatttgaaaagtacgtgacctgccagcatgcagtcttcacaggatgcagttgtgaaagtactgttatgggtatggkagtgaaaagcaggtctccagaaaatataggtggtgtttttatggcttctgtatttttataggtccagcatgtctggcttgcacctagtaaagcagggccgagacagaaagaaaatagattctcaacgagatttcactgtggcttctccagcagaatttgttactcgctttgggggaaataaagtgattgagaaggtaagttgtaacttgctgaattattttgtcaaaagcacttaggatttaatgcttgcctagatttgttgtctagatttgctcccaattgatatttagtttctcagaggctttgcctctttatgtgaattttagcctttctgcctccctagcatcctattaatataatttcactgttttcctataatatgtatttaccacagataatttaatcatagctaattaaggagttaaaatagtgctcataaagttatttttgagtcccagcaacttggggggctaaaatggaaggatcacttgagcccaggagttcaaggttgcagtgagctatggattgtgccactgcactccaacgtgggcgacagagggaccctgtctcaaacaaaacatgtttttgaaagatcttgtggttttacagggtggggctgcactgatctgacagggtatgaagaattgattagcttgtgggtgctggtggggagataatatgccacagcactggtttgaaagctaagggagtagagagagtttcagaagagaaggcttaaagagtttgatacactgtgacttactggcttccaccaagtatttgagatgtttcaagggaatataccacatgatatacttagagattccaggtattttgaaatgtaattccgtgtcacttttgtctaaaccatgtcagagctgagaggatgacttggctgaaatagcttccagtgattaaaagattaaaggatggggacctgtatttccactcctaaaagtattacttcatcagcatccttttattagtcttccaataaagacagattatgtgtctattagtctgtgttatccttagaggcatgactgcaagataggtaaggagacgaaaggtttgtttacagaaagtctcaggattattctatttttctacaacagtgaccattctttctgaggcattctctacaattctaaggtattggagttcagtattttggagaaaagtaactaataccagggtttttaaacatgttcagtgctctgtacctcattttattgcaacagagaagagtgcatggcactgcactggttggccttcccccattcctgatttcataatataccatacccacaatatggtagtatggtagaataattcacaaagtcacagatttaagtaattgtgacttttcccttcaaataaatgaagttagaaaggagtatgttttagctggcacatactcaagtatttgcttagttaacatttaaagatactgcttggccttggggaagccagtttctaacagtctggaccagtaacaagaattcttggttgaaagtatgacttttacacagaaagatagatatgtaaaaattctctcatctcttttcctccattgttgcttttttctgccttttcttcccattcccatctccttccccctcccaggttcttattgctaacaatggcattgcagcagtgaaatgcatgcggtctatccgtaggtggtcttatgaaatgtttcgaaatgaacgtgcaattagattcgttgtcatggtcacacctgaagaccttaaagccaatgcaggtgagttattagcattatgaaagcatcactctcaaaactaaaacatggaacagcrcagcctttaagtaggagaatgttaacttagggggattcccaaacataggacttccaagtaaaatccttttaaaataatttctgtttaaaatgtgtcagtaatagacatataaaaatgattgcactatagtcaacctcratacagattcctgtgtcctagggataagtaggaagaaatttaacaaaagtgttgatttgggctttcaagtgtatgcctttttcagtgttaaatatttgctatgccacattctttggaatgcgtaagtggaaagatttagaaggaaatgctgttttttccttatgcgttatattgaattatagaaaaactttgggttaagattttttttttctcttcctgagggagagaccttttgggaccgaagtgtgtttcactctgtaaattcggctacatattctttttactcagatggttctctgtctgatagttgtagataaagactgttggtatagctgaaagatatgactagtctttcttctccataccttctatcactaaggtataatctcttaaggtagagtacccacagataatgtgaagagctatgtttttttacttttttttatcttttactcctaggaagctgcgaaaaagagctatccttttatacttattttagtctgcatatgttttttctttgttgagacaatggtattatgattattcctaagaaagaaaggttattatatcatcttatttagaaattgagaagacaccaatttattagaaagcaaatgttatatattagatcattcttgcattgctataaagaaatacctgaggctgcgtaatttgtaaagaaaagaggtttaattggctcacaattctacaggctttacaggaagcatggtgctggcatctgctctgcttctggggaggcctcaggacacttactgggggaagatgaagggggagtaggcacatcacatagccagagcaggaacaacacagagaattgtggggagggtgccacacacttttaaacaaccagatctcatgtgaacttagagtgagaactcacgtatcatcaaggagatggcccaagccattcatgagggagctgccctcatgatccaaacacctcctaccaggccccatttccgagactggggattacaattcaatatgatatttggtgagggacatacattcaaactatatcatgttattatatgaaatcatttagatgcacactttcacatctctgagccacaagtttcatacttataaaaggaagawcctaatgtctaattcactggataattgtaaagatgagatcatctataataaatacagattaacttgcgtggtttttttcttttttcttttgagagggagtcttgctgtgtcaccaggctgcagtgcagtggtgcaaactcagctcactgcaacctccgcctcctgggttcatgcaattcttctgtctcagcctcccaagtagctgggactacaggtgtgtgccaccatgcccagctaatttttgtatttttagtasagacagggtttcaccatgttggccaggatggtctcggtatcttgaccttgtgatccacctgcctcggcctcccaaagtactaggattacaggtgtaagccactgcgcccggtccggtttctttttcctcattcatttctacctggtactccaattaattcatttattcattcacttaacatggagaytgacagttgaataagatgtgatcttgttctaggaaacaaatgatttcaatacaatgaggtaagtgctataaaagaaacatgcacagggtccggtgagaacacagagatgagacatctaattcttgggggcaggcttaagagaaagctttcttaggctgagtgtggtggctcatgcctgtaatcccagcactttgggatgctcaagcgggtggatcacttgaggtcaggagtttgggaccagcctggtcaacatgatgaaaccccatctctactaaaaatacaaaaatkagctgggcatggtgctgrkgcccgtaaatccagctactcggaagctgaggcaggagaatcgcatgaacccaggaggaggaggttgtggtgagctgagatcgtgccactgcattccagcctgggccacaaagcgagactcagtctcaatgaaaaaaaaaaaaaaaagagagaaagacagctttctgaaagagattatgtctaaccaagaatgagtaagagttagtgaagcaattggggggagagaaaggtgtaccagacagaaagaacagcattgcaaatgcataaaggtatgacacaagtggttttctagaaattacggatggctacaagatgtgatrtagtatttgccaagggggaccttgttttccatcctcaaaagcacagactttgtcttttaaggagagtatgtgtgtgtgttggacatctaaggatttgcattttaaatgaatgtgttttttggggtgtgtgtgtgtgtgtgtgtgtgtgtgtgtgtgtgtgtgttaactatgtaaaagttgaagagtataatgaatcccttcccatctacctgtcatgcaatatcaataattatcaacttatggcgaatctagtttcatctatattcttaaccccgtgcacaattattttgatgcaaatccttgataccatattattcttcatgttatctgtgaagatactctaccttaagattaagagattataccttattgataaaaagcatggagggccaggcatggtggtttacgcctgtaatctcagcactttgggaggccaaggcaggcggatcacttgaacccaggagttcaaggtcagcctggaccatgtggtgaaattgtctctacaaaaaatgcaaaaattagctgggcatagaggcgcatgccggtagtctcagctactccggaggctgaggtgggagaatcactttagcccgggaggtcgaggtcgcagtgagccatgaccatgccactgcattccagtctgggtgtcagagtgagatctggtctcaaaaacaaacaaacaaacaaaaaagaaatctaaaccaaaacaatactaaagatttttttttaacttacaaaactcacaaaattgaagacattgataatacctaacataggtgagagtatttggtacccatgttgctagtgagagtctgaaaatgtgaataccttttgacccaatagttttattgctagtaacatatctgtggatataattggacagccgtacagagacacacattattttattatttttcaaattatacataatctgtacttccattgataagttagtagtcaaatgaattatataggctattgaaatattaggtatccataaaaaatattaaacatatatataccaaaaatatatatatttatgtacagtaaagcataaactggttgtctttgaggtgggacaataggtgagagtctcactctgtcccccaggctggagtgcagtggcgcaatctcggctcactgcaacctctgcctcctgggttcaagcgactctcatgcctcagcctcccgagtggctgggattacaggtgcccaccaccaggcccagctaatttttttttttttttttagacggagtcttgctctgtcacccaggttggtgcagtggcgtgatctcagcttactgcaacctctgcctcccaggttcaagcgattctcctgcctcagcctccctcagcctcactctgtctgtggtgggactacaggcttgtgccaccatccccggctaattttttgtatttttagtagagatggggtttcaccatgttagccaggatggtctccatctcctgacctcgtgatccgcccacctcagcctcccaaaatgctaggattacaggcgtgagccactgcgcctggccaattttcacttttaaaatatagtattgttatattctgttgtattatctaacattgtttaataatttgcatgctttccttcctataatcaaagagaacaataagcctattttaattttgaagaaattctagcggaattttttttagtagaattttttttagaagggacttaaaatcttttagaaataagaacaagataatcaccattctgactggcatgagatgatatctcattatggttttgatttgcatttctctaatgatcactgatgttgaggttttttttaaaatatgtttgttggccgcataaatgtcttcttttgagaagtgtctgtctgttcctgtcctttaccagtgcatgtggggcttaatacctaggtgatgggttgataggtacagcaaaccaccatggcacacgtttacctatgtaacaaacctggatgtcctgcacatgtatcctggaacttacatttttaaaaaagaacaagataaaataaatttattattagtaaataatggtggatgcttgagttgaaatttgaaagctaaaataaatttataaatggtggaaatgaactttgaggaagttacttaactcctccaagccatcattttctgtcacatattgggttgatgagagaattaaatgagataatatatatacaaagtgctagttacagtccctacacgtggtagctcttctgttacagktgtcattgccagaataggaaaatagagatgttaggtgacaaatttgaaagggaatactgtacaacaaatatatatgagaaagtggttatctttctaaagtttcttacaaatacctsttaccctcagtattccagataaactctttccagacactcctgtaactaacctttcttgtttagccagtttgcaagccattcaggctctcctatctttctccattctgtcaagctctgtaccaggaaaagggctttctctaggtccagtrccagttaaagacaaaggatgtcaggactagaactttttctcggaatagagtaattgcacttgggcccctaactgacagacacatcagccttgatatagaagtcataaagattcctcagaaagattacatagtgaaatgttggagaattgctattttactataagagcttctaaatatgggattaactcgtattagtgcttgtgacttaacaaactaagagcctcgaactaaatggtcctggaaattatcctactaatgctgtttgtcctgtggttacttatgatagtccctgacctttacgtagttttgctgtgcaattatatttctggaaaaaaaaatcatgtgttctctattaattcgcttgcattttcagaatacattaagatggcagatcactatgtgccagtgcctggaggaccaaacaacaacaactatgcaaatgtggaattaattcttgatattgctaaaaggatcccagtacaagtaagagatgccaatgtgtcctttaaaaccaaattcagccattttatagttaggcacaaggggatatctagagaagaacatttttgtaaagcatcattttcgaaaattattaaatgcctgtgtatgggataactaaaccaaataaggaaaagaaagatggaaataatggaatggctaaaaataaagtaaacgtaatacaaacagaaggtttggaagcatctttcagagattatttattctaggtatctcacctttgagccagtaaaaattacctgtttgttgtggaatattagcctaaaggatggtggtatattaaagaagtaggctgtttcttccctgtcacattgtgttagtaagtttagggtaggtaccttaaagcccaaagaggaaaaaactctaaacttagatggcagtgtaatcaataatgatgtaatggmgtggccatagtaattgaatatgtgaaacatagccagtttttctagaaaacgccctttacagcctaggctatgaattgagtttcctaaagagcaacaagtataactggatcttaatatcaatttcaacttggttttgaccccttcagaaatcttgccacaatggactacttattgttactctgtaaagagtttgccaacaatcaagcatagaagctgaattaagcattaggctgctgtggaactactgtacctcaagaaacagggccagcctggatagagactcttgcagtttgtgggggttttgtatgaattttaagaatgaattataytgtattcccttgcaggcagtgtgggctggctggggtcatgcttctgagaatcccaaactaccsgaacttctcttgaaaaatggcattgccttcatgggtaagctgttctgacatattgtccgtctttctgtttctttctgtcaattttgcccacattttactctatagtctgattttctgtttaacatgtgctgggctctctctctctttttttttccctcaatctattactaactctcagagtaamcctcttcatttctttcttttttttcattttttgcttatctcacttcatcttgattttgttttctgtccctgggtcagatatggagatatggagaaggctttggtttctaaaactctgaccttttaaaactttgcagctaaccttaagaaagcatgtgggaaaatgacctgtttttagatagtgaagataattgaatactcaggatgccttggcagtgtgcccttaaatatgaatcagcacctgtgcatttaagcatataggtgatactcctacaagtgagagatacttcttctgacttttctgctgtcattataccagagagaaaaacagaggttatatagctcaaagtatttttctctckgtctcagagaccttaaacaatgaagattatgttttgtaaacctttttaaagatgtctcctttttgggttcccctaagaccaaagagcgtatactatttcagacttgaatcctaaaactttaaagtccttatttcaggatattgacttaaaaaagaagactttattgatctggtgaagttggatcatgaagaatgataacattatagctagatttgtcaaaaatttaattcagcatacatttatatatattgagctctcactctgcacaaaaagcttactacattaggttttacagatggtacaaagataagtcaaagcataatagtccccataatttatgatctccttgatatgtgaggggtggggggaggacaagacaaatacataaatagctataatacaaggcaactacatgtgccagaaatgaggccaaggkgttacagtcaggattcttttcctgtttcgtttttaggtcctccaagccaggccatgtgggctttaggggataagattgcatcttccatagtggctcaaactgcaggtatcccaactcttccctggagcggcagtggtaagaactgaattcttgtttgtatcttgaagtacagaatagctcagtaggatatttgggacttacctcttttgaaaaagtattggtatacttgacaagaaatggaatactggttgattaatggtaccttgtagctcctagcttaattaatacacctgtgattcttttagtaatataaatttagttccaggtacacagatgctaaattgtgatctggaktgatcttgtgagttaacttagaaaaactctgggaaaacatrtatatggttttgtgggtttagatgtactctgggtaggctagaatcttcctcagaggtgggcttcccagggggaattgggtcttcagacctgcctgggagtagcctggatcactaggaaaaacctaaaacccacttactcaaatgtttccttgccaatgttttttttctttttttttcttttttttttttttttttgagttggagtctcactctgttgcccaggctggagtgcagtggcatgatcttggcttactgcatcctccaccttccgggttcaagcaattctctgcctcagcctcccgagtagctgggattacaggcacccgccaccacacccggctaatttttgtatttttttgtagagacaggctttcaccatcttggccaggctggtgttgaactcctgaccttgtgatctacctgccttggcctcccaaagtgctgggattacaggcatgagccaccgcgcctggcgccaatgttttcttgatatcaacccacaatctattgatgatttgatttgactgtttaaaaaccattcaacctcagttgcccttgatgcagaaaatgaggtcagtaattaacctttcttccaggcatgccagaggggcaagaattttcaaaaagtgatttattctcaacacatcccttaaacagttccatgtgaattattatagctgataacaatatgaacctttttttttttttcttaagtactcaagcactgggaacagacatacactaaaacctcttttaaatgggaatgaccactgtcttgaggctgaacagatttgaacccttgttactctggctctccagggagattgcaatatcctctccagatctgctgggtcaaatagtttaaaataaaaggttgaatttgttcttgtttgaatggagaggctatagtgttccccttatggctgagtacagggacgttcagagagcatggaatcatgactctgctgaggccaataaaaccgccatttctatttccaagggctcataaagattgaattatttcccagacctcttggccctggagcaggcctgaacacacagtttgaaggtattttgcctgctgagttgctgtgagaagtatgctatgttctttttttgtttgttttgatcttgtacgtctttgcatttttataagttgctccctgttagttcggctggcttttgccagcgttaagaacccaagttgccgggtcatgctgtggctaaatcctgttaaccccaaggactgatcagggttttatggcatccttctttctcccatccactctcagttttgggtaaatatgatagcatttcaaagaatgcagarcagaaaattgacaagagcagaagatcttgtaattgccctaagttgctattgtctgttgcaggtcttcgtgtggactggcaggaaaatgatttttcaaaacgtatcttaaatgttccccaggagctatatgaaaaaggttatgtgaaagatgtggatgatgggctacaggtaggttactaactccagggagtgatacctttcagctgaccagttatagtcacaaatgtggagattgggagcctggctcgtgatatrtacccaaggtggtgttagggatgtaagaccaggaggtgtagtttgaaagtatagaatacgctggtttctctttagattgcataagtcttttgcctttaaaaagtacagattgaggaagtgactttaaatgtaaacaatctaaattcattttgaagcaggctgctcatctggacagaacatttcttaggtgattaagtcagagttttaaggaggtgctgattctctctctctctaccacctgttagtgtgtgagggcggggacaacaaacaacatactttttctactggttgaattcagaaccaagaagccaggaagcagagatcaaacagtcagctttattatgaacagagatgttgatgaaaatggcttaagtgtgtagcaacattcagatttgtaaactaaacaccagagttaagcaggctcactcacccactggttactggcagtgctgaatgaccacagatttccctcgacagagagagagagcttaattcagcttagtgtatggctgagagctgacaaagagcatatgtcctgtgcagtgggctgatcccaaaggggaaaaggctgagctatgcatattcagtccctccttccaagttgaccaatcacataatttattatttttcccttggggaggagcaagggagtgaaccaagaaagactgaaagtgttactcttaattattgtctatccatgtagaaatgtgaacctaggcaaaaggagatcctttccccaacattaccttttctttccttacagttccctccaatttgttcccctttcacttttataaatagtttaaagtgttggttatgcttccaggtataatgaaagataatgaaagaggctattgtagaaaaatacactgcttgagtttgacttgtgtcatgtaaattcaagagggatgctgaatgttcaaataattttgttgtattgtttgcattttaagttaaacatcctgtaatctccttaataagaagaattaatatttctaattgaatttcaaatgctttattttgtttgttataatttgcaaaagagtagaagctctttgtaaggaactagctattctagctattttgcttatcgactaacattcttttttattttttctggttataattataaacagcattttctggtagaaaatttgaaaagccaaagatgatgataaagccacatgcaaacacaccatccaaagataatgcccattaacctattcatttttttatcccttttcaactcatagatttatatcatatacaaatctttattaatagattcctatacttataattatgataattataagttttgggtcttactatttgtattgtgttggtaatcataatacttttttctacttaatatttttttgtccttctacctccccgctccttacttaacattatattaaagtgttaaaattcttccaaaatatttttaatgggtgacctgtgactaaagctttcatatatttttaaaaggcctaccttcttacttactgacctcctatgggatacccccttttttttttaagtctttctcttttttttaagctatctctttgatcatctatcactcagcaattgagttcatcatactaattctgtttatatgagcatagaaaagaataaagaaacattagaaaaggtgagactrtgcataaaagattttcattcattaagtaatcgattgacatagattaaaaattgaaatgttctttttctgggtgatacttattttattttatttttttgggttggagtctcactctgttgcccaggctggagtacagtgatgccatcttggctcaccgcaacctccacttcccagattcaagtgattctcctgcctcagcctccaagtggctgtgattacaggttaccgccaccatgcccagctaatttttgtatttttagtgcagacagggtttcaccaagttgggctggctggtctccaactcctgacctcaagtgatccacccactttggcctcccaaagtgctgggattacaggtgtgaagcactgggccaggcctggtgatacattttaaagatattcttataatgtagcaaaaccttaaaagactggaatattttgacaaaggaatgacttggttattttattgaaacagggtctcactttgttgcccaagctggaatgcattggcacgatcttggctcattgcaacctttgcctctcaggttcaagcaattctcgtgccgcagcctcccgagtagctgggattataggcatgcagtaccacgcccagctaattttttgtatttttaatagggccaggggtttcaccatgttggccaggctggtctcgaactcctgacctcaggtgatccacctgcctcagcctctcaaagtgttgggattacaggcacgagccactacgcccaaccccacttcagcttattttaagtgaactccttatgtcttttttttttttaattgtaatacatgkatgcctgcatactataagcaagaaattccaataatgcagaaatacatacagtgaaaaaggaaagttttatatccacgcatctttctttgttttttgtttttgttttttttgagatggagtttcgctcttgttgcccaggctggagtgcaatggcgtgatcttggctcactgcaacctccacctcccaggttcaagcgattctcctgcctcagcctcccaagtagctgggattacaggcatgcgccatcacacccagctaattttgtatttttagtagagacggggtttctccatgttggtcaggctggtcttgaactcccgacctcaggtgatccgcccgccttggcctcccaaagtgctgtgattacaggcrttagccactgtgcccggacccattcttttctaaatcattgctggtatgtactctggacttcacttctttgcacttacatgtgtgggtgtatgaatgcatatataattttgtttttgacccatgtgacattactttagattgaaccataagaaattgcctatattcagtcatttttttaaatctatgaaaaaggcaatttcttttggttcaacctaatactacaaatattgttctactatttattttttcatagtgtatcttgaagatctttctattttattgtatttagaattactaaatgactgcattcttaaagggagaaaaatgccagttttctccttccctggtaataacactgtttcttctattttttttttctttctttttgaaggcagctgaggaagttggatatccagtaatgatcaaggcctcagagggaggaggagggaagggaattagaaaagtcaacaatgcagatgacttccctaatctcttcagacaggtagagtataagctgtttttgtttgtttgaactaacatgtatatcagagatatatgatttaactcatactataatttggatgcccagaaaatatttaatttttaattttgtctatagctaactgtctttctctctagtttctacctgcatattagcagaraaaaaaggttaatgaaatgtccaactcaattttaagttttatttaattaggtaattcaaacagtagagttattctgtcttatataaacgtgctcagtttgtcagatagctctttcctacmtggtgcgtatggcttataggacctcataatgrcaaagaaaaatcaatacctttctgtatttttgtgcccctgttctgctgactttgtaggtcatatgtgatatggtggtatgatactgatatggttgctcttggcttggccaggcccaggctctctgattgactttttctcactttagttcacattgcctagagacctctgagtttctatcatatgtctcatctaccctgctgtcccagcactctataccctagcccgtgttgcatggccaccacaccctggcacaggaaccctatggcaggcctacagtatataggaactgagagtgactcaggaaagctcgatgtaggatctctctttgccttaccctctgctttgcagccaagttgatgtggccatactatacattggttgcggagacgaccaaagaagtgatgtctttttagaatcttaaacagaaagagaaaagggagacaggggtctctttttgttctgtcctcagagttaccctcacatatttaactcactttttttcctcctaccaatacatagtaaaagatttgtcaaaaaatggaaaattgggacagaagtctgctcttttcactctcctagcttccctctttttcatagtttcctcatcatcttctactttgcacttcttttactagtgtgccatgctaccttttatttcgcttttttttttttttcccttaaaacacttagcagcaaactccttgcttcactgttaagagttaaaaggaaagtcttatgagctgggtcttccatgatttcatatacaggtggtccccaacttaaaatttcaacttacaatcaacaaacaaacaactttacaatactgtgcaagtgataatgcattcagtataaatcttactttgagtgcccatacagctattgtttttcactttcagtacaacattcagtaaactacatgagatagtcaacactttattataatataggctttgtgttagaagattttgcccaactgtaggctaatgtgttttaagcacatttgaggtaggctagactaatctatggtgttcattaggttaggtatattaaatgcaattttgacttagaacattttcaacttatgttgggtttattgggacataaccttattgtaagtcaaagagcatctgtactagataaaggaagtgataaaggtgttgtcttggccaggattggtggcttatgcctataatcctagcactttgggagtctaaagcgggagcattgcctgaagccagaaatttgagatcagtctggaagataaagtgagackctatctctacaaaaaattgtaaaataaataaatcaataaataaggtattgttttgctacattatcctattttaagtgtcagaaattgaatattaccttgggtttttttttttttttttacatttttttcattgaattctaatttcataggtagatcagtgactcaragagtctagagaaaaaagactgctcttagaagcaaaaagaaaaaaaaggcatgttaattaatgttaactcttacagacatttcaaaactactcattacttatggaatcaaatagtggaaaagtcttaaaacactaagggaaggttttctgtgaaagtccttaagtttcaatactagttggctgaataaactaatcctcccattgggaacaaactagaaaagctgaaccagatatatatatatatatatatatatakatagatagatagatagatagatagatagatagatatagatatagatatattacattttacggcattagagaccattcaagacagtgaagaattatggggctaacatacaagagaaaaaggaaacccagagatgtgagcctgacatatgaggctacttttcccctagatatatcttctagttcaagatagtagaaaggctgataagttttcaacagtcttaaaagactaagagggcttcctggggaggggtgccctggaaaacctcccacattttaggttaggatctttaaggactgactacatcatgggagaaagggtgaactggaaatagactagccctcacagggactaaatcttggcttcaaaacattcaacctctgatttaagcaagatgttttaggattgctrgtgcttctagacacctgcaggaagcaaatgtaaatcctttccagagaaagataacatccagaacttaaaattatttctattaatttttcttacagcttatcaaccactcaattgaaaataggcatacaaaattagatgattgaaaaccaagaagaacaaaacagtagaaacagacccacagagggtttatataatgagattatcagacaaggactttaaagtaattctgcgtaatatattcaaggaaagtaaaggcaagattgagaattttggtagagaactggaaatcataaagaagaaacaaaagttctagaactgaaaatgcaataactaaaattaagaagtcaatatcaggggttcaagaccagcctggccaacatgatgaaaccccatctctactaaaaatacaaaaattagctgggcctggtggcacatgcctgtaatcccagctacttgggtggctgaggtgggagaatcacttgaacccaggagacagaggctgcagtgagctgagattgtgccactgcactccagtctgggtgacagagcaagacattgtcttaaaaaaaaaaaaaagaagaagaagaagaagtcaatataggagtttaaaattatagcatattagatgcagttgaagagaatcagtaactggcactggagactgagatgggagaatcccttgagcccaggagtttgaggctgccttgagctatggtcatgccactgcattccagcctgggtgacaaaacaaaaaaatctagaaaaagataaataattaacgactggtgagtagatcagaaggaaattcagactgaagcatgaagaaagacaaaaggatgaaaaacatagagcaatgtgagaaattatttgcaatggttttgtagttgttgctcttgctgtcttggagcaagccctcagactaccatgtgaagagcccattctagcctactagagaaggagaggtcacatgagcagagatgagttgtcccagctaaggcctcctagtcctactaggacagtcagcagcaccacatttgagacatgtaaatgagaccatatttgaccatctaaccccagttgagctgccagatgactatagctgcatgaattactccaggcaagatcagaactgccagttgtgcccagttcaaaatgctgatccacacactcatgagcaaataaaataaaatggttgctataccaagtcactaagattttggtagtttgttaggtatcaatggataattgacacagaaattgatacctaacggtatgatgttgccataacagaaaagtaaaacgtaagacattgactttaaaactggctcataggtgtaggctgaacattggtgaggaggatgttaatgaagactggaagaatgatgaattgttaagggaggctggaaaagcagtgtagtaattgttactggagtctggaaaaaagatccatgttctgtaataatggaacaattggcaaaaaaatgttatctgaggtaacttggaagacaaataatatatttaatgaagtcatggatctggttaaggagctctctacaagtgtttaaagtatctgtggagtgcttctagttgcttatgctaaaaaactgtaaaagagaggtaagctaaagaagatgttttgcttacaagcagaatttacagaaatgtaaaggacccagaacttgttgaaaatagaattgtttctcatcccgagtctctccagctggcaaaagatttgcaaagtaaaaaatgcctcagagtaaagaccaagtcaagagtgcctgtgactttaaggcctcagaaatctttaaggtagtagctaataaattaccctttcagctagaaagatgcttctaagtatcttttttttttttttaatgctttcagctggaaacatgcttctaactatcttttttttttttgttttcttgagagggagtctcactctgtcgcccaggctggagtgcagtggcgcgatctcggctcactgcaacctccacctcccaggttcaagtgattctcctgtctcagcctcccgagtagttgggattacaggtgcccaccacaatgcctggctagtttttgtgttttgactagagatgaggtttcaccatgttgctcaggctggtctcgaactcctgacatcagatgatcctcccaccttggcctcccaaagtgctgggatcacagacataagccaccatgcctggccctaagtatcttaagggtactgtctcacagcatcctgacgtgcccaaagtatagagaggtctatgcagacatgagttgtggatgtgtctctttgggtgagcggtgaaccccaatatgattcataggaaacccacaaagttgtcaagagacttgtgttgatgaatgcaccaagggactgaaagggccagaaacagttcaaaatgaaaagtgacctctgagccttaaactttttaatgagcaggaagcagacagaaagctattcagctgtaaatagctgtcatttcaaataaaaagagggatttctcagagagtggagtcaggagcccagagggcagagctaggagcaggggatgccatggattaaggacctactcccagggaaccaaactagatcctgaaaaacaaaacaaaacaaaacaaaatgaaaagcattcctgaccctggagtaagggaatctgacagcatgtacctatctggatttcagaattgctatggaccaatgactactatgtacctcctatttcctcctctttgaacagcagtctcatttgcagttatcccctcccaatatcatcataaatattgggagtgttgggccagataacttgtcttcttagttcccaggtctttggatcaagagaaactgtacctgaggagttgcacccaaggaacctcattttcttctggacatgactcatgagaaaatggacgtcaagcccaatgccatgattggatgagactttgggggtcttgggagggggtgagtctrttttgcatgtgggaggtatgtgaattattgtggccatagggtagagcatagtaagttgtttgcaagagatggcgacaataactcctcccattcctgtatgtacaccctttgcaatgtgactttgctgttcctcccttccaggggtggcatctattttccctaccccttgaatcttagctggctttgtggcttgcttagaccattagaatgtggccaaagtgatgtataaattcgaragcctagacctcaagaggccttacagcttcttcccctcttggaacacatcactgaagaagcctagtctagcctgctgcaggatgagaagccacctgcattggagatgaacgattccagctgaggctccctagacctaccagccagcagtcagcacaaatcaccagacatctgagtgagaccattctaccccactcaagctaccagatgatgatatgtatgtaagtgcaagaccagaagaagaactgcccagatgagaacaacatcataaaaggttgatgttctaagcaagccactgagttttgagatgacttgctacatggcaaaacagagcaaaaaagatacagagcataaaagacatatggttatgtgaaatggtctaacatcatgtactttaagtctcagaggagaagagaaagagaatggagcagaaacaataattgaagaaatgatgaagcagaagccatatttgaagagagaaaagctaagaatttctttgaacagataaaagataccaaggacagattcaaaaagcactatgagcctcaagcaagacaaatacaaagaaccacatctatgcttatcagagtaaatctaccaccctcccccctataaaagacagaaagagagaaaatcttaaaccagctgaggaataaagattactttcaaaatagtaacaataagattgacagttggcatctcagtagaaacagtgaaagctgaaaatcattgggattatttaaagtgctgagaaaaaaaatagttaccattttagaattctgtccccaacagtaatattcttcaaaactaaagatgaaagtcctttggctgcaacaataccatatatgatgtaatgtgaaccaggaaagtatcttgtctggaacaagttgtacatttggttgtacagagtacaggatggcagtattttgccctgttgttggatttgtgtatgtgcctatgttttcaaatattttgttgtttacctttgtgatgcaccagatgttcgtatgttttcatatttatcaattaatattggttatgtaagaatgcagcatcttaaagatattaaagatgacagcatggactgtattttattcagttttgtatttctgctgattaacatggttcctgacacttctggacatctgcttgttgaartcaaagtagcttatcaagatagataaaaagtttaaaatttaagaattgrttttttttttcccccttttctaatacaggttcaagctgaagttcctggatctcccatatttgtgatgagactagccaaacaatctcgtcatctggaggtgcagatcttagcggaccaatatggcaatgctatctctttgtttggtcgtgattgctctgtacaacgcaggcatcagaagattattgaagaagcacctgctactattgctactccagcagtatttgaacacatggaacaggtacatatattaaaaggcttactttatgttttcttacatagaacatttttcattcagttcatgtaccaatctgagaacaatggcattttaagcaacgattctgaataattaataaaattatatccttttcttagagaaaaaaaattctactgttctcccactaagagaattgtcaaggaacatgtcaagcttctaaaagtagttaacgctttctaaaaaaaatcagcgtaccatttcaggatacagggataaagaagagaaatgttttggaatttttaatcttatgattgatttttttaagaggctcataatcaggtagttttatttgctgggttgagtatcatcaagtcttcagctgaatttaatcaactctattaycgtttttggaaagtcctctaaatatcttcagagttcacacattctatctttttgtatagaaagtagtttctcaaagtcatgagcgatgccttcggaataactatagtttagaggcctgaacatagtcttttctggagtcctaacccagtctctacatcaaaatagattcttcaaaatatatttcatgtgtgttagaggtctatttcctatgttgtgtatatattaggatgtactcttgaactgctgtaataaagatgccttcaaaatacagtggcttggccgggcatggtggctcttgcctgtaatcctagcactttgggaggctaaggcggacagatcacttgagccctggaattcgagaccggcctgggcaatatggtgaaaccctatctctactaaaaatacaaaaattagctgagtgtcatggcacacgtctgtactctcagctgcttgggaggctgaggtgggaggatcacttgacactgggaggtcaaagctgcagtgagccttgatcatgctactgcactccaacctgggtgacagagcaagaccccatctcaaaacaaataaataaataagcaaaatacggtggcttaaacaaggtgtaagtttctatttctctttcatcatagttcagagatgagctgttaccagaaacaggtttattgctcacctgttgcctgtttttgtaaataaaattttgttggaacacaatgatgcttatttatttatgtgttatttatggctgctttatcactacaatggtagaattgaatagttgtgacagaggctatatggcccacaaaattgaaaataattactatctggctctttaccaaaaaagtttgccaaactttgctcttggacattgtcatcttcatgattaagctaactcacacaagattatgttcacattgtggcctgtgggaggaagagacaggggatgtggagggcaagcatatggaagcatgatcttgaagtcacatacatcacttctgctcacattccactggacaaaattcagttacacaattatacctagcacaaaggatgttaggaattgtgatcactaactgggtgaccatgtgctcagcaaaaatttcgattttattcctaaaatgatgaagtagagaaaagtcactggagggcatttcataatctgtgcctcagtctgttcctctggctacctattatccctttatcctttttcctactttcagagcacacatagcctttgtccaaggaagacaacctgaagccccatccagttactagtaactggatgggttattactggaggtgattccggatctctatatgatgtatattcttctccattagatatgtattgtggcttttcatgggccagtgactcaaaatacaagttatttacccagtattatatcccctgccttcaccatacacccatatacaatgatggaataggaacaggataactctcatttggaaaaatgaaaaatacatagcaatcgttggtccatagcagttatcaaatcctcctttttaggtaggaattgcaatgattccctgctatataatagaatactacctcagttagacctggctgtccctggttctgctactgcacactccagagaagtgcaataagggagtaaatcccttgttcattgtccttcaagacacctgacattgttttctgggaagttcttcctcattcagttttctctgtgagttgggctttggagactatgccttctttggcagaactttcacaacccacttcctgctggtgcaggattgagggcacaaatatcccaatcatcagtcgcaggcttttgaaggccaggtttgtggtttgtttagaaatacaattccttcaaatacttaactaagcttctgggctatttgcttgcaatcagctttgggttggattaatcatactcatagatttcttctagatatagaaacttttcttctattatttactggcttctgtgcttagcctatctctcttgccttgatttaatattggctatcttggggccagctgaaactaaagcagcacgtttgatctttgacactgagttgcttcagggtgataatctcattttctgtttggggggatacaaaagaagttggctttttcgacactctgaccctttcagaccatcttttttaaggtttagttggtgtgtggtcagtatcccaagttattgtaggaaacagtttaccaaatgttgtgttatcccaacaaggagattatcacctttccagcctgcagtatctgtttctctgctacccactacccttttgctaagctagcatctcatattttaatatttttaaacagcaacattctacctgcacttaataattcctgtatcgattaggatacaggttaaactgctataacaaaaaggtccaaaaaacacagcggacccccccaaaaatagaagtttatttttctctcccatcctagtctgaggtgagcttttcagggctggtggaagtgttttattccacgagaccatcttgggattcaggttcattctttcttttctttttctttcttttcttttcctttcttttcttggtgttcttagtgtgttctcatttgcatgattgaagttggcttatactatcatgactatgttccaatgaataagaaggaaaaagccaggaatagagaatgagacatttccttttcaaaatatgacttagggctgggtgctgtggctcacgcctataatcccagcactttaggaggctgaggtgggcggatcacctgagatcaagagttcgagaccagcctggccaacatgatgaaaacccatctctactaaagatataaaaattagcctgacatggtggcatgtgcctgtgatcccagctactcaggaggctgaggtaggagaatcacttgaatccgagaggcggaggttacagtgagccgagattgcgccactgtgctccatcctgggtgggtgacaaagcgagactccatctccaaaaaaaaaaaaaaaaaaawaatatatatatatatatatatatatatatatatatatatgacttgggagttatgcatatcacttaccaatgctggtgtcctgtttgtcaaaacttagccactaaccaggccaggcatggtggctcacgcctgtaatcccagcactttggtaggccaaggcgagtagatcacttgaggtcaggagtttgagaccaggctggccaacatggggaaaccccatctctaccaaaaatacaaaaattagccaggcatggtggcgcatgcctgtaatctcagctacttggggggctgaggcaggagaatcacttgaacccgggaggcagagtttgcagtgagccacgagattgtgccactggactccagcccaggagacagagtgagactctgtctcaaaaaaaaaaaaaaaaatctagtctctaactagttagctatgtttctagraagaagaggagcatattggaaatactggaaactggacaagagtctgtccccatgtttttttgtctgcatgcatttatgtctggtggggtgaggttgcttttgatgcaaagtgaaaaatgctcttttctcccgatttttcattgagtttttcatccttgtccagggatattgtataataatcagaaatgtgctctcatgtggctaaaagcttttgatggctcttatacacactgaacagttgagtcagtgagaggctgtagtggtctagcagttggataargtgagatacttatgtttgcttatctctcttctttgagtgtgcggtgaaacttgccaaaatggtgggttatgtgagtgctgggactgtggaatacctgtacagccaggatggcagcttctactttctggaattgaatcctcggctgcaggtagagcacccttgtacagagatggtggctgatgtcaatctccctgcagcacagctccaggtgagtctccctgatctgggttgcagagcctagaaaagtcagagaggcctgaaaaatgggtttaaccagtgtgtgataagagaaaagcacctcctatctgagtcacacctaatggtcatttctctttcaccctgtatgtgttatgcatgtgtggtttggttttcctgatgtagtacagacataggaatgttattttttctagccagacacatctgatataatgtgtcatgttttagaaataaatgttaataatgtatgctttattcaattatttagctatagtaaacttcacaactttgtattataattattccctactcatttttgtttttttactagtgttctttattgaaataattctgcatcagagattagtggttgaagtttttccttacaagagtgtggtagcacacatatatttttataatttgtaaagtgcttgctgtcaatattattgtcttctctcagcccaggaaacaaatattatggaaagcagtaatagttaatgataaggcttgatattatttttatctaacatttgcccacatcgagaacaccttctgggttcctattaaagactaaagatttacttacttcctccagtggtttgcagggatggaagagataattatgacacaattaagactttctagctgtctgtttttggatggctattaacatttactcctctgttggatattttcattcttattacgtgatggagaaatgacaacaggggaactggtgtctgttgcattaggaatgtggggacttctttagaagtggagaatattctaactacttatctgtagtgatatattgtatttcaagcaacttagagttgatgattgtagaatacaggttataaaaatagaatgttttagggagtggctccaaaaataaaaatattttaggttatctgatagcctctacactttaagggaagtaactgaaaaattaaagatgtgtgttttattacctttcagattgccatggggattcctctatatagaatcaaggatatccgtatgatgtatggggtatctccctggggtgattctcccattgattttgaagattctgcacacgttccttgtccaaggggccatgttattgctgctcggatcactagtgaaaatccagatgaggtaacccatcacttaaaaggtttatacctccttttaatgaactttaatgttaagatagtatctgaaagtatacttctgaaatatcttgggacttcctctggagtgggaaacatagaggtttctcagagcagataagtaaatggttgttgcttcattggttacttaatcccacttaagtcactgtagagtcttcagtgggtctgtggcactgggtcttggcctttatcatttttgtgtgtcttctctgcttctgtgtgtgattaacagagaacttaaacaatgaatatataaatcttctcttccttcgaaacataatatggtctctcattctttattctctaacagggttttaagcccagctcaggaacagttcaggagctaaatttccgcagcaataagaatgtttggggatatttcagtgttgctgctgcagggggacttcatgaatttgctgattctcagtttggtcactgcttttcttggggagaaaacagagaagaggcaatttcgtgagtataatagcatttgattgcattttacaaaataaatttgtgctaatcttaagtgaaggtgtgagcatgggaataggaatcatctgctgtcaaagtaataatatgaacaacctttttgaagaaattttgaatatctttaattacacttgcattcatgttgtattaaattatgcagtgcttggcagatgtttttctgtttgttgttctgagccttttgaagtatttttcctttcaaatatttttgataaatgtataaaattgattgctttaaaggtatcttatttttccacaggaacagtattgttattgaggggaggtagattcttggccaagaactaggtatcaaataaatcatagacttttattttatttttttcttgtgagaagacttaaaatctattagcaattttcaagtacacaatctattgttatgagccatagtcaccatgatgtactcttatagttatttaaaataataaaattatactgctcatattatgaaaaggacataaagaaactgtctacattgctaatacaagagaccttagcatgctgtatataacagcttatgcaaatataactgctatatcataaatgttagataatattctrttaatcataaacaatgaatattaaattaacagcacttttgcttgcctaaaacatagggctgaaggaggtaattttaacagcttagatcttttggaatatctatctaaaattgaaacttgaactagttcttttctgttttttaatggtttattgccttgtatcaaacatttaataccattccctttacctttgtactgtacatggagtaggtaattaataagtgtttattagtattaattactaataaatagcatttgtttattagtaattaatcctaatatatggttgtttgtattaataaacacttattgattagttttatatttttatcaatttcctgaattaattaattttaagaggcagagtcttgctctgtcacccaggctggaatgcagtggtgccatcatagctcactgaaacctcgacctcctgggctcaagcaatccttttgcctcagcctcttgaattgctgggactgcaggtgtgcaccatcatgtccagcaaattttaaattttttgtagagatggggtctccctttgttgcccaggctagtcttaaactcctgggctctaatggccccacaaagtgctggtattataggcatgagccgctgcacccagccttgattaattagtttttaatattatttttagaagtagggaaatctcattatttctctattttgtcctttacatttcttctcattcttcaaaactataagtggaatttttcaaaattaaaacactgctaccagaaaaaaacattggtatgaagttgccttttaagcatattcgctgccatattatgctctgcaaagtgaaaaaggtttacactagagcttgcaaattgttggctttctggtgagtctcaacatacagatgtgttttgatgggctcacaaagtgttaattttttttaatttgacaatattaaaaaatcaggagattgaaatcaaaatatggatttctgctagctcttaaaagtaggactataatgacaacattggttgtacattctagttgttaaaagttagctaattttgcctgggcacggtggctcacacctgtaatcacagcactttgggagaccgaggctggcagatcacttaaggtcaggagtttgagaccaacttcgccaacatggtaaaaccccgtctctgctaaaaatacaaaaattagccaggtgtggtggcaactgcctgtaatcccagctactcgggaagctgaggcaggagaatcactggaacccaggaggctgaggttgcagtgagccaagatcacgccattgcactccagcctgggcaacaagagcaaaactccgtctcaaaaaaacaaaaaacaaacaaacaaacaaaaaacagctagttttgtgtgactgcttcttttcgacgggacataaactttgtagttaacacagctcctattcagtctgcctcactcatttatgttcccagactggcctctgttggcatttaggtttaagtcctgatttggcagaccactgtgtattttcttcagggaatgtcctataacccaatccagaagccttgttccttatttctgaccagctctgtacatttgtctacagtacaaagctaactagcttaatttttagcatgttaaaaatacgttatctacaataagtctccttcttgacactatgccaaaagttcattcttcagcttagagctttctttgtttcttatttcttcatttcattaggtctatatctcagcttggggtttggactcttgtttgccagaatgccccaactcatatattccagtatattccagtataatttcccatgggtcataatctaaataccatgagaacaggactgtgtcttgttrctgctatatcccctgaacatagtaagcattcagtaaacgttggttgaatggattagccactcattcctatccttatacctctgcttcaatcataccattccctgaactcaagctgtattttccttttttttttttgagacagagtcttgctctgtcgcccaagctggagtgcagtggcacgatctcagctcactgcaacctcttcctcctgggttcaagtgattctcctgcctcagcttcctgagtaactgggattacaggcacgtgccaccatgcctggctaattttgtcaacctgtattttcttccctctgcttctttgttcttgctatttcctctgttcattcatttattcttttttttttttttctgacatggagtgcccgccaccacacccagctagtttttgtatttgtagtagagacgggtttcaccatgtcggccaggctggtctygaattcctgacctcgagtgatctgcccaactcggcctcccaaagtgctgggataacaggtgtgagccactgtgccaggcccattcattcattgtattcaacaaatatttactgagtatctgctatctactggttctggcaatacagtgaggtccaagatagaatctctctcctcacaaaactttacaatccagagggtgtaagacaattggcagttaaaatacaatgtattaagtatgatgatagtcagattatttaagggcattataggatcatacagatgagtcaactaactcagtctagaggggttctgggaaggtatcccagaagacagtgacatctagattgataattgaagtttgtagaagtaagtcaggtcaaaggaggacacagaaaggaggacagaggtgggcaacagaataatattttaggctgagggaatgcctggactacctggaatatgattcctctcacagttataattatcagctatactttagcccatgtcagtttccacatttttcatgaaactgtagggagatgaatttctcccttcttacaacctctccagaactttgtgtaagtattctgtctggcattgatgatattctgccatatattttgaaagtgattattgtatttatgttctttcttccttacaatcatagtatgtgtcttattagtatgaggtacataattagtatttgtggaagtaagtacctgtcccrtgcaggatagacactgggcataaatatacagaaaagccccatagtatttgaaattctgctaaaattggatcactttgcacttaactgggaagtaataaaagtaatgagcaaatcattgcatagatatccaaaatgcagttttaaaaaaaacactgtcacatgcagtgtcaggctgatatatgactgcacccagagagttgctttactgtatggaaatctttaaattaagcacttgggaaaattcattgaactgtatacttaaaataagtatattttattgtatgtaaattatacataaaataaataaggtacaaggatagggagaattaatgccctaattcttgttagccaacaacaaatgaatggaataatggaaacttagtaagtaaaagctgagggtgacttgcatataatttgttataatttgttctgtactcattataatgaaatgtttctgatttgctgatgctcttatggtaatatcagttagaattcatacgttttctgactttttgcaaatttccctctcttgaatgcacatgaatgagcacacttgacatgtgcacccttatttgtttttggaactgcctctctcccttccctctcaagattccaaaggaatgaaacagttctttcttttatttttatttttatttttttggggggacagagtctcgctctgtcgcccaggctagagtgcagtggcgtgatctctgctcactgcaagctccgcctcccgggttcacgccattctcctgcctcagcctcccgagtagctgggactacaggcgcccgccaccacgcctggctaattttttgtatttttagtagagacagggtctcaccgtgttagccaggatggtctcaatctcctgacttcgtgatccgccttgtcttggcctcccaaagtgttaggattacaggcgtgagccaccatgcctggccaaacagatctttaaaattattgaaaaacattaaagtgtttgttgctgaaacagattggcttctgttctcccagaaacatggtggtggctttgaaggagctgtctattcggggtgactttcgaactacagttgaatacctgatcaaattgttagagactgaaagctttcaratgaacagaattgatactggctggctggacagactgatagcagaaaaagtacaggtgtgtatttctccacaaacagatgctgggattgggtttttatagacttgtgtactcaatccctgycactacatgaaatttatttgattctaatgtaaatggttcttgatctacctggaaaaatctaggagtcagtgtaattttagcactctgatggttcctgtgcttgtgtcacacagtcattttatgttctagcattacttcctgaggtatatttgaagtgaggcatgcagggatttaattactttctttttcttcatttaatgttaaacctggtccatagttgccaacttctgtatctaccagatgctgaagagagaggcctcatttagatcaagagttatcacttattccttaattcctggggctatgctaaattatccaagattttgtataaaatcgttagattcatataatttggaggtccaaattttggctatacaccgtttttctttgagattatcagtagccaaatcgttgtgtctttttaaatttatttctgtcagaagcctatttttgagctattcaatgattggctaagtggaagtcttagggagaaaagaagaaagttgtttttcatttctcttcaagtggtgcctctaatcaaattctaaaagtgaatgtgttcatttttatctaaaaaatcagttgggcagtgagaatggagattttcattgctagctgtttcatcacaacaaatttgagcctgatttcatttgagaggctgtggtgccaagtgaccatgcatttgatctgccctctttttcctcctttcaggctgagcgacctgacaccatgttgggggttgtgtgtggtgccctccacgtggcagatgtgagcctgcggaatagcgtctctaacttccttcactccttagaaaggtaggctttgtttcttgtaggctacacaaactaatcaatggycctgagtacagggactgaagctcaaagacccatttattcttctgtccattcctggcagcttatgagtgctacttgttattcatggaccatggtggcaagaaaraggggatgttgacatttatggcaaattatttggggagtcaaactgcagattctagacattaacttataccacagttagaacaggttgcttctttaaaaactggaatccatctgcagtagwtattctgtcctgtataagtatcaaatctctccaaaccctggtgataaaaatctggtatttctccctagcactgaaccctaaatatttcatgtattacttgtaccacctttcagaagtaaataattaaggctgatattcaggatgacctcatgagtctttcaagtagagggtcagacatctatggggctaaactaatttctattgctgattgaggagactaagctctgcctttgagtccccagaggaatgttccaagtggctaatcattttaaagcactttaatcacaggcacttttatttccttctgtgttgttagacttatatcaactcccttttgaggtatctgaaagaaagaaaagaaacaaaatttaaaaattgaactgagatttcagagttattcaagtcctatgataagtatctttcactatgttactctcatgtagtaaaaccttcagcagcttggcatttctcttctgtatcaaatctaaatcccttggcgtgactttcaactccctgtatacatgggccgctttttaccaatccagtcttatttatttctgttctgcaacatataatctgtaacctagttaaatagttttcttattggtgtacaaatatgtcaaatgcattttcctctacaagccccccacccacctccttttaaaatgcttttgttttttacttattttattatttttattttttttatctttgagacagagtctcgcactgatgcccaggctggagtgcagtggcgcaatctcggctcgctgcaaggtccgcctctcgggttcacgccattctcctgcctcagcctctcgagtagctgggactacaggcacctgccaccaggcccggctaattttttttgtatttttattagagacagggtttcaccgtgttagccaggatggtctcaatctcctgaccttgtgatccacccgccttggcctcccaaagtgctgggattacaggcgtgagccaccgtgcccggctgcccggcctttttaaagactctcaaataaagtttcagttgctaggagcagatatgcttacactgaagttttataattttttcgcgtttaatcttaatctttttttttgagatggagccttgctctgtcaccaggctggagtgcagtggcgtgatctctgctcactgtaaccttcgcctcctgggttcaagggattctcctgcctcagccacatgagtarctgggactacaggcacgcaccaccacgcccagctcatttttgtatttttagtagagacggagtttcaacatgttggccaggatggtctcgatctcttgacctcgtgatctgcctgctttggcctcccaaatagctggaattagaggcgtgagccactgcgcccaaccttaatctttatctttaagaacagttaacacattcatgtggttcaaaattcaaaaggcacaaaaaagataagcagtgagaagtctctctcttacctctgttccttggccatccagtttccgtcccctatagtaaattcatattaccaatttcttttctaaccttccaaagawaccctaaacttacatgaacatatatatgtgtattagtctgttctcacactgctaataaagacattcccaagactggctaatttataaaggaaagaagtttaattgagtcacagttccagatggctggggaggcctcacaatcatggcggaaggcaaaggaagagcaaagacacatctttcgtggtggcagccaagagagaaaatgagagccaagtgaaaggggtttccccttataaaatgatcagctctcgtgagacttattcactaccatgagaacagtatgggggaaccgcccccatgattcaagtatctcccactgggtccgtcccacaccacaagagaattatgggagctacagttcaagatgagatttgagtgggaacacagccgaaccatatcaacatgcaatatttgtttcttcccacctcctggttttttaaaactcaaatggtagcatgctgtgaagctgttatttaccttgcttttttaactcaacagtatattttttaaagtgttttttagttcacatctttttaatgtctgtatgttttgttccacatgtgaaaacatgcgcaacatcactaatcattaagtaaataaaatcaaaaccatgatgagataccacctcacacccattaggatgcccactgtcaaaaaacagaaaatagcaagtattggcaagtacgtagagaaattgggacacttgtgcactcttgatgggaatgtaaaatgatgcagccactattgaaaaatggtattgcaattactgaaaaaattaaaaatagaattaccctatgatctggtaataccacttctgggtattctgaaagaattgaaagcagggtctgaaagatacttgcacagccacattcataggaggattattcacagtagctaaaagatgggagcaactcagatgttggttgatggatgactggataaacaaaatgtggcatatacatacaatacagtattattcagccttaaagaagaaggaaattctgacacatgctaaaacataggtggatcttaaggacattagggcaagtgaattaagcctgtcacaaaaagacaaatactatatggttttacttatatgaagtatgaagagtagtcagactcatagaactagaaagtagaatgacggttaccaggaactggggggagggcgaaattgggagttgttaatgggtgtagagtttcacttttgccagttgaaaaagtcctgcagattggttgcagaatagtgttaatatccccaacactatagaactgtgcattttgtaatggttaagatggcaaatttaatgtaatgtgtattttaccctaatttaaaaaaatccattgtaagattcataattgatgtgatcaattccttacaaacgatcatttaggtatttaggttgtttctagtcttttgttattctaggaaatgctacaatcaataatgttttagattctcttataactgttagaactttgtagtaagttcctctctcatcgttctttcaggggtcaagtccttcctgctcatacacttctgaatacagtagatgttgaacttatctatgagggagtcaagtatgtacttaaggtatgcagaaccccattggagcttgcaccttacttttttagctatctttctttaggttgagaggcaggagaaaaagtttgatttaatgcagggatgggggtattagtgaaattaccgtcattatttttgtcagtgtcctgaagcagcgtttgttgttctatgaaaatcttttttgttgttcttcaacttcacatacactgccaagagataaaggagagacagrgaacaaccacagttggggaaaatcaactaaggttgccctctttgcttacagcaggactgagccatgtccacagacactgatgcaaatagcatcagtgccatgaattttcttcctcctgacagatctttcttatctgtatttttgaagcattcaaatttcatttggagctgtacctggaagggacacactgatcctcattctcattccctacaggtgactcgacagtcccccaactcctatgtggtgatcatgaatggctcatgtgtagaagtagatgtacatcggctgagtgacggtggactgctcttgtcctatgatggcagcagttatactacgtatatgaaagaggaagtggataggtaagtggctgtttgaggtccatttgctggtcatcctgttagccttttctcttattagctactagctcttgggattttcccaggcttttcttggtactcatttgtagttaaaaaaaaaaaaaatagtacatgcacttaacaaaaatatcaagagtattaaagtgtttataattaaaaacatgtctccctaccactccagtgtatgtggacaatgaaaaataagttcccctttttataagtaaccattgttaaaagtttcttacatatttgagtagaaattttatatgcatatacaagttacactcatgtacatactgtttttctttaaatacattcacaaatgtggctgggcgcggtggctcacgcctgtaatcccagcactttgggaggccgaggcaggtggatcacctgaggctgggagttcaagaccggtgtggccaatgtggtgaaaccctgtctctactaaaaatacaaaattaaccagatgtggtggcttatgcctgtagtcccagctacttgggaggcagaggcaggagaatcacgtgaacctgggaggtggaggttgcggtgagccgagatcacgccattgcactccagtctgggcaacaagagcaaaactccgtatcaaaaaaaaaagaaattcacaaatgttcaacaccagttatggtgttatgagaatgaaataaattaacatgttgaaaatgtgtagaacattgccacaacatagctaggcttcaagaaatgttagctattacgtcatcaatatctttgtgtgtgtttttttaaatggtggtacctgttatttttaatagtcatgtggtattccattatatgattatactatatttaatctgatccttattgaaggaaatttatgttaattgacattgtaaacaaatatgcagtgaatatgtctgtgtgtgtgtataataaagttttcaggattttttttctttgaaggttgacattctctaccattctcctttacatcctgaggtgctttcttagcttacatacttccacttgtctcctagatatcgcatcacaattggcaataaaacctgtgtgtttgagaaggaaaatgacccatcggtgatgcgctcaccttctgctgggaagttaatccagtacattgtagaagatggaggtcatgtgtttgccggccagtgctatgctgagattgaggtcagggtggtgaaaggactgtgggatcatgggaggggaaggtaggaaaagggtcggctgggatggactaggactgaaaagttacagaaaggaggctgggcacagtggcttgtgcctgtaatcctaccactttgggaggctgaggcaggaagatcgcttgagcccaggagttcgagactagcctgggcaagatggtgagaccccatctctatgaaaaattaaaaaattagcggcgtacagtggcacatgcctgtagacccagccactctggtgtctaaggcgggaggatcccttgagcccaggaattcaaggcagcagtgaatggagattgtaccactgtactggagtggtacaatttgtggcctgcgtcacaaatcaagaccctatttctaaaaaattaaaaaaaaaggtaacagattggaaataagaatgaaaaagaaacatcagttggcttaattagaagtgcgaaccttaagatttttaaaacacataggcaaatgaggaatctctagttctaaaaatagatactaggcaatagcacttgttgaatgttaggtgtcctaactgctggctatccagagaaaatacatggaggtggggcacaaaacagacaagaaatgtcatgtgattaattttaagagagctaagcatagagtgcagagggtcacctaacccaaatcaagctaagcttgtatgggaagatattctgaaagaagagacatttgatcttagttttgaaagacagatagtgatagagcaggtgaagaagggcagggaagagtgcttaaagttgaaggaatagcatgtacaaagacagaagcaagacagcacagtgtatttagggaactgcaagtatgtgttggtgtggcttgagaatagactaaggtttaatggggagggacaagcaaaggtgctaaagaagtaatgtgagatcttgaatgtgaggttatgaaggatcttataaaccatactagtaagttttcactatcctggaggcagcaggtaatctctgaaagatttaagtggaaaagtagtatgatgagatttggggtctaggaagattgcttttcgtgaccttgagggaggtatgtagcaagtagggagatctcttagggggtctttgaagtactttgggccagaaatgaagaaggcgtaaaccgaagagwtggcaagagaggaagatttttgagaaaggtttagaagatatgtctggctgggttggtaattggtaggtaagggagaaagaggagtgaagaatgwtccttaggttttggcctggttgtcttagattggattcactggtatgaggatattaaattgttccttactttctaagtacaaaacaaatataatcacaaattatgccaaaatggttgtaaaagttagaaaggagaaatgtcaataactgttattaattcctaaagtgaggtactgagagattttctaattgcttgccttgatagtccctaggagatgatggtaaattcccattttttcttggtcaaattaggtgtggtccaacttagatgctaagggaaaaattttagttcttttaagcactcatctgtgtaaagagagataaatctgagtctagtttatttttcactataggtaatgaagatggtaatgaccttaacagctgtggagtctggctgtatccattacgtcaagcgacctggagcagctcttgaccctggctgtgtactagccaaaatgcaactggacaaccccagcaaggttcagcaggtgagtaggaaggtgctccgaatattgctctctaagagctaaagaacttggtggtttggagaggcaagtgatttcaatgcttggtttgccagtgttttctttagctttgtcccctattaatcttatgccttgtatttgtgcctgtagtattatggaactagagtttgcaagagttactgtagtactaagattctgtaatttccttatgatgtttcctctattgacttccctcctggtagctgggtatgatgtctcgattttgaatgataactcttaagtgcagtggtgtgtttgtaccttagatcaaaagtagtagatgacttgatctcttgttggggttgacaggctgaacttcacacaggtagtctgccayggatccagagcacggcactcagaggcgagaaactccatcgagtgttccattatgtcctggataatctggtcaatgtaatgaatggatactgccttccagatcctttctttagcagcaaggtatgtatcacgtctcctggggaagggatgtacaaatgggatacctattctccaaaatagttccaagtctcataatgattgtttaagagggargaaaagaaagctgtttggcctagaactctttcaccttcagttgtgggacttgaggtctttaaatccatgtttcttatccttgtcatggacttcacatttaattgtgrttactcctttttttttttcctcgagacggagtcttgctctgttgcccaggctggagtgcaatggcacaaactcagctgactgcaacctccacctcctgggttcaagtgattctcctgcctcaacctcctgagtagtggggattgtaggcacgtgccaccaggcgcggctaattttttttttttttttttagtagaggtggggtttcaccacgttggccagactggtcttgaactcctgactttgtgatctgcccgcctcggcctcccaaagtgctgggattataggcgtgagccactgtgcccrcccgtgattagtcctttttaaactggagaataggggcaatgttagatgcttacgttgcaatttcaaagtactctatgatagttggctcacgcctgtaatctcaccactttgggaagctgagatggaaagatcgcttgaggccaggagtttgagaccagcctgatcaacatagcaagaccccatatctattgaaaattatataaatttttattgaaaagaagtagtatatgatagtgaattcagatatagttgactcttgaacaatacaggtttgaactgtgtgggtccacttatatgtggattttttcagccaaacatggatcaaaattacagtattgatgagatatggaacccacaactatttctatacatgggttccgtagggctcaagtatgtgcagattttcatatatgagtggtggttctggaaccaatttcccacgtatacagaatgacaactatatatctttttatttgggggattgtgttaacttgggtcctattttaccaatgctttctttctaggtaaaagactgggtagagcgattgatgaaaaccctcagagatcyctccctgcctctcctagaattgcaagatattatgaccagtgtgtctggccgcattccccccaatgtggagaagtctatcaagaaggaaatggctcagtatgctagcaacatcacatcagtcctctgtcagtttcccagccagcaggtatttataggataacactatatttttttctggctaccaatgccagagtttatgttgtaggattccttcctatttggatcctccttactttttggatgttgtgcttgtatacttttaagcattgtattcctcacaaaactgcctcagggtacaaacccaacagtgaaagtactgtatgtgaaggataagtatctgtagttatgagaaaagcacacttggatcatgtataccttatagctttgttcctggggctattccctaattagaggtattttcatgaattgaaaatagagtgatattagttgattgattgattcattcattcactcattgatttagagatggagtctagctctgtcaccaggctggagtgcagtggctgatctcggctcactgcaaccyctgcctcccgagttcaagcaattctcctgcctcagcctcctgagtagctgggattacattcacacgctgccatgccagctaatttttgcatttttagtagtcacgggtttcaccatgttggccaggatggtctcgatctcctgacctcgtgatccgcccacctcggcctcccaaagtgctgggattacaggcgtgagccaccrtgcccagctgtttatttatttatttatttatttttgagacagggtcttgctctgtcgccaaggctggagtgcagtggtgcggtcatggctcgctgtagccttgaccccataggcccaatggctcatcccacctcagtctcccaggtagctgggactacagatgtgcaccactatgcccagctaatttttaaaaaatttttatagagatgggggtctcgttatgttgcccaggttggtattgaactcatgggctcaagctatcctccctccttggcctcccaaagtgctgaggttacaggtgtgagccaccacacatggcctattggtagttttattttcagagacattcttactaccttggcagcatctttactctttacccataaagcagatgtatgtgtagggaatataggtagataagtggggagtgatgtttggatcttgaccttgaacagatattggtaagatgatagtttttgtaatgtagtcattaattcatctgggaaagggtgacaagggatgaaatctgcttgcttatgtagcgtgattctctatatagactacgcctggtaacttccagctgctgccaacatgtgagataggaactgccatgttataagaagaagattcctactggtcgtgctatagaggctgatgctttggggcattttgttgggttgggcctcatttttttcccttttttataccttagattgcaaacatcctagatagccatgcagctacattgaaccggaaatctgaacgggaagtcttctttatgaatactcagagcattgttcagctggtacagaggtagtaacttgtaactccagattcccagacctgtccatactcatgtcttcctttctttcaagtggtcacaaaaaaatttacctcagatttgacttcaagaaattggaaagcatcttatatcttagaaagtaccttgtcttttctaaatatcttagaattgtgagctaactctcatgctcaatatttctgacttcttaatattctacatttttttctgtcaattatttattattattattattttttgagacaggatctcactctgttgccccgactggagtgcagtggctcaatcatggctcattgcagcctcaacctcctgaggctcaggtgatcctcctgtttcaacccctctgaatagctgggactatagctgtgcaccaccacatccagctaatttttgtatttttagaagagctggggttttgccatgttgcccaggctcatctcaaactcttgggctcaaatgacccacccgcctcggcctcccaaactgttgggattacaggcatgagccactgcgtccagcctgtcaattaataaggcacagaaattttgttgttttctttttccttgccattttgatgaagctcctaatttttcttctgtcacagggcccagtatgacattttttcttcttagcttatggagcctattatattaggttggtgcaaaagtaattgtggttgttgctattaatactaaagggatattcacagagcatatttatttatttatttatttatttattttttttggagacagggtctcacactgtcatccaggttgtagtacagtagcacaatctcagctcactgcaacctctgcctcccaggctcaagcaatcctcccacctcagcctcttgagtagctgggactacagtcacatgctaccatgcttggctaatttttttgtattttttgtagataagaggttttgccatattgcctaggctggtctggagctcctagactcaagtgatcctcctgccttggcctcccaaagttctggsattgcagatgtgagctaaggcaaccggcctcacagaacacttttaactttaagatacttataaatttttcagatatctcagccatttcaagagtatggtaataatttctacttagcagtaggaactgaatcaaggtgttggtaggtggggctatgcaggattttgttgtcttctttattaaaaaaggtcttgtctatagtgagatttcttttaggcttagaatttaagttaattttgtagttcattttaggctgttctttattcagagggaaagcagttcagtggaatgtcgtggaggtaaatttggcctttgggtttattgcttaatagtgttggattgtcaggtttttcagtggagactttctatttgcctaggtaccgaagtggcatccgaggccacatgaaggctgtggtgatggatctgctccggcagtacctgcgagtagagacacaattccagaatggtaagcctcttcctgaggactctctagctaagaaagccttgattctgataaccaacccaaactatccctataggactgtgtaagagctaagccccctcctgtcaacaacacttcccattaataaacagtctcctatcactactcccttaaaaactaaacctctatatccactagctctaaagaaagaacaacgaaacacagcttgatgaaattaggaatccagtgtgcttctgagaaagggctgaagtaatttttctaatagagattaccattcctgttgatatctttttgaccttgtgtagtgtaagttggttgagtcatcacaggctgaaattgagaaacccatatctgaagagcttgattcttggcagctaatccatgaattgaaccagaggcatctaggaagagcaagttcaggttttccaatactttttagtatatcatttaggtagactttatccctggctttctctgaagagcttcactaaatgataaattgtctcttaagtgtgaaataaccttggctaaaattttaaagctgtttactgctgacattgcttcctgccacaagatggcagtgaaacatcacagaatttgaaacattatctgaaatttgaaacattttcctttatctgctccttttcacttcctttaaaagcagcctatgccactcatgaccagcaaaaatcctcatgtagatatcagcaaaccgcatccaataacatacaaaataatacataacaaccaagttggctttatcccacgcattcaaggttgatcagtttggagaaagtcaattaatataatttatcatgaaatagatgaaaggaggaaaaacatgctcattatctcaagataacagggtgtggagagggagcatttgacagaatttaacatccattcatgacaaactcttggaaactaggagtgaaatggaacttttaaaatcttgtaaaagggacccacaaaaaaatctgcaggatacatcatgcattatggtaaaacgttgaaaacattatctttaagattaggaataagacaaggatgcctgctgtcactacttctattcagctttatagtggatgtcctagccagtgcagtaagacaaggaaaagaattaaagggtataagagctagaaagtaataaagcaatatatctgccattattaaatatgatagggtgtctctttagaaagcctcaaaggattcacagattgattattaaattatttaaaatctaacatgattgctaaatacaaaagtcaacatacaaaattcaacagtatttgtttacagtagagcaattgtttagaaaagcagttcaggaaaaaaaaaattaaaatagcaggctagatgtagtggctcatgcttgtcatcttagcactttgggaggccaggacaggaggattgcttgaggccaggagtttgagaccagccttggcaatatagtgagaccccatctctacaaaaaattaaaaacaattagccaggcatgatggcacatgcctatagtcctacctactcaagaggctgaaacaagaggattgcctgagcccagggattcaagggtgcagtgagctatgattgtaccactgcactcagcccaggcaacagagcaagaccctgtctctaaataattaattaattagttgataaaatagcaacccaaaacatgaaatactaaggagtaaatctaacaaaaaatgtgcaagcctcttttgaggaaaattataatcaagaatattataatagtaaagaagatttaaataaattatcaaggtcttaaattggaatgtacactattaggtgccgattcttcctaaattcatctgtagattgacatttcaataaaaattctgttagtgtatttgtaatgctaattataaaatttccataaaagacaagtctcacaataaccaagatacttccaaagaaatacaaggtgaaaagatttgcctaatcagatatcaagatttaatataaagccatattaattaagaaattgtgagataggtgtagagatrgatttatagatcagtggaacttaatgacccagaaacagatccagccatatatgaaaacttattttatgatagaggaggcattgtagatcatggggaaaggatagatttttttttttttcaataaatgataccagcacaatgggttattcatttaaaaaaaaaaaaagaggaaagaaagaaatggaatccctatcttatgcctatacacaaaaatcaattcccgataaagacttaaatatgtactaaagaggtgaagctgttaaatggttaggagaatatcgttataacctcaggataggaagattttgttgtataagacacagcaagtacaaactacaaaagaaaagattgattacttaaactccactcaagaacttctgttcatcaaaatacgtcataaggagtctgaaaagcctgtaatcctagcactttcggaggccaaggccggcagattgcttgagcccaggagttcgagaccagcctgggcaacatagcaagaccccgtctctaaaaaaatacaaamattagccaggtgtagtgttatgtgcctgtagtcctagcttcttgggaggctcaggttggaggattgcctgagcctggggaggtcgaggctgtagtgagctgtgattgcatcactgcactccagccccgttgacagagcaggacacagtctccaaaaaaagagactgaaaatataagctacaaagtgtgagaagatatttacaaaatatatacctaaaaaataattagaagtatctagagaattggtatgaatcatcaagttaaagacatcctaatagagaaatgggcaaaagatatagaaagatattttacagaagaagaagtacaaataatttataaacttacacaaagatgctcaatcccatttgtaattagaggcatataaaccaaaaccacaatgagagtggcaaaaatttaaaagtcacatcatcatcttcattgcttctgtacatggaagtacaaattggtatataccactttggtaacagttggtcagtacctaataaagttgaacttatttgtattctttaacctagtaattttactcctagaaaatatactttagagaaactattacacatgtttactaggatacatatacaggagtatttgtgacagcactgttcataatcttaaaaaagacaagaaacaatctaaatatacataggtagagtggatcattgaagtctggtatattcctaccatggattactatgcagcagtgaaaatggatgcaccaaggcatacactgaacaaaaggatgaatctcaaaaatacaatgttaaggaaaagaaatggtacagtgattccatttttttcaggttcaaaaaccaggaaaattaagctatacatacattggtgataaaagttaagaaaaacaaaagaataattaacataaaattcagcttagtagttgtttctgaggaggggtacgcaggggtcttcaaagatactagagatgttctattaaaatgtaatggctttaaaataacacatgggtgtttatttcaactgataccatatattctatatattcttctgtatatatatttcataattaaactgttttgttttgttttttgtttggtgtgtgttctttttttgttgagatgaagtctcactctgacacccaagctggagtgcagtggtgcaatctctgctcactgcaacttctgcctcctgggttcaagcaattcttctgcctcagcctgctgtgtagctgggattataggtgtgtaccaccatgcctggctaatttttgtatttttagtagagatggggtttcaccctgttggccagcctggtctcaaatgtctgacctcaagtgatccacccgccttggctgcccaaagtgctgggattacaagggtgagscaccgcacccagccaattaagtgtttttaaaaaagagtgtcttggtatgcaggatcttcaaagtaaaaaaaaaaaaaacaagaaagtatcattgctttctttctgttaatgtctcccctcaccccgggtaaatgtgttctttttatttcccctggtcctattgccaaagtttatttgtgttgtcacttcaaagctaagtcttggtagagaaaaatattaatgcagaacagctaatttttaaacagcttcccttttggtctaaatgtgtcttttatgaaattggcagctctctcgatattgtagtccattgtttttcaaatataattttatttggaaaaaaattgcttatgtcaatctctaatatttagaataattaaaagcctggttacactggtccagtgtactcagtgttctaggaaaccatgataatgcagtttgaacgtcactgttctggtttgtaacttaacgtggaatctgaactgaggtgataatcctttactgttttcatgatttcataaaattctgacccttgagaatattcaaacactaattcctctttacttggaaatttaattctgaggtaagctgttttctaaagaactgaatattacttatatcccatggcagatatcactacagtgtaccagaggcttatgcttctgttgtaaaacatagctttcctactcagaactaacctgcccctggtggccttagggaaggcaagtgaaaatatgcataactttagtctccctacagaccttttgacttaatgcaaggttctccttgatctataccttgggttggatttggcgttcctaggcattgcttagctgtttcaaggactaacagaagaawatgttgattccaggggtagcagtcacacttctcatggatattgctaagtttggtgtggttttattttttgagctaaaactgttcctactgattagggtcaactattttctgcaagtcaaacatggaatcagaatctcaagctctgggggagaccttaaagatcatcaagtttaatgatatttacatttctttttaaacagaaatttctcgtctaaagaaatcatgagagagtttagagtaagactggggtttgagttattcccaatctttcagtctttaaggtacacccacctccccaatttttaaaaaatttaatgaaattgaggcccagagaggtaaaatgattttcccaggagcacacagtaaattgctaatagaactaggccttgaacccagatcttatatccaaattgcctgactcctagtccagtgttccttttactaaatcacattgccagtttctgtacaaatccatccaagaaaatccttatgatgtttcttctcactgctcgtctcataaattatagacagtacaaaacaaatagcatgtaaatgtgaacatttatacatgggtgagaaccagttcttttcatggtrtgcaggtcactatgacaaatgtgtattcgccctccgagaagagaataaaagtgacatgaacactgtactgaactacatcttctctcacgctcaagtcaccaagaagaatcttctggtcacaatgcttattgtgagtaccatttttcagaacttgtaaagaccgtcaatgatatgcaaraagtayttttttccttttgatggctatggccagagaaaaaaaactactgccttttataattatgggatgaatggggcttgagctgtggattaacagtttctcayrtctacctttgtccttggtctgaaggaacctgctttagtgagaaaatgactcttctggccattatgcatatactcattcacaggaacttatryctcctaactctgtttagaaatgcctcgtgcttcaccattcctgtggtcatcatgacagcagctttaaaatttcatcttatttagccaatatattctaattttaactcttgttccatagatacaagcaatggctctcatgtcaaacttgaaaaaaaataaatagaaatccagcactccccctctctgaccagagaaatttaaatgtattctgcatcttcattggtccctttttatttayattgaaaatctaarctcggattattgtattggtagtaaatgtatgatttttttccctataacttagtaaaataagaattagtaggaagtaggaatagggagtgagcctggtaagtttgatgagagctaatgtgcattcagccagtgggtggaatttttgtgggctgaaggatttttaaagatgacttgcaagtccttcactcctagctcattctggttgagttagttgtaggaattagtacagtaggactactcctagagtccctcaccccatggtcctgagcatttgccttgctgctgcatgcctgtctttttggggactgtagtgccttttcactcctagagttttctttttgtctctttgtggaattgggattcttggtaagttaattacatcattttttcatggaggaaaaaaacatacatcttcatgctattttttatttcttcagaatgaagggaaactatctaccatacacctctgattaacaagagtgccactcattcagttatatgcctagctggttaactctaaagcgtatcacattttttagaatagccactttaaaaaatatgtaattatagggagagttcattgcctttgctaccctagaatagctagatggtagggaaacgagaaagatgcagttgagagggaaaaatatatatgttagtacaatgtaatacttcaacttcccccaagtgacaggtttcagctaagaaatgatacaatctatggcagcttgctaattttttttgtcagtcaaaagaaggaagaaagactatttagatgttttttttaatttaatgaaaggattgttaaatctcatttggataaagccaagactttctgtcagaaaagggtaatgatgaggagggtaggagaatctgtcagtttggacctagaatggggtggaatttgcctttataggaagctaattatggtgagtttttctttttattgtgattacgtttttaagaacttaacagttttctgcactaaaaatagaccaaagcctagaatccttggagyagcggaagagtaatgattgtccaagactgtcgctgggtttcttaaattctaatttgtaagatataggggctcagctcgctccttttgcggagtgattgtaagtaacgcttgccttaagaatctcattattggaacacggagccatatttcctctgagaattctggagtagctttgagccagggctgttcatttctcaagtaatcacgctggtgtgatggagagagaaaatggcagctgttcggagctcaggccttcaattttcttcagagtccagtcactcaagtgtgtaattacgcggggggtgctgcagaggcgttgggccctgtcagagaactggtttgaggctttgctttctgcttttgccagtcaggacaggcagaagccaatgggactctgactttccacgctgttctttttttctcccaccttgtcatcctgattacttcttacctgcatggatagtacccagactttctttccaacaggctgagctctttagggaaaagagctgtttcagagtttgagtttgggtgaataggatggaggaggaggaggacaagggggatgggaagaggaggaggaggaggaggaggataaggacggttgaacatgtgaaccaggaagccagatttgtccctttctttattttggtgtcattacatttttctttaaaaaaaaaacaaaaacaaaatgagacccagtaaacrtaagaggatctctaagctttcatgtcattaatttcttttcaaatatcagttgttttcatttcatcttagagatttggaaatcaagaagttaatgatatgatcaagctcagggccagctagcagtgacttatggaacatgggtaaaagctcaagacggtgctcttttctgatctgatgttactgaatgccagacatgtcttcctcttttcctctttgacaacgcttagctgytcccccttccttcttcctctccctcctcctctcccacatctgcattaatggtagtagctggtaagagccattttggttgtttggattattctttcctyggatcttagtatcttttacagatgtcacctgcacatggtagcactttgactcccccagcttgtgttctctgctggttcccctttctttgcatatcttggcttcctgattgatggttatgtgcccagtattccattctctgctttctagaagtaggaatgttgatagtatgctttgctgagctagatgatgatttctggggcttttgaacctacagggagggaggtatcaagaaactcaggcttccgtgagtcaatgtcatgggatatgcgttgctctagtaaagaggtaccttcatcctctccaggtgttagcataacctgcccagtggtaacttgcctcatggactctcaagcagatttctggtaatctttcactctgtctggaaagcaaagtatcaggtaaaaggctaaartcctatcargtttcctccatttaaagggacattgtaacacaatttaacacaaagtctggaagaccaatagtacatttattttttgaaagctcttcttatttcttaaatttaactttataggaaaaagcttagaactcagaacattgtttatgtttgcttagagatatttaaggaactctttaatctttagccagattaagctaattggtacaaatacaaagtatcaacatcttcatagctgtctagatggcaatgtacatatcttctagccaccttgatggtaagtagtcttcccctcactacttgtaacttatttttgatacggtccacatgaacatgctataaaccatgcttctgtatgagtaatgccatgcctatgaacccctgatttggtttagatggggagaatttatgatgctgatcagcacctttccttcctccacttaacctgactgcaaataattttgtccaatatgtaaataaagaagaaaagtctttctcagtgattccacattcactgaataagggtgatattaacaattgttaaacttaccctatgacattttttgggatatcaaaaagtgcagatatgactagaagaagctaccagttcattgctgatcctgggtttagtgcctacccggctaaataatagttaatgtcttgagggcattacacataaggtcacattcttttcgttttgaattgccttctaagatcaagttggactatgttggtttcttctgtcagtcaactgtgtaactttggctatgctttttttttttttttttaaattaaagatgtggtctcactgtgttgcctgggctgctgtcaaacttctgtgctcaaacggtctcggcctcccatcttggcctcccaaaatgctgggactacaggcatgagccactgtgcccagccttggctatgggtttaacgttttatcatgtttgttgtatttctgcaaattcgaactatttcctatagttagctaccatctaggtcaaaagtaaaagcaagaaataactgttttgtaccagtatggctgaataataattttcacttcgttttatgactctggacagttggaacagacctttggttggtggattgggatgccagatttttgcaagtgacctgtaatcccaaaatcagcaggttggctctttaaacaaacctttttatgttgactaaacacatctgctgacctagacaccatctaaaggtatccttacaaaatgttcaccaggattagatggtgatgtttgtttgtccagttgcccaaaagaagcctgtctctaggacagagggtaataaacttcctgttggatgttagttggcatcttaagatgggtggttctgaaaaaccctgatgttttcttgcagaacctgaatgctgtgtctaggtcagggacaagacagggttgaggaagttattctatacataattttctgttgccaatttttttctaagtattaatgatgacagtggagaaaatatttgaatggaaaacttccaagtcagaatagactaacgaaaatagtggttaattcatactgtttgataattacttcacatttatttatttatttatttatttatttatttatttatttattttttgagatggagtttcgctcttattgcccaggctggagtgcaacggcgcgatcttggctcaccacaacctctgcctcctgggttcaagcgattctcctgcctcagcctcctgagtagctgggataacaggcatgcaccactgcacccagttaattttgtatttttagtagagacggggtttctccatgttggtcaggctggtctcgaacgcctgacctcaggtgatccacctaccttggcctcccaaaatgctgggattacaggtgtgagccaccgcacccggccttatttatttattttaattttattttattttattttattttgagacggaatttcactcttgttgcccaggctgtagtgcaatgacgcaatctcagctcactgcaacctccacctcctgggcaattctctggcctcagcctcccaagtagctgggattacaggcatgcgccaccacgcccagctaatttttttgtatttagtagagatggggtttcatcatgttggtcaggctggtctcgaactgacctcaggtaatccgcccacctcggcctcccaaagtgctgggattacaggcgtgagccaccacgcctggcccacatttattttttctaatctccatagttcgcttttcttacacatactgttgttttctcctgaagcccttttttactgcctttctctcatagtggaaagataaaataaaaaagtggtttttaaaaaaaagtgcttttacgtgttttgctttgttttgtcttttaagttagagcatgatctgtaactgccaggcgcagtggctcacacctgtaatcccagcactttgggaggccgaggcgggtggatcacaaggtcaggagatcgataccatcctggttaacacggtgaaaccccatctctactaaaaatacaaaaaattagccgggcatggtggcgggcgcctgtagtcccaggtactcgggaggctgaggcaggagaatggcgtgaaccccggaggcggagcttgcagtgagccaagattgcgccactgcactccagcctgcggaacagagagagactccgtcttaaaaacaaaacaaaacagaacaaaacatgatctgtaactatgcaagaggataactccatttttaaaaattttagtttcatctgtaaaggtaaacctatatttcttttaaagggaatgcattctatatcaaatctgatacaggttgcggaggtgattagtgtgctttttttttttttttgagacggagtctcgctctgttgcccaggctggagtgcagtggccggatctcggctcactgcaagctctgcctcccgggttcacaccattctcctgcctcagcctcccgagtagttgggactacaggcacccgccaccacgcccggctaatttttttgtatttttagtagagacgggtttcaaccgtgttctccaggatggtctcgatctcctgacctcgtgatccgccctcctcggcctcccaaagtgctgggattacaggcgtgagccaccgcgcctggccctagtgctcttattttgtcatgttggcttttgtttttaatgttgagactttagtctggctttgtacagaggagtcgagttgtggcattacccagtagacttcttatgtttttaggcattttggtgggtcattccaatgcttttagtaagtacttcggaaaggagtatgtttgctctattaagaacattaggaaagggacttaggtaggaaaaaattatgttggtttccctacctactgttatctgtcaattctttccttctgtctttctatggtcctgtttctggtagttttacatattcctttgaaattctgttttgctcattagttctcagcaaaaggtgagacttacttgcatttcctttctcctgtttgcttttatgcctaggataggtagaacagattctctaatctgtgctacctgttcaatagaacctctgggtttatcttcactttaatagcagcttttatttttctcactcagatgagtgaattatctgggtgaaatgggtgaaaacagtacttgcacttccttaattataactcccatcatatgttttatgactctggacagtcagagcagacctytgattggtggattagggaaccagaatctcattatatcattttctcaaaaaaaaaaaaaaaaaaaaaagggtttgagaaaccttcccagcataatggcattgagtatttcaaaagtatttaccttgtgatgtggaaggtaggggttttggaaaaagcatgtcttttatttatactgcatttatttatacttctgtgataaaggtctataaagagtatccctgagatggggaaggttaagtatgaaatagaaattcttcaagaaaagggctgataatcaaagtggggagattaacatgcagcaacaagcaggccctttgggtcttctttcatgtcccattggtagtagggggagaataaatatttattaaaatacaaaggcaattctttaaaaaaaatttttttttttttttttttgagacagagtctcgctctgttgcccaggctggagtgcagtggcacgatctcggctcactgcaaggtccacctcccgggttcacgccattctcctgcctcagcctcctgagtagctgggactacaggcgcccgccaccacgcccggctaattttttgtatttttagtagagacggggtttcaccgtgttagccaggatggtctcgacctcgtgatccgcacgcctcggcctcccaaagtgctgagattacaggcgtgagccacagcgcccggcctaaaaattttttgttttatttatttttattttttatttttagagatggggtctcaccatgttgcctaggctggtcttgaactcctgggctcaagcagtcctcctgtcttgacctcccaaaatgctggggttacaggtgtgagccaccctgcccagccaaggcaattatttaaaactccaagtagaggtagtgatatctaaatggatatattttatatggtgtggtgttaataattactactaccagtagstctgtaaagttcaaaaaggacagacatttataaaaactgcatttacatttttttcagcttagatggaaattgcatggataatggatgaatttagggaataaactgatattccactggactccagtaaggatatttctctcagaatatgattgagattattttcttaacattttttacttcttagaagaggaaggacccaatactgaataaaccatggattctatagtaggagcctgtttttttcctctaattcagctaaggattcacatgtttaagtatcatggaatgattcttggtacaggaagaagagaaatgatttgggatgcagaattgccagcatatgagatggtgttttagttagtgtgtgtttataaataaataatttattcttgtgtttctgttttgcatcctcctgggttgctgaaaatttggtttatgagatgaaaaccactggggtggttctttttgccttatatctaccttctttccaaaagtgggaggggaaacaggaaggcctttagtccctgttrtttaaaactttctcttaaaactttgagacatatctattatttcttactcagaatccccttggccccttttagtggtctctaatgattccttctgcgtgttaaaagtatagtgttgatttataaggaaatacattaggaattttgaatgagggatttgggctgcctctccttagccaaacttcctctgggatcttctttaccacattgtttagggtaaaaataataggaagtttgcattttcttattaatccagctgggtttactttgttttcattccttttctctattttaaaatcctatccacctgttctttttaatatgactatctatgttcttttttacattaacaattaggatcagttgtgtggccgggaccctactctcactgatgagctgctgaatattctcacagagctaactcaactcagtaagaccaccaatgccaaagtagcacttcgagcacgccaggtaaggacatttgttggttttcttaaaggagggatggctttcatagatcaggcagtcctagacacaatgaacttttgcttaatcactttacaaagaacatgttattttctatatatgtgtcaygttttcctcagaacaaatgttttcatgtggtatgtttttttaaagagaaaggaaaagattagtgctgcgtctctttaaaatagaagccctttccccattaaaaaatcctggtatcattcccttccctccctagtagccctgtgatagtaaaccagggtcaggtggaggaaaggacactcagggaagaaaatagactcagtatttcttacttcccaaagggagcttagaagcagatgaaaacttccaagtgtacaggaaataatcaagtgtggaaagcagaaagataatgaaatgaatcttaggcggcagcaatcagaacaaccccagagaagtccagttagtttcaccctgcagtcttcatttccattccaaaaggtttcagcagggaagccaagagttggcactccctttgtgtttcagtgcatgggcattgacaaggaagcagcatttgaagctgttcagtgaccttctgctttctctacaattgtatccatgtcactgaactactcaaagctattgaacctctcagtgacctgctgagggtattcagatcctaccgtgtcactgtttgtttgtttgtgacactgctttcactctctctgcccctcacacacwctggtgttacttcctgacgcgttctccttggtgccgagtacctggggctgtcaaagcagctttccctagtctttctttctacttcagagttgtaaaaggctagctctgctgcatctacctttcccacagctgctccctgccagacctgattcccaattaacagctagtcatgcagtccctaggaccagcagctttgcaatggtaaatcacatacactgatggaacttgatcgaagctgttttctctcccttccccctacccaccatgggaaattggccacaatgcaaatcatggtgagagtcaactgagattcagtatttggtggcactggctttatgttacaggacctagaagttgttttacttggtctctgttttatctgtgatgcctgcacttacagatttatatttattgcttttgtatcagagctgcctaataggagtctagaataatcactccgaggaatgtgtgcctcctattttgttctcactctaggttcttattgcctcccatttgccatcatatgagcttcgccataaccaagtagagtctatcttcctatcagctattgacatgtatggacatcaattttgcattgagaacctgcaggtatatatatatatatatatatataaccctttcctgcctatctggactcttacctcctttattctcaagcatagtttaagtaattagtcacttaattaattaattttgattttccatataatggagtttcatatcttgactttctaaaatgatttatacttatgaatatttttttcatacaaatgctgttagaattgtggtttagcttaaaaatcaaataggcctgccttgatagaagtgtcctattgaagtctttatctttgtactttacctagaaagtattctaggccagaattaaatgacaaggctggttgatttctgatatatatatatatatacacacacacatttctctgatgatttatgatatttgaatcagatgtatacataggtagttgttactcttctggagacaaagctatttaagtatcatttaattttaattttatgttaatgcttattattaagctttataagaagcccgtttttaagagattattgtctaattttactactaatcagaaggaccaccgcaattattttttaaatgttatcttctcaggaatgactttatatttttctacctggaaacaaggataccattgttatatctggcccaggggaatctttagactttctgtaacatttcttcctggggaatctagaggggaaaaaaggatgttttttcttatttggttaatagctgaaatctagggtttcaactggagttcaaatctagggtttaccatagtggagtattgagacaatatttattttatttaatttttctgagacagagtctcactctgttgcccaggctggagtgcagtggcataatctcggctcactgcaacctccacctcctgagttcaagcgattcttgtgccttggcctccagagtagctgggattacaggcactcactaccacgcctggctaatttttgtatttttaacagagacagggtttcgccatgttggccaggctggtctcgaactcctgacctcaagtgatctgcccgccttggcctcctaaagtgctgggattataggtgtgagccaccatgcctggtgaagacaatatttagagagttcagataaatgtcagaaaagaataacagtcataaacacttatattagcatacaaataatgcattgttaattcagtattccaagaattttacatgtatttactcatataatacaacagccctatgaggataggtattttattttctccattttgtagctcaggaagctgaggcacagagagattatggcattcagagacaaaattcttaggtttcactaaatgcttcaaatgccaaatagtgtccattgaaattgttctccttttgatgtaaggcttaagcctgtctttgtatcttctagaaactcatcctatcagaaacatctatttttgatgtcctaccaaacttcttctatcacagcaaccaagtagtgaggatggcagctctggaggtaagtatttatggtaatgggacatgaccttttcctttgtttctagctggtttcttctgtctatttggctgccatgtcagttctagttctctggccttaaggttggttcttaagggtagttagtctcttttcctctgaaacagtatgtgcttactcagatactttactcaagtgtttcatctgaactcatcaccagcttctaggttccaatcacaggaaaatagctgycagcatttttcagtagtttctattttccaggtatttgaattctcccatttcataatgaattaggattccttgtaacacaaaaagygaaaatatatggctgatcagagcatgtgtcatcttaccattgtgtgatttgggccaaattaaaattgattttagttatgtttggattgtcaagcagctcttatgaaatacttcctcaaaggaaagaaagtaatagcatttaatgaactgtgttttaggtattttatctttctcatttaatcctacagttactttaggaagtaagaagaaagtgagactctgagaggttaagtgatttgtccaaaatcacatagataataagtggaagagtttgcatttgaactcaggctaatctgactccaaagacttctgtttccgctacagcacactacctcattaagcacaaaaattgcaggccctgaataccactgtaaagttgccaaatagttgttttttgaagatggggaaaaagagtgttttagatgattttatgtaatgtaacatcacggtagtctgttgccagctcttttgtgttactttttatttgtactctgtggtagagtgtaaattatcctactcagtaaatgccaaaagttttaaaacatttaagtgttttgtagtgtttttatgtcatttaatgagaagcttccttatatacttcccgtgccatagaatctcaggtagcattttatgtgcatggcaaatttgctgtgaaatgtgtgaggttggactgacagtttttgcagagatgtagcctattgctgtttctttttttaatttatatttatttttattttatttcattgctgttcctttaactcttgagtcaagttcaagtatttgagatattatatgtcaaattatgtcttactgcttatgccttactgcttttgatcagagtttgctgaaaactgattttgagcgggtggggaagtcggggaggacgcaagacaaagacatgagatagtaaaagagttgaactgtactgtgattgcttgtgtcttctattttcactctgtaagtggctcaaaatcagcacctctcatttttctcactgcttaatcttctgttgaaatgatcatgcttaatagattaatagttgtagttctatatgctgtcttttgctaaagattaaaccttctccagggtttaggttagtgtggaagaaggtttacagtgcacataggtgtccagcagaggcagcctagttttgttttcattagtagtcatggttatagtattaagactccagctttattaattaaagcaatatatgtacgtatacatagggccttgggacttctctccccacagagcaccttctgcctcagatacctcgtttcaagactctttttctgggctattttcttaatttctgtttttgaaatttatttactgagggtttcttttgaaccaggtgtatgttcgaagggcttatattgcctatgaacttaacagcgtacaacaccgccagcttaaggacaacacctgtgtggtggaattccagttcatgctgcccacatctcatccaaacaggtgagtttgaggtggtatgtgcacccgagccagccagaggtataccatgagaatcaaggggagtaatgtgtatgacaattccatgtttttttagttagaaatgtagggcaaaaaatgaacaatatgaaccaaaagagaagagccttttggtgcccacttctttgatctaaagagaaaaattatggtctaagtaagatgaaagtttaggattactccattcattcttgcttgtattatgtcactgaggaaatagtttctttcttttttaaaaaattagaaagaatttactagcattttacttgctagaactttgccagaaaaatcactctttttaacaatttaaatcagcaattagaccaaaaaaatactttgggtggaatgcttttcttttctatatgtttgctatgggttgaggttatatctgagccagtttcattatctccctaaaacagaccacctgaatttagcagttgaaattcaatcagtttttaaaaattacattgcagaaccaaacttcttaatctcaaataaattactgaattaagccatgataattacattatttgtcccttcctgtcttttaaaaaataaaatgtacatatggacgtttttgtttcagaattgcttttgttttaaaatgaaaatactttatcttatagactatcttttaaaaagtattctaaggcaatgaaaatctaggaattccacccacacataggttcatcccctcctgtactttcattctttttagtaataccacaggaaatataaataccacagccaatcttaacctgcccctctccatttcttctttatggcctttggttcttcacttggtattacaaagtactgtgtcttttgggaaccttagttatagacaccagaaatggttttgttctaaattgccacttcacccaaagcaatagaaaccctttctggagacaaagaagtctgtgctgagacttttggccactggatgccactgttgatccagcagaggtcggcagatgagcagaggcatcttcagaaaaagtacctctcttctttgtctcagaatatcctttcacttctctacctcaaaaataccttatggctggcagagaaaagcatatatccttgatttagcaagcatctctcggtacatttttgcctccatggatttcagaatctcattttctagaaacgaatggttgtccttcagtgagcggcgaagtactcatggcacacataggcacagcactcagtcttctttcttttcctgcattccttgaataattgtagagaactacacgctrtacttaatgctctttgtaattctcagggcagttctccttttcttcctgctttttcctgcttccctttgggcagtgatttgtagtcaggctgcagggctgcttctgatttccttccctcctcatcactctccttgtctctcttaattgttctccctgtcctacttttttttatttgaggatatgtccagtttggtgagggaatgttggctgaaaaatgagagaaattcttcttgactgctttgttaagaaatcttattcacctttctatgtcaagagtatgaatcttggttagttcaatgtggttacaaaacttatatgccagtccctcccaacatctggacatgcctgtagataaagatcagacttgaacataacagtaatcctgtaatctccctgaagtctcccttggttgtcagtgtaattctaaacctgctggattattattgttattgtcatcattattattggtataactgtgaaggtgaagataattgcaaaataaaaaggaaaaataaaatcatctttgtgaaaaccagaaaaatgttaaaatttctttaattttttttttgatctaaagttctgtttaggatcaaatgatcaggtttgatcataaaatgatgtattcagtttcagagtatagcttgttcagttattgcagatttactacttgaatttagttttataagattatatacataatatattataatatatgaaaaatgtgttttttatatatataatatatatgaaaaatatgttttttatatatataaaatatatttttcccccaaatgtttttgttaaaatttggatttataaccttattatgacaccagctggtgtactgcaattgaattctgacactagccatctgaagttagatcagatgccacaggctaagggctcagtccaccaccaaattgtccctacttcagatggggccataagtggggtcccctggccacttgcacttctgaccaactggctacaaatttgagggtcccctcaattttctcagtttgataattccctcagaacaactcacagagttcaagcactacagttttattgtcaggatcagccaaaagcacgagacgcttagggtgaagtgtgggatggtctcaaacacagagcttcccagtttgttccctgtggaatcagagtttatcaaccctctcagcacatccatgtgttcaccaaccaagaagctccattgaccttcagtgtccagagtattttaaaatcagggcttcattacgtaggcatgcttgattaaatcatagcctacgtgattaaactcaatctcccctcccagaggtctggctggctgaaagccctcaaccttctaatcacacagttggtctttctagtgaccagctcccctcctgagtcatctcatctcttagcataaactcaggtgtgatccaagggacttaaaataacaatgacactcctattacttgggaaattataaggatttagtctctcttccaggaaccagagacaatggccaaagtctttattatacaataggcctgctcatcttaaacagaaatctaagctcttttagatttagctagttttgagccaagtacttttcttctttttctaactccagtactttttttgtatgttattgttttgatcaagcaggcgaaaagcatattgtttctcattctacagaaagaagttacagagggctaccaatatttgttccactctgtcctgtaaggctcagttatgtccactaacctctagattaatgattctcaaaattatctgaggggtaatttgaaaatacacatattggagtcctgactttcaagacccgattcattttggattagagtccaggtgaccactttgaaaagctcctctgaactctgatgaacagctataattgacagttactacttctaaaccagtactgtcaaatagaaatataatacaagctacatgctatttaaaattttctattggccacatttaaaagtaaaaagaaacagataaaattaattcaaataacatcttatttaacccattatatccaaaataccatttcaatatgtaataacaattgttaatattttttcttttattcatactgtatctttgaaatttagcacgtattctatacttacagcatatctcaatataaactagccgtatttcaagtactaccctagctgcatgtggctaatggctgctatattagacagttcaacttagaccaaaaattaattaggacagtcacactgagccctctttttttttttttttttttktgttactggtagtgcccgtggagagaggaaaaattattattcttatgttgcttattcttagtagttacaggaattattcacagttgatattatagatgttacactacaatattttatgcatgctttaaaaatcagtgagaataaagaaaaggtatatgaatcatacatattttacttatcaatataaaacagaattttatatttttcccaattgaggttaacaaaccaatttttttttcccctcccatagagatggggtcttgtcatgttcccaggctggtctcaaataattctcctgcttcagcctctcaagtagctgggactacaggcatgtgccaccatacctagtacagaccaaaaattattgggggagaaaacaggtttttttttttgtttgttttttttttttttttttgagatggagtctcactctgtcgcccaggctggagtgcagtggcgcgatctgggctcactgcaagctctgcctcctgggttcaagcgattatcctgcctcagcctcccgagtagctgggactacaggtgcctgccatgatgcccggctaattttttgtatttttaatagagacggggtttcaccgtgttagccaggatggtctcgatctcattaccttgtgatccgtcyacctcggcctcccaaagtgctgggattacaggcatgagccacagtattttgtttaaccaattttttgtgttttctttccttgcacttggtcttcacattcctagctaggtgtttttgaagtagacaaaatttgtccagcacatcgttagaagtgtcttagtaagctgtaatatcaaagcaagactgcaatctcattgtgtatggaattccattcctgcagcttttttttttttttttttttttttgagatagagtttgctcttgttgcccaggctggagtgcagtggtgctatcttggctcaacacaacctctgccttccaggttcaagcgattctcctgcctcagcctcccgattagctgggattacaggcgtacaccaccacaccccactaattttgattttttagtaaagacggggtttctccgtgttggtcaggctgtctccaacaccctaactcaggtgatctacctgcctcggcctcccaaagtgctgggattacgagcgtgagccactgcacctgcccttgtttttaactcctcttactataattcccagtcacgcagtttgtttttgactgtgatttagcctccataggttggggtgaaacacggcactctgtctgcaaactggcagcagagttttttttgtttttgtttttgtttttttttttattcaggaaaatcccttagttgctgttgggattgaagacctgtatcttacttattaggacctattttgatttttagagaagtaggcaaaatatattgcaaatgactaggggagcctctgaaaagggagaagacacctgtttttagcacacttgaacagttgctttgtagtaacatatttggtacatttttgtttttcttttaattcatcataggactttgcattgtttgacatgttgcggttactctgttttttggtataattcgactatttttagaaaaaaaaactccaataatttttttaaaaagcagattactaaatagtttattcctaatctgtgtgacttcctatttcatttcttgctaggtgtgcatcagtcgaggtatattatctcctttttgatcttctacccaagacttctaaattttttttctggggactgtagttccaacttatttggcatctgtaggtcttattcagcagaggatccagttattagaacttcactcaggcaagcttctggtctggatttaccctttacttctaaaatttccttcacttgaacagcagctaaagagatttttctgatttaagcatagttagaaacatatatatatatatatatayacacacacacacacacacacacatgtgtgtgtatgtatatgtaacrtgtatggggtgtgtgtgtgtgtgtgtgtgtgtgtgtgtttccttttttaccttcttagcattaaaggctgtgtgattctttttgaggggaggggattttttttttttaatgtgtcattttttaactgacttgtgttcttgaaggagaagtgactatctcaagttgttttcatggtgcaggaatattcagggcaactagtctatactaagggagcattttattattgtgcagacttctagaacctaattctctcattgaagattctgtgagcccagccctttagtgagttttacatgaattaaccctggagttcaaactatatcattgaatattcctttttctccttctttccctagtgagtcttagggtttagagcccaagttttgtatatgtctgtcttttttcctattcagaaacttaagtatcactcactggtgctggtgatgggaaagcttgttacactgaagcatcatcctgaatgtctgtattttgcacaattcattgactcatttgaccttcaggatttcactaagctttgggcatattaagtgcctcaggataatctggaaacaaattcttcagtcaactagtatttgatcttttaaaatatagttatatttatacaaacatatgtaaagtatattatcccataaattgtgcctatrcatatgactctgtataatataatatgacagtctgggagtacacaatttaaaactccaaatgatttttataattaatatacgctagtgaacatgagtaatctttttaacctttactctgtgattcaaataagaagcatcacatttgatgcaggagatggaggtgtactttgttgtacgtttctgtacatatataatgggtgaggacctattggtgtttatttccacctatttcatagatggaaatccatgctttagttaagtcggattccactgtaccttctctgctgtttgctacttgtgaatttggccttctgtgttataatgttttaattcaaatacttcccttttctcaagtcttacctccagaagaggtcggctgtgttttcccctgatagcatgtgttttggtcatggctgagtttaggctgcttggcatccatcctcaatgttcagctgtcagtgggcggcctctggactttttattcataaggaaggttagaaatcaggagccttccatgtgactaattggtagccaactgccattctcaagaattctgataatctttaacacccagagattagacctttctttggatagtactgagatactcagaagtcatccaacttgtagcattgtttctgcagtgggagcacttgttgtagttagcaagccagaatgagctataaataaatgaaatcttacagtgcttgcttccttcattcagggtagtctgctgataagatgcaagtatctggcagaagagaagattctcagcaggtttaagtgcttaccaaagtgctttcctgtatccgtggctcagcttctagtctctgctgtgttattttggcactctagacttgtaagattggagagttgagtttaaaactctcaatatatcattagggtagcccaaggtcccttcttgtcaaggaagactagctgagtcctgggggaaggaaaagcagaatccaggacacctgtaaatccccgtagttttgtgctgtgggttcgtagctaattatatagcaggcaacagtaatatgctgtagctctgttgatgtacttgtttcagaaagagcaaaaccttccagcagagcaaagaaggggctttggaggggctgcaaatgaatgaagtaatgatcattttattgtaaactaaagctctgcagtagactcagggcatctgaactgcaaggaggtggtgggggagatgccagtaraaatacgtggttcagatgtgttttacagttcttgatttggattttcctgcagaaatatagtcatgcaaagagaccaccactggtcacagccagtcaaattgctctttctcctatggtactgctgttagtggctgctagtaggttattcagccgacctcttctgattctgctttgctgcctgatttcaaaagagttgccctatactggctttcagtcacagcttgatgtaaccactgcttgtttgcatgcatccccatcattttcatatgggctcttttttttttcttcttcaagttaggaagcaaaagaatcaggagcatttttatatgataaaagatttatataaggccagctagaatcaagccaaatgaaattcagctggaagggatggtaaaaaggctcacagaacttgtggctgccaragaagtcagtgttctttaaattaaagagggttcagctagcagcggcaactctgactttgcattcatattgaagcaagctctccagccattctgggcaggcagagcaataaaatcagaggtgacttagtgccgggaacctcagaattcacaggatttctcttgtctttctctaaaatctatactgatgtggaatgctaacttggagagcggagataagaaaatgccaagtctagattgtggtttatgacaccatattgaacaatgtcattggaaagcatcctctttggttttttggttatcacatctgtaaaatggagctaatctactagaaagaaagtggttctaatattcatcaaatgttgtaaatgaagattcattataataagtgttttgaatagcccaaacagcagataggaagtgaatttatgtcccatttatgtatttgaaaatatacttgattgccttatcaaagattgagcaattttactttttttttttttttttttttgagacttactttgtcacccaggctggagtacagtggcatgatcttggctcactgcaacctcagcctcctggctcaagcgatccttccacctcaaccttcggagtagctaggattacaggtgtactgtgtgccaccacacctggctaacttttatatttgtgtgcgtgtgtgtgtgtatgtgtgtgtgtgtgtgtgtaaagatggattttggagatgttgcctgggctggtcttaaactcctgggctcaagtgatccacccacctcagtctcccaaagcgctggaattataggcatgagccactgcgcccggcctaatttgactatttttgcgtgatgagtatgcagtggaatgtggcaaattttattttcagctacataaatggaatatttgactcgtatacaatctcttcccttagttgtgtgtgtggcttttttttttttttggtacagagtgttaatctagctttctggtgtatcacagtagtgtgcgatatgccacatttgtcatattcttaaattgaccatatagcccttgtataggatgaaaaatttgtagtggccaggtttgctggctcatgcctataatcctagcactttgggaggctgagataggaggatcacttgagctcaggagttcaagactagcctgggcaacatagtgggaccttgtctctatttcttaaaaaaagaaaaagaaaaaaaaaaagaaaacatgtaaatgatcattatggacatgaccaaatatttatctgttaatagacagtttatccttccttccttccttgcttatctcccttacatccccacagattcttattctacctaagtggataagctggctctaaacctacttacatgattgatttgggaccattcctttaaaaattagagatgttgggagtttttgctttttgacccatactgtgtagatggtgcataattcttataacaaagcagcagggggctctctataggagcttgagagttgctgatggagaaagcctggctttttgttgttattggtgttcttttcagttcgggcctttttctactgaaaacatggccgtcatcctgtgaagactcccaaagggattagaatgtagctacagaagcagttagattattttattagattaggaaatttgttaacagttgagagagattatactggtttctaaactctagaaacctggatgaatggaacctgaggtttctttggttgtagagttctctctgaactgagattcatgctaagaaactgtgcaggcggcccctttctttagcatcctttatatcgtaaaaggaaaactattctcattagcatctgcagttagttttctgttcagctgtacctccctctgttctagaacctgtgcctattttttctgtattgttgaggcccaagtgcattataactaaggatctcttgtaaaaataaaacccactctcctgagtgagaggcttaaggaatccaaacagcaaaggttcaggtttctgcactcagaggttgctcttgctgtcttatgaattcactctgtgatacaggtttgatgcaaagagcatttctactcacaaatcacatgaggtatacagtttgtgtgcagtgatatgtcacagctttttatttatatggcctgctcagtctattctgctccttctactgccatggaaagtgcatcgttttcctccctctatcttcctttccacatatcatcagcaccacccactatgttctgcccattaagtcctctgtgtgctagaaaaccccaacagtgattaaatgctgataaaagaatgttagaaggttaagatatcaaccgatcagcccccttacaatgcccctaaattgtaggtggtaagtataactttgcccatttaacattgaaaataaaggtttttatttgtttgattatttttcagttggggaaatcttttaaaaggagttagtggcaaaggccaaagagaatgtgggagatgtgccttgtagtttcctattcttatcgtggtctttctttcatgatttggcacattctttataaggaagttctgtggtagtcaaatttagataaggttttatttatgagaggcctagagtttttaagctaacagcaatttttaaaatcattatgaccctaaactcatttaattacaaagtattaattaattttaacaacttatcatagaatcatttatcattactttcctgcatgattttcagttcttttaagctcctagaatacagtaccttcccccctgctctccttcatgggaggaagagtatggttaaaaagacttagarcaggtagctgggaacccagattcctggatacttttctttggtggagaatttgtaggtctgtcacatatcctggataagcgattaaagtaggaggagctgtggaatcaacttccctggacctccttattacaccttcagtaataggaacaagaaagaagagtctctaagaatcctgtgaagaattatatttcttattgaagcttgagttaatataccatatcatatagcttaaattaattttcatcagcctgtgttttaccactactctaaattttttttttttttttttttttttttggtaatagagctatttttaaaatccatggtaaatacattttgaccctttccatcaacagctggtgtggtgaggtaggttaggagcatgcctctttggaggtatcctgggggttgaagggtaatgagcacttaattatgtctgctgaatgccagagctgccaaactggagctcctcatgactggtctatatctgctctgacaattcttttattatggctttcactaacttatcagtaactaactgtggttgtttaattacagagggaacatccctacgctaaacaggtaccgtatgtttagtttcttttccaattaaaagcacctttatgtaacttagaatagtgaaaccaggaaaaaaaaaaccacaacacttgacaagataatgtgttatctgctagggagtcctgagctcccctttggacatactaaattattctttctgtttggaaaacatggcttcagcttttcttcagctgttcaaaaagcactacttgaaaagcctcagtatggagaagctcccatctagctgtgtatgatagggggtttatctgccttatgtccggccttgctagcaacatcttcttttgctaagttctctgtgtagtttggggctttcagaggagaaacccttaaggttactcctatcctggcaaattattcacagtttttacaatttttagtttctctaatttgcttctccttttagaggagtgcagatccagaaatagctgatctcatgttttatcagtttgttagttaattttctaaagtgttaaaatgttatgatagtcagtttttatttcagacctataataagattaacattggaaaagtatatttaagttttgatgtgtttaaccctgtgtggaggtttccaggctaatataacataagtgatattttagtattttgggtttctcctgtctcttgaaccaagcaaggcaacacaatgcaagtttgagaggataacaattctgattggaattgaatccacaaaatgcaaaagcaatagtaagttgatggcaaggtctttgcagataatcagctacacgtggaactatttatagatttacatttattttgtccctctccctttaaaatattaagtaatcaagactaatcatagcttttagatcccaatttggatgtggagaggaaagggaatgcttttaattggtcttgtagtcttcccttggtgagtgggcttggctcattcctgcctgcctttagccaccctggttcacaagcatagcagtgaggggaaactgaatagtcgatatttcccatggggttcagttgagtgaaaaagctacttaaccccatggttgccacaaacatagtttgttaacttcttcagagggagttccctttaaatgtggtctggaacccttttatctttcctgtctaatgccaagcaagtagaaaagatacaatgcctcacaaacttgcttttttagtaaatatatttggtgatcctagaaaagaggaggatgatagcacttctgtggtaatacaactctgaatcccagtttctagtgagcaccatgtgtaagacttgcttgatgtgtgtttcatttgtttgtttcattcattgtatcaatggtttcctctcccactttgccttctactcccaagtactgtcaaaagatgatgtaccttttccatagtcatcactcgccaaaggaataaaaacctggagtgtcagtctctatagtctgtgtgagcagcactcccatcctacaaagaattccattgccttgtaattatgatttgcgatagggtacaatatgtacccagatatcaagtccacgttgtcgtctctcttccccctgcaacaccgcaggtggtgtacttcaaggagatttttggggcagttccccaaattcaagtgccattgccttgccctgaacttgcttcagatcagtatgctggtaacatgtcaggcaagtcctggaggcatcctttagcttggtccttcctaacaggctgtcctgattgagcattcagaaacactttacagtattatttatcagtacatactgttaaggtacatcaagaaatatagagattcattgtttttagattgagcaaatcagttcagttctcttcaggcatctccgtttagcagctgcttgtcatgcttacacatactttgagacccatgctctgcccttttgtatcttgctggaaattattaagggctttcaatggagatttttttgttttggtatagaagtgcttaactatgaaaagaaaaacgtgcaatttggggttgaaaaatagctctctttcaaaaagggagaactgtaaccccaataactatgcctaccaacccattaaaggagaaagtaaattcctcagtaaagttccttttatagactgtgacctgtttctgtaccctaatgttttatataattatttactaaaccattccaggtgacttaattacaattgttgttttacatacatatatatacctatctctttatgtatctgtgaatacttactctattacagttcctagaaaacaaaatgccttaagcattgcatagttacaactcacttggcttgcttacttccttttaaaggagggaatgctttagggagggggaagatgcaggatggtttttaacccctatgtgctattcattcattggacatcttataatgtaattgtgttaaaactgcctggaaattcctaacagttcttagctttttatttgaagaaattttggagtgatgaaaatatagtttatttagggaaattcaaaagaaagggttaacatgaatccagcaaaacaaccttatccatagtgggtaaaaaaaccaaatctgctctgcaacctgaccctacttcagagttttctcctagttccttttccctactgttactttcccagtccttgmtcctaccctccttgtctaatgaacgtgattgaattaccatttagaatgtccttctcctccaacctcaaccactatggcatgacccatgtagctagtgtcagcgatgtactgttggacaactcattcactccaccttgtcagcggatgggcggaatggtctcttttcggacttttgaagattttgtcaggtaagacattgtggaactatgtctgtacaaggggagccatggacatctgtgttttggggtctcatctttctgcaaaatgaataaaggtctcccgaatagccatgagccagctaaaaagatgtaacccttgctgtatatgccgttggagaggtatatatccttgcatttctacctctcattcagattctacaagcctctacttgtagtatgggcctggtcagaaaaaaagaaacaaacaaaaaccatcttttcctgtggagctaacagaagaagctgtctgctctgtgatgagtgaaatgtcaggagaaattaaacataacactagagtgagccccacaagagacaatacatcttttgattaaatgcattcagcatctatctcttgatgtatactgatgcattaccctagggggaggggtaattacattggtctgtcactactccagttccagacactttctgttactttaagaccgatgatgacagaagtgctcatatcttacatatgaggaaaacaaaacaaacaaaaaagctttagatcattctttctaaaaaagaaaaaatatatatggtttattaaagtttaaacaatccatcctcctaatttctgccacttggtgaaattttgcatgtcacctctagccactggtgattctrttcaattaactattgagcccaggctaagatagattattcttttagactcagctgccaatggcagtgttagtttcatgccacttgagttttcatggtgggtgtttctcttgtattttttaggatctttgatgaagtgatgggctgcttctctgactccccaccccagagtcccacattccctgaggcaggtcacacgtctctttatgatgaggataaggtataatgtcccttttgggagactgctttgttcccctcagacatgggacttctactgtatactatctttctgactttgaactattataggaaagaattcatccttttaccccactttatagtatttaattttgtatgcctcaccaaagtattttctggaaacaagtggaatataaatcctaacttaaaaaaactatattaattttggagtccatagtatagagtgggctcagctatgtccattgcagctgcctctgaatctctgaatgttgttttaaggatttgggctttggttgctggaattcttactcagccatggcttatatttttgcatagtggtgcaatcatagtcctcagagaatggaggactttagattacagaaaaaaagtaggcattttgttgaaaactttgtctttttattaaatcatttctttttatttatcagtaaataaattattctttctctatgatgttattttttcatgatttgatacttccattgtttgataaattgtaaggaaatatattatgtgggaacatgtccagatggcttatatcactcattttccttcacattctgtgaagagatgtggcaaatagtttcacccccattttattggtaaaaaaggtgagacatagtgatcttcagcttcatgccaagtaaagattgggccacctgttactaatgcctctgctgccttatcttttaaaatttatatgctttacctgatttaatctctctgtggctattgggcagtggtttcaatttgctcattcctactgctgggcaaaccaaaatatcctgtggggtgtatctctttttcaggtattctaccaaatattataacttctatctgcatctgtattggccagcctcataatttctttgacttgtgttcttgagttacaggttcccagggatgaaccaattcacattctcaatgtggctatcaagactgactgtgatattgaggatgacaggctggcagctatgttcagagaatttacccagcaaaatgtaagttcttgattgggtggaagctcgtgatgtcccctttctactggctgtgtatcatagctatccttttatcagttgctagtttatggctatgtcttttatcataactctcagaactatggctagttctgcvtttagggataaaatcccaaagtgacttaataatatataatgaatatctttgtgtgtcaacagataatagacctcaaatatttaaaatgtttttaagggaagttatcttcctaaatctctcccagagctccagtcttgaacttcgaatcacctaccaagtattttcctttggtgactttccacatgtctaagcctaaactccccttaggtcccttctgtgtcttcccctcccctcctttgaaactatcagttatacatctatcctcctttcaattttacgtcacttggatatctcctgttgacatcaaacgccatcgtctaaatggacattttccatcattttgcttcacctcttctcgtccctctccaatcccctcataaaacaaaacaaaaaacctcacaactcactataccttttactcccaatcattcaaaagtcattgactttttccttgacattccttcattctacccctctacccacaatctgtacatatttatttgtatctggtcagtcaccaaggtctgttagtttttctttgcagtcttttttaccctttctctttttcttctttccagttttaaaattcccactgccatctctaattcaaacccttactatcttatacctgagacactgcagcaggcttacttgtgatctacttatcttccttcactttctccctccaaagagtttccattctgctcatcaccacaaaattaaatgtcccaaatgtgctcttaccatgttattttcccacttaacagtgattctctctgaccttcagaatacctccttaactttagcttcaacatcatcagcctattgagagactaacatgtagcctttgctattttgtgaaaagacctgtgttcattgtctaatgtgcctcatttattatacttctttgacttcctctttcctagaaagttttctttcacctttctttctaaatcttgtttgtcttaagaactgtctcaaatttcatctcttcagtgaggacttctgagtagccctaactaaaatgtatgttcctcctttgaattcctaattggtcagcatacatttattagcaataataatgccttttatttataaaaaaattctacctaaattttttatttgcatcttaccacgattccatggggttagataagtcaggaattgttccagttgtacacatgggcaaaagctggagctcagagaaattaagacccctaggtcaccagctagaagatgatagagcaaatactagaacttaaggatttgatgccaggtatagggggcacagatctaggtactttagtaaataatacattcttagccctgaagatgcttatagtctagttgaggggacaggataggcatgcttaaaacaataatctacagttatatttcattatgatatgtgatagatagcaaagtgtcctcttaaactgcccttgatggcaagacccatgtgttctcttggagtggacagcacttagcccatggacttcttgcagagaaagaactcagtagatgttttcaaaatttaattcagtggtgtagacagttcgtaccattggcattcacatcatgtaatgccaatggtagatatctaggggaaaaaatggtaaatttgtgatgactatgagtcttagtacttattccatgacggtgttgtagcacttaaactaactatgagattgcagtggtcagtatgaggaaaaggtgcttccagagaagtgaaagtaggggatatgcctagggctttttctgtagacagaaatttaccttccttcttgcccttggccagtgaccacataaaattaacctaaagccagtgatcaaggtaatctttgctggaagagtttttttgttttgttttgttttgttttgtttttttgagatggagtttcactcttgttgcccaggctggagtgcaatggtgcgatctcagctcacagcaacccccgcctcctgggttcaagtgattctcctgcctcagactcctgagtagctgggattacagacatgcgccaccacacccggctaatttttgtattttagtagagatggggtttctgcatgttggtcaggctggtcttaaactcccaacctcaggtgatctgcctgcctcggcctcccaaagtgctgggattacaagcgtgagccactgcgcccggcctggaagagtcttaatattatatgtggctgctgctgctgctgcttcatgaaataatctgtgaaagtttcttcctaggttttgaggcactaattgcccatgtttgagtatttttccataatttgaccacaacttgacacttcttgttgccctcaaatctaagtgtcatacttatcaacgcatgttgatctacaaagacattttcagccaggcgcagtggctcacgcctgtaatcccaacactttgggaggccaaggcgggcagatcacaaggtcaggagttcaagaccagcctggccaatatggtgaaaccccgtctctactgaaaatacaaaaattagccaggtgtggtggcgggcgcctgtagcgccagctactcgggtggctaaggcaagagaatcgcttgaacctgggggcggaggttgctgtgagccgagattgcaccactgcactccagcctggcgacagaacaagactccatctcaattaaaaaaaaaaaaaaagcattttcttcatattcgctacatatgtttgtaacattaatgagaaataagaaattacccttttccttgactaggtgtggaaactaaggcacagagaaatccaatatctttgcctaaggctatttagaaaggtaagggtagactgtgctgacactctaagcatagagaagctatttactgcatcaggtactgtgcttatccagggacatttggcatttttcatctccttgttaaaatatatgtgtatatatatatatatatatatgaaagaaaaggaaagaaaagcaatttaagaaaaaaacaaaagataaagtggcaactagttttgtttttcacttcatgatcatgctcctagcagtttagaaaaagtttttttttttaaggcacacattaaactatcaaataggttgatccaaattgtccaaataatcttctagtcccagcatgtctttttttctctcatagaaattaggatcatatatttgtaaatgacttgtggaggagattgaagcagtcagtgtaaatggagtttctccaggtgctgatgcctaatcgctgggtaatagctgtggacttgctgtgagacctgcattattacaatgtaatcagaatcctgttgctctgctgttattgtcagccacttgtggaattttaaaagcaataacaattttgattttaaatcatggcattattaaagttattttcttcccttgccagaacatagctactgatgcttgtctttgaaggacttgactgtagtggaatctttgttgatgtcagaagaagtatttctgttcctggccacactgagaaacccctcctttccttcgacacatttttttcatattgttgtgtcaatacttggttatttacagcaaggtgtgtgatggcagtacaaataattttttaatgcagttaaaccaaaatttatttatatttggcctgataatttattattttattatttgcttatagaaaattaatttttccagttatcttttgtttatgctgttaataaaattaattttattactcagcaatgccatcgcagaattgaagaaattggaagaaataacccaagaatgtgcttccttataaggggaagacaatttaaattttaaaaaatatataatatcatgaatgttaagaactggcctataaacatatctcttggttggagttatagcaagaaatgtggtcaaactaaagtctggatgtaggctgtgaaagtccacattacttttctatttgtactattcatatgttttctcaggtcattcaactggtggggttgcttttctgcttgctgttataatccttctttgttggggacctctaaacacatgtcttttacttaattcattaatttgtttctttgtccctgccttttgaagcaagtgaacagtatagggaagaggaaggctttaggtccagatgcccaagactcgtataagtggctgtcttgaaactactggtgtctgttgacttctttttttttttttgagacagtctcattctgtcacccaggctggagtacagtgatgcaatctcggcaacctctgcctccttggttcaaacgattttcatgcctcattctctcaagtagctgggattacaggaatgtgccaccacacttggctcatttttttctatttttagtagagacagggttttgccatgttggccaggctggtctcaaactcccggcctcaagtgatctgcccatcttggccccacaaagtgttgggattacaggcgtgagccaccactcccagccttctgttgacttctaatatactagtcgcctatgcctagtggagatatgaatagttcctaaatttaaaggcctattaaatattgcttttaacaattttaaaagagagagtttttaaaaaatgccttcatgtaaggtaaggggggactgttgtatcaaaactgaaaggttacaatttgttagactgaattctagggatgctgtatctgatggtaggtaacatctacaatctaaacagtttaggacctgtgttttatgttttatggaaagtccttcttttctctctacctaatttcatttagcatctttatcaatattaatgtttacatttgaatacatgcccaacagtatgatttctataagcagaaattgtgtcatggcctacctttatgtaaatcagttctgaggtaatttagttgacttcatatcaccctttctcctccacaaagttctctttcagttttgtccaaatcaatataaaatttatttcgtaagacttagtcctaggagccagattgaaatttgttcacttgcaagtttgaaggtactaagctaagataaggatatccaaaaaggatgtttaactccaccaaagccttacaagggccgaatgggataaaatttagaatgaatggaaatctcatctatcttctgttttacatgtttttgctcctagaaagctaccctggttgaccatgggatccggcgccttactttcctggttgcacaaaaggtactgacatgtgaattgtacctctttaatatttcttatgctgctgctacaacttaataaaaatgggattgtaatcttatrcttactaataggatttatgcagagaaataaccacttttctgtaagtttcatttttaaaaaacattagtttaactcatcatcttttactcaatttctttttgattttgttactaattgccaacttctgctgtctttccttcctttctctcttttatttgaaaggatttcagaaagcaggtcaactatgaggtggatcggagatttcatgtaagtaaaatgaacaataatgaaagattacttactgttttatttgtctgccactgattatttaaccagaatatatgttagaagggctggactgatatttgatccttcttcttttagaaattattataataaatattcagttctctgtaatcccagcactttgggaggctgagtcaggaaaattgcttgagcccacaagtttgagatgagcctgggcaacataatgagacccagtcctctattaattaaaaaaaaattttttttaattcttatatcaagtgttccagctaaaggttttcttctttttttttttaaccctataatgaattctcaatatatctctgagaaatagttaagaatgaacataagcatttatccagataaataaggtagaaacaagctaactagtaatttcttctgtgcttatagtgaatcaataatcaaggacagccagttgcattttgtggtcttggattctttattgagaagtctcaattctaaagaacaatgatttattatttaaaatgccttgatagagccaagttgctattttttgtcttatgttaatcgtaggaacaggaaataagtaaaaattaaacactctgttgcttattctcccatttaactgaattaactgttaatatttatgagattaaaatttttattgaaaagagaattaagttaatagcctggcatccaaactatggtatacccgtatgatcatacccagtacagtgacaacagtaaggccagaaatccagtttggaatcaatatgttgttttcaaaatgactgattataatcaaaatatttcataaaaattgattctaatgtagctaactaagattctagaggatgttaagaagtcttttttttcttttctttcttttttttttttttgagagagtgtcttgcttagtcgcccaggctggagtgcagtggcgcaatctcagctcactgcaacctccgcctcctgggttgcagcaattctcctgcctcagcctcccaagtagctgggattgcaggcatgtgccaccacacccagctgatttttgtatttttagtagagacaggggttcaccatgttagccaggctggtctcgaactcctgacctcaggtgatctgcccgcctcagcctcccaaagtgctgagattacaggcatgagccactgtgcccagcctgtttggtttggttttagcaattaagataatttggttgttaagccttgcttgtttgcaacaatgaagatggcacttgagattctggaaaggactttctaaactcaaggacctatgtgtgattgcttttattacctttttgtttattaggttttcaagacttgacattttgttttccttcatacagttcaccttgttggtctagtctatagagaaacaagagagctaagattttctgaaatgctttaggaaatgttgtggactgcatgactcccctgtgttattgatgtcaggaaatcaagcagagtgtagatatatgtcaatcaataactttagataggaaacggagtcagtggagaagtatgaggagcttaaaaagaaccctagggctttaggaagaaaaatcaggagcttagagaataaaattgatactttgggatagaatatgaaagcccatggataaacactgtggctggtagatgctgatcagaactaaggtagacatgccagagccaggccctggattttagaagagtattgtgctaggttcttaaatgttactgtgctttttatcaccgactttagaataacagcatattctagggaataacactaaatttgtaaaattgttttcctttttgctaatggattagatggaatcttcacatctatagcacactaactggtttctataataaatacactgatcaactaaaactgttcactaaaatttttagcaaaccaaagtgattagttctcactgacattttctcatatatgtaacacataaaaaaaccctttcttatctctgaatctatagtgtatagttataaatatgccctagtattaagagtatacttaacagctttaaaacatttttttctctctgctgtcctgatatttctggatctaggtttaatagggacatgtataggcaaaatcggctagaaaatgaggccagcagggggtcttccgtgacaatcattgtctgattcctatwtatagtggcatcaagtgggaaatcacttaaattatcaagtgacttgatttgtcatgagtgtaggaaaagctgctttagagcatagagaacattaaggtttaagtgaggactgcatttgctctgaagaattgaatggcagaggagttggggtgtttttatgttagtccctttaaaaatgataagtgattttgcaaggtgcaagggcaactattaaaccgaactccatccagaatctattatacaatccaggatctacactagccaggaagcgttggcagaaactgtacaaatctgggggtcactgtcgtggtgctgctgtgagttcttttgctgatggtagcttgacattcatgaaggatgcttatttagcctctgtcatgtcatctgattgtgcttgccccatagttagtgtactgtgaaaaagaggaagctttctgggagtgtcagagatgaatcccttgatctctctggcttcttgataatccactgtgatgtatgcagcctcccctgtccaatgctgtggaatccctatattattgaatggaagagagaatttgcacttgagggagcaaggagaggaggaagtttaccaagtttgattcaagcacattggttagtggaataaagcaagctgtgctgttatatagttgttggtctttcaaattgcctcagaaccagaataagacaaatgagggccagagtagaggttgctagagagctgtgtatattgttaggtactgatttggatgacagtgattgctataagcatttacaatacttcgtagtttagccacagttgtcccagatagctgcccacagctttaaaacatttttagggtgtctgttgccaccctagtccgttgacactgcatggagattatttctgtgacagcagtcttcaccagtgttaaggaggctgggagttgactctgtttccataaccatctaattaaatcaagtgcccataatggaatttgaataactgcctaactttgatatttaaacagaaactttgaggaaaracaagtctctttttgtaaatatattctacttgttaagaaaaaataaagtagatcatgatgttcatctgaaaataaaaaataaaagaaaaaaatggacaagatgttaaaaaaaagaaaaaagatcaaagtcttgaatggaaaagaggcttcttgaatttctgcagctatctaaactgcaactccacagttttctgttagttaaaacttattgactcactctgtcttagtttcactcacattttaggtctggaattccaaaatatttagcagaaagtgctgtctaattgggatataatattatgcttttttttttttaagctttccatatttttttcagcaaagtttggctaaggacatcggaatacaaattttcaggacttcttcttatcccccattaagtcctaaaaccatgataagattctaaatcaaacagtttyacatctgttaataaaatgttaccttttgttcttgtaaaatttcatgagatttaaaaaaaaggtctacatatctcccgagagagagttgttgttttatgactattgtgtgattcccactttaaaatgaaatgttttggattatttggaccttgaaggaagagctcactatatgagcagttatcataattagtagttctttttttctttttttttttaagatagttctgtttggtagtggaccaactattagttttcagaagggttggtttggatttttgttttaattacagtctatataattagttctcagcatgttgaggtaaaagagaattgtaccagcaagctcccaatttcttcatctcattaggtttttaacacgattattagtatcataatcagctatgatgttttttgttgcaggttttcacattctctgatttgcggggtgtcttgattggctaatttgggcaaattattttgattgtcttgatgatggttggctgattagaacacagcaagggcataatttcttcctgtgaaacgttgcattcttttgttttttggtaccagaatactaagagggtttttctttgtgtacattcaattatgatatttgcccatgacactagtagaatacttggaaagcaaatacattgatgatggaataagcatgaatgctttcagtggaaaaactggcagtatgaggatgagataggataaaagaatttactaaaactgtaggatcagacttttagatttcttcttttctgtgttttctgtgattctgtggtttttgagtgccaaaagagattactttttgtaagagtcttcagacttccatgtcactgaagaattgcttagtagttccacttttccattgcacagaggttcttgccatctcttgttctgaatgtttaatacttaaattgaggattttaccggggagttacaaatttactcagaagtttaaaaaaaaaaagttgtttatatgatctcatgacaacttttcttagctaaccttaatgaaagtggtttttctaattggtagtcattgcccacctctgccaagaattagtcagtttcttcattatttgtattaaaggcatttccattcaaactgctttatatgcctttcagttactacaaattttcttaattggtttagtggaaaagaaagcattttttattactgttttgtttttgaaaggaaatggttttgatcctataaatgtacataattaaataaatggcatcctaaacaaacattttaattaattagctaataatagttaaggcggaatagaaaagtgtgtgcgtaaaatatcatattatcactttccttgacttttctttcagagagttccatggaaagattttgtcattcttccttttttgacatttgttactttttaggtaatgctctgaaagctgtacctcactagaataaaaccaaaactaggttatataaaaccatgagcatgatatttatcgacacctcagctgaatgcatcttacttaaccttgaagtcagtcctatgtgcttcactctcataacgggtgggggsggtgtcagagaattatttagaacaaaacttgaggagaagttcagtcctgtgtaaaatccactttaaaaaggcttttaaaaaaggatttccctgaggttggtaaatgagctcctaggaaccttttaaatgcagtcttacagttaaaataccaaggaaaagataaaaagatttattaactgtgcaagctttagttaaggtgagagtgaggtgtaacacttatggaacgtattcaagaaattttcaggaaattcaagaaccacaggtttacagcatgagttttgctttgtttgctttctgctttttaaatttaaagtcttaatttctgtgtttttgtctcatcaaagagaaatcctctaaatgaggaatttagattataataaaaagagaaaggtaatactctgcccttgagagatcagagggcatgggctctggcactagagagacccaagtttatcttccagctctgtgattctgagcatatacttgagccaaggcttctgcaagatgagggtcacaatatctacccctagaggttgttgagagcatcagataggacaacacatgagagtacctgccaccagaagattttcagtccatgtttccttcacatttcctaaagctcattgaggatgtgtaggcagctagtcccggtctctctgccttgtactgataagtgtttgattatattgcactcataatgaagaagatgcctaatgaaacctcctatagaggcaaatagtaatgatttgattccagcactgccagtagagcttcccatccgagaaacaggggtatttggcattggtaagttaaatttcagaaactaatgaactctgctaattgaattcatctttgttaattaataaggttctagtaaattgggtttttttttgtataatgccctacaaaaaagcaggaagacctaatgattacaagttcactagttctaaccttattctttcctatacatatagkggtagtgaccaaggtagaatcttatatttttcttcatcttcaaatgttatcatttaaacccttgacattattgacttgagaataaatgtgaaaatcatggactgagcactctatactgtctgagtagtttatattttaagagtttcttaaagagtaacttgggaaatcagtccattaactactattgcagtgactgtggcacaagggtatattggttttatttgctgggttgtgccaagagcaatacctagcaaaaaaatttttttcacttgggagatttaaaaaattcatacattttttttcccctgggagagggtagatactaaaattaggtttataatgtggtgattctcaaatttggaaatggggtcaaagtgatggttatgcggaggatcattcatatatatttcctggactaagcttaggtaagaagcatgtttttctagaaaactgkcttctaaatgcttaactgtttctatactgttygttctcaaagagccatgtctatgaactactgacacatttttcccccttctttaatacagagagaattccctaaattttttacattccgagcaagggataaggtaaggattgatttctttcctatttaaaaaaaaaaattactttttcttaaaagcccaagagcggcttatctttgccatacgttcttcttgccattcttttttctcttattgaacttgtgcttcctgttgccttacrtgtgtcttagaactaaagccrattcctttctgaaagggtttggtttgggaaacaaccaaatgtattgagctactcaacgaaggtgatacctttccaaatcatccttgtcctgtagaatgatcctaatgatgtgatattaaaggaccattcttgttatctacaaatagttcactgatactcaactctactttatgtgaatttgtttttcaattttaaaatacaaaacttcagaccatgttgctttcttcctgttaccggcttatatatttgactctctctctccattcactcaattgacatgtattccagaaaaatactttagtttcactgaaacatacagtacatatacagtaaatacagtaaagttatatactaatacaacttttaaaaaacatatataagtaattatatatctatggatatagtgttccaaagccaaatatctctttaattaaaaaattgtatgatgtttctttgttgagtatttattatgtcctttgtacttatcataagtgagaaaatttttagattagttgggtaagctcaaaacattggcatgtgaagtagatattaatgtgaagcagcctgtaattaatataaaaatgaattatataaagacattaaatgttgtaggagttctaaggaaattgaggattttttgtttgtttttcatgtatatcatcaccacttgtaaaatcataaatgatgaaagtttaggaatatcatcctataaagtacctatataataggtactttagtgcctaatcttatgtaagctgtagcattagccttgaatgtagctcatttttgttgctcattagcacatcatagcttatgtttctattttcaggcatctcttttacattcacattcatagtataattytgtaactgcctcttgtgarctgttttttctctgattcttgtactcagtttgaggaggatcgtatctatcgtcatctggagcctgctctggctttccagttagagctgaaccggatgagaaattttgacctcactgccattccatgtgctaatcacaagatgcacctgtatctyggggcagccaaggtggaagtgggcacagaagtgacagactacaggttctttgttcgtgcaatcatcaggcattctgatctggtcaccaaggtgggtgctgtactttaatgggatgttatccctgagggaagggacagaataatagatatgattcaaaattaggtattatgcttctgctgagagagaacataaaaaaaagatcaggttttcattttttgaatcaaggttcttgttctatttcaatgtttacaaaagtaaatatttcatataataaaggcttttttttttttacaaagcagaaagtgcatctgaaaaaaaataaaaaatgaaggctctttttccactttaatttgatttttcttggtagcagaagcataataacactcaagaaaagaaaaagcatacaaacagaaaaatcacaggaagaattgggtgatggtagagcataaggagataagttaggaaagaggtgatcccattgtacacctgtctagaagtatgggtagtgtctgtatatagcaaggcacttcctgatgtgttcattattattatatcccatagccgtaccctttcttcagcttttcctttctaaatagctctgtttggcatatgtgaaatatcatcctattgaacttacagctatggggatgcccagtatttctacctcttggaagggaatgatgcactaaaagtaaggaggaagggctgacatggactctttatctggccctttcctgcccctgctccctgtggttactggactgactctagggagaaagataaacaatctcttcaccaagtgccttatgattcatgatatactgctgcttaagtgattataayagccatttctttattgcctcttttaaactacattaatgttgattattttcttcctgtataggaagcttcttttgaatatctgcaaaatgaaggggagcggctactcctggaagccatggatgagttggaagttgcttttaacaatacaaatgtccgcactgactgtaaccacatcttcctcaactttgtgcccacggttatcatggacccatcaaaggtacatttctccttagcttctctcccagcactagcaagcataagcacagaagttcattcatatttatctcacttggacttggaaacaggtactccttgttcaggctgttgagcccttaatctgtaaagtttatagaatgtttataagattgagtttctgggacagtgtcaaaaatttgatatagccattgaaaaaacagttctcaaaactgaaggttttggtgttagcttgctggtcacttataagcagtacaaaaacrtgaaaacattttcttttgttggtacctattttatatttgccataatagtggtcctgttttgtattattccctactatttctcatctggaattattaattttactgttactaagcattttggctaaattactgcttctgtgcactaaatgttaatcacctggtggccttagtgagataatgcaccttctcaaagtgtctaacctatctctctttagtgtttttccacagggagagaatttggctgataaggaatttctcatgtattatgtatattttcttccctgagggtctattctgaaatgcattctatataatttaaggaagaaaaacaaggtgattttgtacttgaccttttatcccaagtgtaataaagacaggctgctctctgtttctgctccctctaacgctttctttctttctttttttttttgttgagacagagtctcgctctgttgcccaggctgaagcagtggcaccatctcagctcattgcaacctccacctcccaggttcaagagactgtcatgcttcagcctccccgagtagcagggactataggcatgtgccaccacgcccggctaatttttgtatttttagtagaaacggggtttcaccatgttagtcaggctggtctccaactcctgacctcaagtaatctgcctgcctcagcctcccaaagtgctgggattacaggtgtgagccaccgtgcctggccccttctaactctttctatcatgatactgtggaatttggataggagaaccagtatctccctttttcaagatcagctgtaggcatgaatttttgctgctgctgctgcttttttttttttctttttcttttttttcttacagaaacagggtcttgctatgttgcccaggctagtcttgaactcctggcctcaagcgatcctcctgcctcagactcccaaagtgctgggattacaggcatgagtcatcatgcctggtagacttttgcttcttgaacttagtatctgagatctgagaagtagttttctacctttttcccttaaaaattccaagctaatgatgggttgctttagtttgtaaggaacgccaaggacagggctactcatttgactcaaatctcatcatctagtttaagcaaaacttctcctaagcattctgggactaataagctgggaaacttaaaacatggcatggacactgtacagctgtatttttttttagatttggcttaccttttctctgagtttttcagatcagcctctgctttcattctaaccacccatatacactggctctgcttttctaatgatagatagctgccaattttctgtacataaagattgttggcttttgttccctcaagaaaagaatgggtaaatatctcttggttaacaagcaagtatgataatagagaggttaactccctgaaattcattctaacttaaaattttgtggtgcagaaacaaactgcaagggtggcacatgctactaaagaaccacaagagaaagggaatgtaagatattcttgagattttctaagaagttgaggaagcattttagaaagatacttcatttaaggatacattaagttcgaatagcatgttctagctgcattatgttctgtgcagccatgttggggaaaaaaagttttgctttagcatgtaaataacaagaaatcatgtctaaggccatttagttaaaataactgtcctacccctaaaaactaagagcattaagctgccttggtataaacttagagaaatgtgggaacatctgccccatcttattaaatcctaggtggacttagcagtggccaagcttcagagctctgtttagagagaatgttctagcaccacctacaaattgcctttctttaatttgtgcaatttaccaagagacatatattataaagtttaataaaactgtatgaaaaaaagctcatggtggtaattgctgtgttgatttaaagtcctgtaagtgcagtgaaacatagttaccatgcatataaatgctacttaatagctatttaactagagattttattcttatttggggcttcctcttaaatcccatggcttgtaattttagatactgcagatctttgatatagaatatgaatataattgggaaaggggaaggagttgcagagatttgggtgttattatcgagagaaaaccactcaaatgccaggccagcatgaaattgtccctgacttgttccaagaaagaatagtttggggagaaactatctgaccactttttgtaaggtgtgcatctccacaaaccaacctctttttttttttaccccttctttctcaaatatgagcagacctgaaacaggtcttarttagaagatatttaagttttgtgcttggtgatgtgtctgtgtcagattgaggaatccgtgcggagcatggtaatgcggtatggaagtcgcctgtggaaattgcgcgtcctccaggcagaactgaaaatcaacattcgcctgacgccaactggaaaagcaattcccatccgcctcttcctgacaaacgagtctggctattacttggatatcagcctatacaaggaagtgactgactccaggacagcacaggtacaatactcaaacaggctcctcagagttttgatttggtcctacagataagacactcrtccttgttatagaagacccacactcacaaatcccattggttcacctggtgggattatcctctataagattaaatgattgtatgaatttgaaaaacttcatctgccttataagatttgcctatgttctctatcatggatgttataaaacccttaaccatttgtcatgtattggtaagcactaacagatgccaagtgaacctgactccagaggttattctgcaatttaggctctttttttagagggctcgtgggttatttcagcaatctaatctctggtctgatgcgtcctttccgttttcaccataattaaactactcattggcaagtgaggaaaagagaattgttggatttatgtcaccaacttctatgttaaagaaggaaaatttcaacatagtatagtggcatgagcactaccatcatcagtgtctatcatatttatctattgtgttctgtttctgtttttatcatatttattgtgttatctattatgttgttccctttccttcaaagatttcagggtgtcatatattatacaagagcaaagtggcaaatttaaacccgttttcaggtaggaaaactgagaatgtaaaaatagaaagtgagtcagtacactaattctgtgaaacagagaattcccttttaatcttttttactacgttggtttctaaatatttgggctctttactatgatactgaaattaggttggttcaccattgttcacatttttgaagaactaggatattttatggctttggcctgaattcaagaattgcatttcttctgattaaaggatgaacctgctccagtatacataaacaagggtttcagtctattccgtgctttgggtgccagggagagattatgtgtctcttgtttttatctatatccttttaaatccaggaatagagtcaggaaaatatatttttcagtcttttgaagatgaatttttaaaaatctcagtttggacagtagtcagaatgacctttcattttgtgctttgattcctagtgaggtggctagagaaatctatcctatgagaagtgagcagttaaaaacagagagagagagtgcgcaagagcgtgagtggtgaccaagagaaagagtgttcaatattttttgctgtatttgatgtttttttagtgcaactttaaagacattttcagtcaaagctttcaatgggtagggatgtttttaattaacttctacaatagcttcaaggcaggtctattcttgtgaaaagtaagatggccacttgagattttaatgtttttgataaatatgtttgttcttcataactactttctttctttttttttttttcctttcctttattaggaaactctgagatttccctcatgctagctaatggtgacacaggagtgtgaaaggcacagatgccttcaatcagggtttagtattacacatggtacaaaataagcacacaataagcatctgaaagaatgaacaaaccaccttcaacctgaaggaaaacgctttttacctagggtcctgcatattttaaaagccctgaaggaagaggtcttctacagactcttcacttgagagagttcaagagctactgccatatgggaactaacttttgagcctgtggctagacgtgggaactgacaaaaggagcagcctccaacccagttctggtgctcctaatgcctacatggtgcttattgtcaaactgtttttccctttctttaatgaatcattgtatgaagttaatacagaaccatgtctgttattcgttcatttgttttttaatttaatattgattgactacttatagtatgtcaggcactatgcgtataaagagaaaaagcaaactgtactcaagaaatttacatcacaatggaagaagacaaatgatttgtttctctgtggcaaatatgtgctattataaataaatacagtgttctaagggagcagactatgggtcagaaattattttctaaaataattttgatggcttctggtgaaaggtgtgtgatatataaaatgtgtacatattttcatgaacttctaaaacatatactttacagtttttagttactgcgttcattatagtagaaaatggaactaacatagatagttgagtattcaggaactcctattactatcagcctcttgccctagcacatcatttattcattctgccaataaggaacaaggttgattggcttgagttttatttttcattttccttgtacagtctttgtagtataggctgtaatgaacactgatgtcaggcagtcataatggggagaagagatttgggtaatccattgcataagtgaattgatttccaatgtgcagtgtaagagaaaaataacattttaggctgggcgcagtgactcacgcctgtaatcccagcactttgggaggccaaggcagatggatcacctgaggtcaggagttcgagaccagcctgaccaacaaggtgaaagcctgtctctactaaaaatacaaaaattagccgggagtggtggcaggggcctgtagtcccagctactcaggaggctgagacaggagaattgctagaacccgggaggcggaggttgtagtgagctgagatcgtgccactgtgctctaacctgggcaatggagcaagaatccgtctcaaaaaaaagaaaaataacattttaaaatcatctttgggctgggcatggtggctcatacctgtaatcccagcactttgggagaccaaggtgggaggatcacatgagcccaggagtttgacactagccagctcaacaaggcaagaccctgtctctaccaaaaaaaaaaaaaaaaaaaaaaaaaaaagaaatagccaggcatggtgtcatgcacctgtagtaccaactactcaggaggctgaggcagaagtatcacttgggccccggagtttgaggctgcaatgagctatgattgtgacaccacactccagcctgggcgagagagtgagacactgcctctaaaaataataaataacacctttattgaagtgcaatttacttataataaaatggactcgttttgtgtgtgcagttcaattcattctgtcaaatgtatacaccgtgtaagtactatcacagttgtggtagatacatcactgcagaaagttctcttattcgcctttgcagtcaaaggtagaagcaccaaccccggccttaggcaaccactgatctgctttctgttactatagattagttttgcctatcctagaatttaaatcaaacagtgtgtactattttgtgtctagcttattttactcagcataatgtttttgaggttcagccatgttgcatagattatgtgtatgttccttttcatttttggatagtattccgtttcatggattttttttttttttttttgagacagggtctcactatcttgcccaagctagagtgcaatattgtaatcatagctgaccacagcctcgacctccttggctcaagcagtccttccacctcagcctcctaagtagctgggactaaaggcgtctaccaccatgcccagctagtttttaaatttttttagagacagggtcccacaatgttgcccaggcttgtctcaaactcctggattcatgggaccctcccaccttggcctcccaaagtgctgggattacaggtgtaagctgccatgcccagccccatttaatggatttatcgaaatttttacattcatttatcaaaatgtttatattcacagatatgttttggcaggtaaggtgactaactgggagctctgacatgttccaaggaaacaaggctttccagagtttccatcagatatagctttgactagcaaggggcacccccaaagggcaggcartatcttgacactgttttcatttctatttcatttggggatgggtgactgccaactcagatattagatggttctttatgaattaatgggaggaatgatgagaatagaagtctctattgagtaggagagagtaaactaagaccacatgcttgtgatgatagtttacaacgatttgtgtgaggagttacatgtatatttcctaagtccatattcaaattatggatattaaaaaagactggctgggcatggtggctcacacctgtaatcccagcactttgggaggccgaggtgggcaaatcagctgaggttaggagtttgagaccagtctgaccaatatggagaaactccatctctactaaaaatacaaaattagctgggcgtggtggcgcatgcctgtaatcccagctactcgggaggctgagacaggagaattacttgaacccaggaggcagaggttgtggtgagccgagatcgcaccattgcactccagcctgggcaacaagagtgaaactccgtctccaaaaaaaaaaaaaaaaaaaaggactgaaactctagttctcattttcttttctttctttcttttttttttttccttttgagatggagtctcactctgacgcccaggctggagtgcagtagcacgatctcggctcactgcaacactgcaagttctacctccygggttcacaccattctcctgcctcagccttttttttgtatttttagtagagacggggtttcaccgtgttagccaggatggtctcgatctcctgacctcgtgatctgcctgctttggcctcccaaagygctgggattgcaggcgtgagccactgcgcccggccctctagttctcattgtctaattttccaagataacctgttgatggacatttggggttttatttcctagtttgagctattagtagtaataaagctgctgtgaacattcatttacaaatctttgtgtagatatatttttatttcctttgggtaaatacgtaaaagtgtaattgctgggacacagtaagcatatgcttaactttataagatattgacaaactgccaaaatatttgtaccatttaaatttctgccagcaatatacatatgtagctagattgttttctccaatccccttcctcagtgcacaattatgttgcttaactatgaccagcctgtcttcatcacaaagcttggccaaaccgagtctcaaggtcttgtctctcttaacagacgagaaatgtagttctaggaacctgctgcgtttaccccattttcttattttgattcagcttacttgctctgagtacagttttctcatactgtacccttgccttacttaacactttgaatctcttaaaacattattgcttttactgacacattcctaagacattactaattctgcttccccccgggtgacttttcctattgatcttgtggaagaggactgggagctccaatctctgggtctttaaaacagcctgagacatgttttccccagaacaggacctgattgacaaattagcagaacattcattcctctgagctaaggggctaaggatttacagatgaactgtacccacgatttaggaaggtacttaattctattcctgtgcatatatatcaggtccacaatctrttcattaatggtagacttgtgcttattttgtaggtctgaatagatatgtaggtatacacatacccttacatcccaatctccatttgtattcactgcactgggaatttatattttatgtatccatgcatgaagtgcctagtttagtgttatacaacctctgggcactcaataaatattaattgaattgaaataatggcatcctttataaatattcataagcaaataaaactatctaaatatatggagtatgaagcactcctctagaaatatttgagttaaaatgattaaaaaccagtgtagtgatttcattatgtgacaatataggtattgcaggagctattcactagttgtagacagcatcttgaggagaagtaaatacatgtatatatatatatatgttttttaatatacataatttaatataatatggttattttactatatgtaaaatatgaggctgtgtstcatgggctagtgagaattaactatctagatggatggatgaaatccacttctggcagaaatctttgaagcctttgcatagctagtaatacttatgaagtaccatctaatcaagtgggttaaaggactaaagcacagatgatatactagagtcttgatctggccttctgccattgaggaaagaagagaattatctttactgcatagctgttcttcaacttcaataccagggctgctcagactggttagttgatgtacttcatttctgagtatatgagattcaactcactttagatggctagcatggtcagtctgtctttgagatgcgaaatgtgcaccgtgctttcttgtttatttccttttttttttttttttttttttttttttggatacagagtcttgctctgttgcccaggctggagtgcagtggcgcaatcttggctcactgcaagctccacctcctgggttcacgccattctcctgcctcagcctcccgagtagctgggactacaggcgcccaccaccacgcccagctaatgtttttgtattttcagtagagacaaggtttcaccatgttagccaggatggtctcgatctcctgacctcatgatcctcccgccttggcctcccaaagtgctgggattacaggcgtgagccactgcgcctggccttctttcttgttgatttcaactaatctaaaagtgagagcagttatggtatatggctggttatatatatatattttttggagttggttaatctgtggagaggtgagagcaccaagtacccagtgttaagaggcatatctcagctactcaacctaccaaaaatgttttcaaagagataatatttgtgcaaaaaaagcccctctaggcagctctctgatttttttctgtctcttaactccccatgccatttttttttsctgcagatcatgtttcaggcatatggagacaaacagggaccactgcatggaatgttaatcaatactccatatgtgaccaaagacctgctgcaatcaaagaggttccaggcacaatccttagggacaacatacatatatgatatcccagagatgtttcggcaggtaagatgcctaactggagggtctgacatgttctaaggaggcaaggtttccctgaatttccatcagatgckgttttggctagaagggggcactccaaagggcaagaaatatcttgacactgttttcatttctatttcatttgaggattggtgactgccaactcagatattggatggttctttatgaattaatgagaggaatggtgagaatagaagtctctattgagtaggagacaggagagagtaaactaaggttatgttcttgtggtgatagtttacagtgacttgtgtgaagagttacctgtgtatttcccaagtctatattcaaattatggatattaaaaaggagatctgatactttagttctcattttccaatataaacctggttcctagttgataccctagattaatatgatgagaatcaatatagatagcatagacaaatggatatagagttcatggtacacagtttagagtataagttcttttgtgggagatttgttatagctgaataaaaactagcatgagaaaatatgacattatgaatctcagcctctatatgaaaacaaattctttcaatctgtatggtgaatcatctctatgctgcagatttttcttctatcaatagaaggcaagaaaagtgtatcaccagtagaaaatgcaaccagtaaagaataaggtatcaaaagaatactgaatttgtcctttttaaaaaaatctatgaatataggatttttccaagtctcctagtcaatactaccagtattaccacatttgaattttagtaaagtaatatatgtagycgtagtaaatagtctgtgtagaattcctgtgttattcacaaatacaagagattacctttatgcaaccatttgtttacaagttctgtctcctgaaagataccttcattcggtatttcccttttatagcattgctagcctaaaagctgagtgttacttctgtttcccaatgccagtgctataaatataatataaatcacattctatataaatataatataaatcacattctaagtaattcttcctatataataggcataaacacagtgattaggacacataggtatgtatgagtcacttgggattcaaatgttgctttgaggcaagcaaagaaagagctgaattagctcccacttcacaaaggatttacttacaggaagttggaaatggaaatcataatattttttaaatgaattggtatgtctgtgtcaaaattgagcagaattgatctgcacatttacaaatagtcacacacatctagtgagctaattcctgtgtgtggtcctatagctatgaaaaatattagaaagaggtttcttccctggaatttctagtagaagcttcattctggccttcttggattttctttttattagctgagcgtcatgtcattttcctggatattcctttgttgtcaagtttctttaggattttccttttctttgttttaaggagtcgatgctacttatttagttttttaattttaatattcctaggatagtgttaggtctttcctgtttgttaatgctctggtgctgatttggaatcactcagtagtttgactttttggaaaagtgcctgacttttggcatgtaaaaagtaattacaaatctattttaactgagaatgggagctggagaatttagtctaatgtttacactctgcagaacacttggaaaagaaggcaaaaccagattgactgaatcttaataattatttttgtctatattgaaattattgtgactgattagtcaaacttcttttctccactagtccctgatcaaactctgggagtctatgtccactcaagcatttcttccatctccccctctgccttctgacatgctgacttacactgaactggtactggatgatcaaggtcagctggtccacatgaacaggcttccaggaggaaatgaggcaagtagttgaaaccccccttccctttcttatctctgtgcccactagtaccagctttctgtgaggtggtcattaaatagcactggagcatggtagtcttgttgggagagttctttagagagagcattgactgagtatcaagaaattattaattttttaggtgtgataatggtattatgattttgctttttaaaatagtattgttttaacacaaaggactcagttttaaaaaaataaaaaggaatattgttttcttttagagatacagactaagacatttacagatgcaatgatttgcttctaaataaagaggtgtgagggtgggtgtgtagatgaaacagggttggtcgtgagttgatcattgaagctaggtgataggtacatgaaaatagattattttccctgtttttgtctatgtgtgaaatttggggattttctttttttcttttttctttttttgagatggtgtctcgctctgtcacacaggctggagtgcagtggctcaatctcagctcactgcagccttgacctccatgtctcaagtgatcctctcacctcagcctcctgagtagctggtactacaggtgtgcaccactacacttggctaatttttgtatttttttcttgagatggggtttcaccatgttggtctcaagctcctgagctcaagcaatctgcctgcctcagccccgaaaagtgctgggattttaggtgtgcaccattgtgcccagccaggattttctataatgaaaacatttaaagtattgttttgcttaatgttttttcttatttggattcatattaataaatgcatttttcagtgtcttytccatgctcaattcatttgatctggtgctgttgtgagcatgataaatgtgttcttgaaggggctcaatcagaattaggggttcaaacataaaaaatgtagcaaagaacccattttttgataattatcccaagaatgcattttctagccttggcatcctttctctcagagtaacctatgaatagtgatataaagtcctattttgccctatactcttatactcttgtccatgcattatgattctttctgattttaactgtgctcctaatgtacagttataacaatgataataccagtaacaaacctaaaaagagagatatttttatttcaaccttaaatataatccctagaaagatttcattccattgaaggagtaatctttacctgtgttttcaccacaaataggctgggtagacctttggaaataataagcagtttgtttctattttgctcaatctttttcaaaaaatttcactatatatacaaggtgtgtggctatttcagtaatatgccagtggatgccaacagtagatgatttggtatcaagatggatgcaagcattggaccagatggagagtatcagacttgtaggagtctcaacaaatagcaaagtcaagaggactggggtggaaggatgcaaaacattttgacaagcatagatatatactcatcagcacacgaagttgaaacagaggtttctgccactgtatgtagcatctgcctagtgagcccctcagcagcaaagaaaagcttcattgtgctagacttaaattctgattcattgaacagtgtagtcttcaggaatggaaggcacccttgtgaacatggggctgagagcaaaatggttttaactaatgtaattaaaacacaaaatgagatttttggccacgtgaaagctagctgcagtgctgtgtgaaaccccttgccatgatctttctttcctgctttctttctgccctcattctgtgtttgagcgaatggagactcagggaatagtgaagtcccagagggacagagctctgttcttgctgaaattacaagcacagagctgcctgggcatgaacatgtagtgtttactctgccagtatgaatacaaatagtcttattatacgggcctctgtacccaaagaccacacacacacacacacacacacacacacacacgaattttttaaaaattaaaggttttttttaacccctttaagacctaacaaaccttagtggaaaagatatgtcttaaacagttgcataggactatagctatgactagtagtagatctagtataggagccacatgttttcctttgtccagtgctttaatagttttgaaaccagaaagtgaatagtatttcttcaaaagattttgagtttttgtcagttctcactttcttcttgttctacagttttccctccttagttgcctattttctttgttctgtttttcttttcaaatgattgactaggattgaggctgagtgttagcttgctgtttctgagcctttgagcttgggaggagttagactgatgttcttttgtgagcagttagtgactaatgcccaggatggctggtgaagtcagtcattggccttagctagattatagggcactgcacaacaggaatgaggttggggtgttagtatcaaactctgctaccaatagcttgaacatacaatggagcatgtccactgagagactgaccaatctaaggatggagtttcagcagtcagaactctgagggacagctgtgcctaagagatgacaaagtgtcagtaggatgtatttcctcgtgctgagcccagttttatcagggcaagttgactttcagctattgcggtttaattttctttggccaaagagcaagtttgtcatgagcctggcactctacatattaccccaagaatgatgtgaagggaatgaacagagctcatgctgatgagatttggagtaaatctgtcctgtcccaaagagaatgggcatctggacagagccttgagaaatagttttattacaaaagaataaaaaattgacctgttaatgttctgaaagccaaggctcaatgtaaatgcattggtgctatgtagacattaaatcatcataatgtggtgttctccaaaagtgacggctctaccaggtcatcattgtgggtggtattgcattaccttcaaggattggagtttctgagtttgaaaactagcacatggatgtaaggagtaagggtaaaatgagagattccttcagagttttcccatgaattgaggtgcttttctccatgatcgaaggcagaaaacctgcacttatcagaccattggctgtatgggtggccagtctttctaatttttttttccaggacagtaaataggtaaaaaggtgatgggaccaggacttggaccaattcagttccatttagttttaggtaacttctttgccatttgaggaggaatattggctgtttcagtagagatgtgacctgcattttgaacatttatgcctgtgtttagagcaggagacagagcttttctgatgctgtattagctactgtctcctttctattttcctagttgtcccttccccataaagaaagatgtaactaaaggagtaccacctaatgcatgatgaaaggtataggagaacacatttttctcattgtcatatttgaatggcattacatttagtatgactttagagtaggaataaaaaagatgtagactaaatctgtgaactacgttacttgcagatagctccaaagatgagttgtccaagatttttcttaatagtttcaagtaaagatgaaaattgaggaaaatgtgattgcagcatagactaaacggatctcatttctagctgctgtgttggtacagtgatgggcactgtatgtaaatacacagctagatgaatgtgtgctgttgagcctggatacagaagaaatgcagctatccaacagttctrctttaccacttctcaattttggaggaattgttttcattttcctgccagtttactaacctgttttgatcttttggtggaagctataattgcaggtggggacattttgagtaacagttcgcaatccagtacagctgcttttcgcactaaatcctgttattaaaaagctcaggctaagatcaagccaagggctgtaacggacttgacagagaacaacttaactttgcctggtaggacaaagaaaatcctagccttcttgagactatgctcttgtttattctgaaataagttactagcattcttttattttatttctttttatcagctctgcgaactagaccagtaatctctaaagtgggcaatgctgaaagatatgttagagagtcaactaccatagtaactttagtgctagtagaaattaggaccctgtttttcttacyatatcagaacatgggcagctttttaacattctgtctcatcatgcctgtcataatgagaaactgagatgagaagacgatgttgcgatgttgtatttggaagcagttataataattaggtacaagatgtatatccaaaaaaggggttggtattcagagactggaattcttggtataaaagtttttctgggaggaaagtatattgaaaattgaatgcaactggggccaggcgtggtggctyatacctgtartcccagcactttgggaggctgaggcgggcagatcatgaggtcaagagatcgagaccatcctggcccacatggtgaaaccctgtctctactaaaaatacaaaaattagccaggcgtggtggcgggtgcctgtagtcccagctacttggcaggctgaggcaggagaatcgcttgaacccgggaggcagaggttgcagtgagccgagatcgcgccactgcactcaagcctggttacagagtgagactccgtctcaaaaaaaaagaaaaagaaaaagaaaaaaaaattgaatgcaatttgatggtcacctctacacacactaccactcttaagaattgtggtagctctgagccttcattttttcagatgggcgctaggtgtcagggtttttccttctcagcagcttagcattcacatgagccttgtgagtggccttgtttgttgaggcagattcactggtgtccttcttttttcagttggtatagtagcctttacctagtgttcctgcaataagcaattgcaattttaactctttggttgaagatcctttgaaccttgcattagggatctattttttttttttaaagaagaggatgattgaagaggaaataaagtagtgtaaattaaagtttaaagactagctgacagccaggcgcggtggcgcatgcctgtaatcccaacactttgggagaccaaggtcggcggatcacttgacgccaggagtttgagaccagcctggccaacatggcaaaaccctatctctacaaaaaaaaaaaaaaaaaaaaaaaaaaaaaaaaatatatatatatatatatatatatatatatatatatatatataaattagccaggcgtgttggcaggcgcctgtaatcccagctactcaggagactgaggcacaggaatctcttgagcccaggaggtggaggatgcagcgagccaagatcgcacgactgcactccagcctgggcgacagagtgagactctggctgaaaaaaaaaaagactagctgccatcatgactggtattttggttttagtcctgctttatgttctcaggggtgaaatggtagggacagtggggattaggggttcagttttagaactgctagcccaactaatacccatatttaattattgttttaattgttggcaatgtactgatatcctatgtctcccaaagtatagcatctcattaatttttttattttaaacatataaaaaaatacacagtgatatgacaaatacccctgcatctactgaccagcttaaacaaatcttaccattttgactgggctcctcacttacatgttactataatcctttgaatctctaatttgagtatcaaaaaaacaatttaggagttggtagggaaaggaagttggtaagcttatataagcctaaaagattagaagaaattaattagtagatccattttgacagttcttaggctggacctcttaacccaaaggacctcttattttagaaaaaccaccataaccctctgtcttaattcacttggttgacattttccataccctcaaaggaattgcttgggttatcctggactcagattctagtggaaagcattatgttctaaaactctgcctgtagagagtgtgtatatgcttacgggttttggtggtgagaaaagggtaggccatttctcatgaacacaggacccaaatatttaacattagattttttaaattgttttactcaatttaacctcaaaatagctccatgaatgtgatgctaatttggatgtactttaccttgcttttgtttcattcttttgaaatcagtttgccttttcatgctgtgtatagaaattgagtcagtgtcagtcttttagatatgtgttagaaaagaggcatatttaaattgtactatgctgaaggtgagttctgaaatagacctaagcgaagcgggtctgtaaaacaggaccatggtctatgcattgattgttcaacttataaaaagggtctttgccattaatctgtccctaaagataggagaatgtttataagtgctttgggatcctcagcagaaaagggtcaaatacatatgattatgtataattatgattatccataaatgattatgattatacataagtattcataatttgtgcttgccttatttttcatcaaggctttgaaaaatcaattttgaatccttgagattaagtatagagaaagatatattatggcatatatggtaagataattttatgttaattctatgtttttgttcttttattcccattctaagtaagtatatttggctgcaagtctttgtctaaaatgatcttccaaaccaaacttggatccctcattagaaaaatatggaggctaattttgaaaaataagtcttcctaccatggaattacttctaatgaatttctgacactgttcttttgggatgtatatacttttctcagaattccttctgaatgactattattggtgttggagatttctcatcaggttgagtagtttttactcatttttttgatagcaaaatgaggctcagtaaccttgattgactttgaaaatcctaatgcatccactggctcactaaagtagtacttgtggagggctcctcagtttctttcaaaaataagtctagagatagccttcaaacaaaagaatgtacttgccagcatatttatacctgtcttaagttgtaagattttactgaaaaagaatgtgacatagtaccctatgtcaagaaactttacagctccaaccagaggcaataatgaacatcaggacagcaacagatgacaccagagaatgaggagtagcggggggcaccagagttcagcactcattcgtatgattaatggacaaggcttctgggactatagtaggccaacttggttaatttccataccaaccaattaatcctgggccccatttctcaaataccgctggcttctatgtgctccactgcatgtttgttaaaaaataattcctatgcttattaaattactgtgtgtacatgtgtaaaattactgtggtttcatgtatataaatgttacagggagaaataatttccctgttcaaaattgttatttctaatctttgataacattttcaaagaattacctctgggatgaaaattttttgctctaagttatatttttcttacccttttatcgctgtttagagaggttgaggtgagtttgttcagccatttttgaagtaagccataaggcttaaaatacaatatttgacttaatttgtgccatttggaaaagccatgctgaaaaatatgtcaatgcctttccatattgtattatttgccagatatcaatgttctattatttagtgttctgtgatcatgtgaaggagctcaaaataattttcttaagagctgaaaaactctttttttcatgcttggatacaagatacaaaagggggaaagaggtaacattttgttatatatctgagaagggactcaagttcagattcctgctctctggatcttagttttctcatctttatgatgcagatgatgcccaagtctgggttagcgctaacatgcttggattctttgtattgctgctcaagggccttgcagggtagtcatcttcctggcattagcagaattagaacaataggttttacagactcttccaaaaaaaactcaagatcattttagcatgaatatagcaaggcttttagcatgaatataacgaatacagcttcaacatctcagccacagcctaacctgtatttaaatctgtatggaaaggtattgttagagctcaagtcaaagtgtggagatgtaagaaaggcagctgtggcaaagatattctctttctgcttcccacagcatagctagagttgatggatatgtctttcacccttaaaaaacaaaatcctggcatgttttgcccttagcttttcctgcaaatttctttgttgagcttaatattgttgttttattttgtagtaacaacagcagctttgggaagtgcctgtgtgtgcttgcacattctattcacattgatagtacaattaatgttgatgtcaattttggtgttaattttgggtcatgattagtgttgacactttgtgtcagactaatggcatttatgggcaccatcagaataaatgttaatattatcatgttttcactatctgttatagtaacattaaaccaaggtcctcccagcagaaaaaatacatatatggatagatagataatgcctttctgtatcgctggtgttactcagcgagaaaatgacatctcagggcagaatcctaatcactgtttggagcatcagaaataatgatcacctctgatcggaggttgtgaataattcatttggtttgattttcacgtcctgtccagtgatacttttcaaaccaaatgtgtttctacaggaaaataatggtcccacttcttatggaaatactgtggcacaaatcattttacccacataaaaacagttaaataagactgttctcttctgcttgctttctccttcccatcccctcctccctcacttgagctgttcattccagaatcagaatgtagccaaagaaatatgttctgccttagaacttgtataagggaaacaaatatttatttctgcttatccttagcttattcactgtrgctcttttcatcctcttccctttttcactttaagataatcagcttaggttgataaccctaaacctaataaacctgctcgttggaatgttctgttatgaaaaatgatctgaaattaaatattttaaaacttattcatggctatagtaatgacaaaataatttgtagtaagtacctaggaccacttgtttagtcagtgcatgagagaggcagtgatcagagaagacgacactggcactgcccgtttgagtctaaaactcattagaccataaacccacccacttacatgcgggctacagggtacctttttgttaatttcttagctcttccatcttccttcagctcttagtcctggcatgtcattttcactgggtttcacctggataaaaatgttggagagaaagagaagacccccaaaaagagggatttaatgatggggtctccgttagtcattattcttcaattaatatacatgcagattgggcttaggtgaaatcaatgaatgtcacattgctaatcacattgtcacactgtgtatacttttatagtgattgtagaattttcgatatgaaatctccattatgtatataatatagatagacccatctatagaaagtaatttgactgaaaaacttaacagtgtactaattagagagtgaaatatgactctcttccaaagcaatgatctaatcctttgagatgaagctattcttaggtagaatattttgaaccatttctcctgaatgttgtaacccttttttatttttcctaaatctaacaagggcagagggaagcatttttcaatctagttttcatcatcagacagaaagtattttgcattcagaaaccatttccagtatcaaattcaattttgtcaggtgattagttgagttgggtagagaataatttaaaaacacaaagctggaaatggctatggtgcttctacactggaggagagctgttgctattctcaagttgcaagcttcctctcagtgactgtgcatcacaactggattattgtgttgtatgtctttgcagctgttacagacctgcatctgttgacaccatgtgttcctacccaggactggtagaagaaataggggagtgggtgaatgagtaccttccctgcctatcagtgcaaacgtccttttatgtacatatgtttgtaaagttctttagccctcttcaagatgaaaggttctgtataaataaaagctttcgattttagtacatgtttgtaatacatgtggtacagtcctaaatatgtatttagctgatasgcactgttcttgtctattgtacaaatattgactttaaaaatataaatatgtatttaaccatcagaccagaaaaacactgaagcagttacttctgaggtagagacattaatattgtataaacctatatatacatatgtttacactctaccacatcattgcagagcatttctttttagaaaatgaaatgataacccaacaaactaacgtagttcttgatatttctttctctttaaagtgagtcttgatttttaattttcatacatttatctctttcaaattttatataaataagatcggttgtagtatgactaaaatctagaattagttcctctaaaatatgggaaatcaattaggctggtgagatttttttccccccttaaatttttttttttgttatggaaatgctcaaacgtacactaaagtaggcataaataatataaactcccatgtacctatcacccagtgaagagtatttggtagttttcttttctcagttattttttattttataaaaagttaaagttatcaatgcaatataaacacaaaaaagaaaatttggagaatggaaaaaaaatacaatttcatcatcccaataattatcacctcattttgctgtttcttatttatttttgtttttaccccgcaaagtgcttttcaattgatgaagttgtcattcatactatgcacttactatataccaggcactatcctaggacttaacatgtatttaatccttacaacaaacttatgccgtagatttttattacccttgttttaccagtgaaggaactgaggtacagggaggttgataacttaccttagcgtatatggctagaaagctgagtctcagttctgtcaaattatcttagattcagattcagagtctcagaatgtggctcctgagtctgaacccttttctaatttagtattacatcatgggtatttttaaatgctattcatagtcttcatagtcatcatcttataaggctgtacagaacactaacagtgatcttrctatccaatttacttccctccaaaataattttagattttcaggaaagttacaaagatcatattagagagttctggtataccctttcccagcttctcttaatgttaaaacactttatgtaaccatgatatgattaccaaactaagaaataaatattgatacaattgtattaaataaaccacagacctcttttttttttttttttttgccagtttttgtactaatatctttttaattaaggaacatacttccttaatttctctagtaaagaaaatgccatttcttggctgggcgcggtggctcgtgcctgctatcccagcactttgggaggccgaggcaggtggatcacctgaggtcaggggttcgagaccagcctggccaacatggtgaaatcccgtctctactaaaaatacaaaaattagccgggcgtggtgttacgtgcctgtaatcctagttacttgggaggctgaggcaggataatcacttgaacctgagaggcggaggttgcagcaagccaagattgcatcactgcactccaacctaggcacaggttgcagcaagccaagatcacgccactgtactccagcctgggcaatggcctgagactctgtctcaaaaaaaaaaaaaaaaaagaaaataccatttttgtgtatgtgaaactccttttaaaaaataagcactttgggaggccaaggcgggcggatcacaaggtcaggagttcgagaccaacctggccaacatggtgaaaccccatctgtaccaaaaaaaaaaaaaaaaaaaaaatgcaaaaattagccaggcctggtggcatgcacctgtaatcccagctactcaggaaactgaggcaggagaattgcttgaactcgggaggtggaggttgtagtgacccgagatcacgctactgcactccagcctgggtgacggagcaagactccatctcaaaaaaaaaataagtaaacaattcacattagctataaggacaggttacttaattcctctgtgccttaatttcctcatggcaataattacagctacctttgaattaatactgactaccatttgagggcttttgtgtgccaggctctgtactagtttaacatggtgttgctcacaacaatacctccagaaaggtgctgtcatccccattttataattggaaaagtgaaactgtaaaaggttaagtgtccaaggttatacrgctagcataaaactgagatttgaaccaagacagcttgactttgcagcttaagctcttaaccactatcagtagttgtcaacttttagaacagtacagcagatagtaaatgttcaattaatggtagttattatgatagctattgttatttttaaaataaaatagtttaagaatattcaggactcttattctatgattcctaaaatataagtggcaatgttctaagcccttggtgttaagtatttttcaagtgttatttttaaaagtgaggcagggtgcagtggctcacacctgtaatcccagcattttgggaggccgagacaggaggatcacttgagtccaggagttcaagaccagcctgggcaagatggtgagaccccatctctacaaaaaataaaaaaaattagctgggcatggtggtaacacacaygcctgtggtcccagctacacaggaggctgaatgggagaatcacttaagcccaggaggccaaggcttcagtgagctgtatttgtgccactgcactccagcctaggtgacatagcaagaccctgtcttaaaaaaaaaaattaaattgaaaaaataaaaagactctggaactagcaaacatttattactcccagactatgtttaatgttcctgggaagcactagaggagatgctataatcgttcaagatggtaagccaaaagcaatcctaggcagcatataattagttatcagaagaattctcaggctgggcaaggtggctcacgcctataatcccagtaatttgggaggcctaggcaggaggatggcttgaggccaggagtttgagaccagcctgggcaacatggtaaaatcctgtctctacaaaaaaatgcaaaaattggccgagtatggtggcacatgcctgtagtcccagttatttgggaggctgagatgggaggattgccttgagcccaggagttgaaggttgcagtgagccaagattgtgccactacactccagcctgggtgacagagcgagactctgtctcaaaaaaaaaaaaaaaaattctctacacagaggtcttagtaggagatcagaaaagataggaattactttaggctgggagaagctttactgaggaaatggaatttggatgaaccttttggaatgggtaagatttggacagagtgagaggagaggagagagaaagacaaagttttttacgtagaagttaatatagtagatttctgcttctaatagtgtgtttatcaaacccatgggtattattttcttaatttcgcatgtggggacattgaagctcagtaaaattaaataattttcttaagatcacacagttagttaatataagtgatagcgcctggatttggatctaagtttgttggactccaaagcccatgttcacctttatatgccctatcctttgattagcagtgaaatctaaattattttaatgtaaattgaataatagtgctttcttagatgtttgtccatcatgctacctcaaaactgaatgtcttctgatcaggaatcttgctgcactgagactgggataacactctccattctgtaatggtactttttaagatggggggcggggcggggtggggaggcggtcgatgagcaacatactttggaaagacattgataaagaatagtgtgttcttggtgctgctgtgctgacacctaattagaagtcaatattgcaagcataatgacctagccaattgctgaacttgctgcccaagtgacacagttagagtccccaggtagtaatgaaagataagagtattatttgcctgcccagtgccacatggtcrcaatgtttacattagcacacaaatgctgaagtagattcttcagggcttgtatctaagctgcttctggcctatgtgcctagggttaatatatcataaaatttggtgtaaaacgcaatctttctaactacaaatgcatttagaggaaaattgacagaaaatagcttttcattcctgaaaaacaaaaggtttggggttagaggggcatgtgtgaaggcagataaagcatttctcctcatgcagggattatattaactagcttcttagaaaccacaaccaaaattatcctgatatttgagtgttcactgtgttattttttgaatgatctatttttccttcctttctctgtctttaatgagtagatagagtaataccttatcttagaaagtgattggatttttttctgtgtatcatatccattttgacttgtatttggccaatggtatgatatattaaatagcttatatttatctgagggtgtttcatatatatatttcctaatgctgagaatcacaaatagctgtgtagaatgcttcaaccagcctgattacagtggatgtgcaattggattgaggaatgtgtactcagagcttatgatcactggcctggttgagtctgggtgatgcatgtggctttccagggatgccgctatttacatctgttaatggcccttcttgatggccagctccccaatgaggtgatatgcagcagcctggggatgagggaccaaggctgcagatgtggctggggctccattaggcaggaccagggaagctcatctggtaggtaggctttgtgtttggtggcgagtggtgggggcaaggaggggggtgagagacagaaagaaagggggaaaaaaagaatggaaaacattacttatccaggtataggggaaacaggcaggcagacatgaaaaactacagctgtaactagcgtatgaatgaatagcatagaaaagaaatggaactagcaaatatacaagtagaaggattgactagttctcatatagaaggggattaaaacaggagagggctgtgagagtttgggaagagacatgtcacctctgccttttaagtcaatatcatttatttgtgtagctggccagatgctgctgaacagagagcagagatttacatatagtgcagcaagagattagttatttccatcctttggtttttctggtgctagaagaaagcaagagatgctcacaaggatgcaatgttgagcattggtaaattctagcagaaatggaacatacctgaaacaaatcagtaaagagtgtttctgttattcctatcaaatgctagaggacagtacaaggagcctggatcatgaaaagtgtacagtccgtgagacgtcatcctttttctgcttccttgtgtgttaaaggtttcttggaacaaatgtcacaaaagatggaaatagtgtctgtgatagtccatttgtgttgctataaaggaatacctgaggctggataatttataaagaaaagatgtttatttttggatcatggttctgcaggctctataagcatggcaactgcatctgttgggcttctgctaagggtctcaggaagcttatgatcttggaggaaggtgaagggggacccagcacatgacatggtgagagagggagcaagagagaggtgagagggagcaagagagaggtggggggcaaagtgctacactcttttttttttttttttttttttttttttttttagcaccgtgacatttttgagttaatttaagccacacctgggtgagagggccctgcacctagaagaaggtgttgggactcttggtggtgaagtatggcttatgctaaccatgcaggaccccatggggcagtgggaacttgatctcggagtcatggaactgtttgaccgccagctggcagcacttgctggccgcagtctccaccttcatgatctgggtggagtgggcctgtgtgtgatgccaggtgcccatgtctcactagcactggatgacagcacccatggtggtcaagtcctgatatccagtacatgttgtaggtgctgctacgggagtcgtagtgcagctagatgccagatttcttcacctgcaggggggatttctcaaacacctacctacagtagacaattttccctgaagactccttatcttctttagctgagataccaagtaccagagacgggacttgacaatgacatgattaggtgcaagattcgcataccatagaagggcagcatgtggcatttgggggtgggcaggcagcaacccaccaccttgtactcttgtagtgtgcccaaggcgttcatagcactctcttcatgcttgctttcacccacaagaggccacactctttcaaacaaccagatctagcataaactcagatcaaaggggagcaccaagccattcatgagggatccaccccatgacccaaacacctcacaccaggccccacctctaatgttaggaatcatatctcaacatgagatttagagaggacagacatccaaaccatatcagtgtcttagtatatatggcagtaaaatgagatatctagatttaatcaacagtgccatggcattcttccacatgtatcctgagtgcatttagattttgrcttttctgtcttctttgagcaggcccaaagaaggaattgagacagttttgaaatacacagtagaccagctgttctcagcataatctagcagtatactagaatgtcttttgtagtttcccacagggagtttggctctttagcaatgtgtatctttacataatggctgtgcctaggtatactctgataycttcaatgaacctgaaaaaaattctgcctgtaagaaacttctgttcatttgtttgtttatgcctttccagattggcatggtagcttggaaaatgacctttaaaagtcctgaatatccagaaggccgagatatcattgttattggcaatgacatcacataccgaattgggtcctttgggcctcaagaggatttgttatttctcagagcttccgaacttgctagggcagaaggtattccacgcatctatgtatcagccaacagtggagcaagaatcggactggcagaagaaattcgccatatgtttcatgtggcctgggtagatcctgaggatccttacaaggtacacactaagagcatatactacttcaaggtgctatatggttatgctacatgtgtggagaggtgggggaagggtagaggtttaagttcaaaaatcaccacttatggtaaaaattaaatataaacaaaattatttgtgaaaattccttaagacaccatattaaagacaaattatttctcaatatgttcacttggtttttcttccatctataaaacaggttgctgtttctttggttgagcactagatgaaatagtaggtatgcatttagtgcgagacatgctaaatcaaaaatatatatctttatttaattgtggcttccaggacttacggtcaattatcaacaaaatcccttacctcctcatcttctgctccaacctccttgttcaccttgagatctgtctctcctctaaagatattgcttcccccgtagccctctgaagtactgactgatttctgtctttcttttgaaccactgagcctggaaggggaatattgtcctccttgatcctcattgctgcttccagacacctctcccttctctctgaaaaaatcccatctttgaatctcatgtcatcagactgtgccatacccatactgctccttgtgtttcctgatcctttggtcactccctctcattctttgcatcttttagttcctggcacattgccactctgtccattactaatagtcatgtgataattcttggtgattgctatatccacatagatgattcttcccataatctggcctcttggatccttgacttcttttcttctagtggttctgtcctataccctagctcagcctctcattccccataatctcaatttcaagtatctctttctttgctaccccctccatcctctctttccagcttcctctctctagtccaacaatcctttgaaatcatcagtaccattgagttgaactcacctgtttatcctcccacctttcttctgttcttcactccctccttacacctcatttcattcctatctggcttaaactccaaggtcagtccttgattaatcattataatcaccatcttttctgcaccttcaactttctctctcaacttgcttcaacttgcttctctcttcactctgcttactctgtgcttttacagagtgtttaaatccaactctctccattctgctcccatgcctgcacctgcccagctgaactttgatggagaaaaaaacagttctgttgactgatcttactttaaattcaagcttagcaacctcctggatgacggtttcacatctctcccctcaaacctgtaacacgcacttccctctccccactcttagctgatatcatcagaccttgcttcccaattttcaagaaaagagaaacaatgagaagagagcttctacaagcttccatgtacctgcatccgttgtgcccttactcttcaccttctcttccacactttgaatgaatagttcctacttctgtctaaagacaatccctcctcttgtacatttgatctcctttcttgctaacttaagtgtacgatcaacacttcctcctgctcttttgtgcatcagcactttttccctctgtactgtatcagcccttttagcatacaaacacccctccagtcactgtccctcccctccttccctttacaggaaaattgttttaaaggagttgttcttgctgtctccagatgttcttctcccattccctcttgaacccacttcacttgagcttgcacccttaccattccactgaagctgcttttgtcagggtcaccagtgattccatattactgaattctatggtgaattctcagtcttcaccttagttatttgacaatagcattagcatttgacacagttggtcattccttcatccttgaaatactttcttctgttggcttccaagagcccaaagtctcctttttatcttcctgcattcctggctcctctttctcagtttcctttgctgcctttcacatctttaaatgtaagagtatttcaggagatgatggaaatattctatattttgattgtggtggtggctacctaagtacatacatttgtcataactcatcaagttataacacttaaaactgatgaattttattgcatgtaaattatatttcaataaagttcatagaaaaactttattaaagtatgggaattgatccagtacaggggtttttctggggctgatgaaaatattctggaattagtggtaatggttgcaaaacatctgaatatactaaagtctactgagttatacatttcaaaatggtgaattttggctggttgcagtaacccagcacttcgggaggccgaggcaggcagatcacttgaggccaggagttcgagatcagcctggctaacatagcgaaataccatctctactaaaatataaaaaattagctggtcatggtagcacacgtctgtaatcccagctattcgggaggtagagaggcatgagaattgcttgaatgcgggaggtggaggttgcagtgagccaggatcgtgccattgtactcagcctgggtgacagagtgagactaaaaaaaaactttaaaaaccaaaatgtttaattttatgttatattaattttatctcttttttttttaagagacagggtctagctctgtcacccaggctggagtacagtggcacattcatagcctactgtatctgccaactcctgggctcaagtgatcctcccacctccacctctcaagtagctgggactacaggcgcacaccactacacccagctaattttattatttttcataaagacaaggttttgctgtgttgcccagacttctctcaaactcctggcctcaagtgatcctcccaccttggcctccccaagtgctgagattataggcattagccactgtgcctggccagtttttttaattataaaaaaaagtgaatggagacatgtcaggagcacagaggctgcagcaggaccaagaagttctggactccccattctcaaccccactaggacccaatgccctctcacctggtggtttggcaagacagccaatatagaaagtagggtagaaggaaaaaagtgattcaagggcttggtccctggactactcctcttttcctattcaccttcccttggtgatctcatcctgtttttttgttttgttttgtttttttgagacagggtctcactgtgttgcccaggctggtgtgcagtggtgcgattatggctcaatgcaacctctgcctcctgggttgaagcaattttccagcctcaccctcctgagtaactgggactacaaccatgcaccagcatgcctggctaattattttggtttttgtagagatggggtttccccacgttgcccaggctggtctcgaattcctgagctcaaagtgatccgcccatcttggcctcccaaagtgcaggaattagaggtgtgaaccaccgcacccagcctcatccagtcttttaaagctttaagtttcatgtacaagctgataaacttccaaatttatatcttacccctgaacacaagattcatatatccagactcaacatctctacttacatctgcctaaatgtctgcctaaattgtagcttctaatcttcctttaatgtgttcttcccacagtcttctgtctcaacagatggtacctctattgtttcatttgttcaagtaaaagaccttggagttattcttgacttctgtctttcttgcacaccccacattcacttccacaccccattcatccatctaaacagtaaatcatgtttacatccctaccttaaaatatatccagaatctgagtacttctaacaaattccacagctacttactagcagtagcagtagtctaactcttcttacctgcatattgcagtaccctcctaattggtcttcctgcctctggccttgctcccagccccacccaaggtctgttctcaacagaatgtagaatgaggccatgtgtggtggctcatgctcatgcctgtaatcccagcactttgggaggctgaggcagatggatcaacttgaggtcaggagttcgagaacagcctggccaacatggtgaaaccctctgtctactaaaaatataaaaattagctgggcattgtgacagatgcctgtaatcccagctacttgggaggctgaggtgggagaattactttagcccaggaggcagaggttgcagtgagtcaagatcgcaccactgcactcctgcctgggtgacagaaggagactctgctcaaaaaaaaaaaaaaaaaaaaaaaagatagaatgatctagttaaaatataaatcagatcacaaaatttttctccacttaaaaccctttaatagcttcccaattcattcaagtaaaagccaaagatcatatagttgcctacaaggccttacatagattggctttccagtaccactctgccctcatttcttgctacagcctcccctgaccattccacacattggctctacccgactctgctttcttaaacctgcgaagcacatcatgcctcagtgcatttgtacttgctgctccttctacctagaatgctttttcctcagatatcctcatgtctcatagcctcagctcctttaggtctttactcaaatgacacttttcaatgaggctttccttggttattttttctaaaagttcgactgtctaccttctctttcattttgttttccttaaacgttattcccatttacattatacattttacttattttgtgtatttcctgactttccgagtaggaggtatgtttcataagggtaggaattcttgtctatttttgttaattcctgtttttccagtgcctggaatagtaccttgtacataataggcactcagtaaatgtgtactgactgacatactaatgacactcagtgctgtcaggcattctcaacacaaatcatgcaagaccaatcgcagatttatgtcttttccrtgttgtgctcactgtgggacatacatttattgagttaaatggtgggcataatttctcatagtatttaaaatgcttccctgtgtttacttatttttttgactgagtgactaattcacttaagttaaacacatataccatgtaactctactttgtatgtggctgtgtgtatagatacatataaatcaattatgaaatgttagtataattgtttacatgtaaatgggcattaggagttgtttattgaaaaaacaaaagatctgagttcagtgttcactattagcactgtgtagacttctgattttaatattgaatctcctagatttgcggttttctgttatcccttgcttatatttattttgatgatcctgtggatttgagagagtgaaaaatagtaattcacacaattctttaattacatgttgatatctttaatagagatgtcactaaagatcagaaaatgaccctttaaccctgttgaaaatgaaatgaggccgggagcagtggctcacgcctttaatcccagcactttgggaggccgaggcgggcrgatcacgaggtcaggagattgagaccatcctggctaacacggtgaaaccctgtcgctactaaaaatacaaaaaattagccaggcgaggtggtgggtgcctgtagtcccagctacttgggaggctgaggcaggagaatggtgtgaacccaggaggcggaacttgcagtgagctgagatcgcgccactgcactccagcctgggcaacagagtgagactccatctcaacaaaaaaaaaaaaaaaaaaaaaaagaaagaaagaaagaaaatgaaatgaagggaatatacttggaattgcagctataaggtgtcttgtttcaaggacagttagtgagtgaaaaaataggcacttcatctttcaaaggaggactgtctgtgctagtattctgttagacagtaaacctaagaagtgatgtggcaatttaaagctagctgtggaacaagcttcattatgtatgctttgctgtatcttctgattatatgacaatggcaaataatgagttaaaaactatttrtgcttcacagggatacaggtatttatatctgactcctcaagattataagagagtcagtgctctcaactctgtccattgtgaacacgtggaagatgaaggagaatccaggtaggtatatatgtattggaataatttggtcatgactaaagaaaggagaatatggtatttttttccatattgtacagctgttcataaccttgaagaacattgaagatgacataatctagatgttttaggtttacatccagctctaccacttattagctgaagaaccttgggttattgattgaagtttttaaatttataatacttaattcattttagaaaaactgaaacatgtaaacaattataaagaaaaaaaaaytagccacaatcccaccttcaggccacgattatgaatttatgttatacacttgctgtcttttctatagacatatcttttttctatgtgattgagatkataacaagaatttcttttataatttatccttttcactaaaaactatttttggggaaatttcgtgtattcttaaaacattatttaagaatatgatgcttaatgtctacatagtattttattataataaatatatttgaacattcagactatttctaatttttcacatcccttggctgaacccacttaagggacatttatataagtttcatataaacttttaggaattaaaagctctgatcatccctttttggttaatttctagaagagaaattgcaggtcgaaaagtcaatttttaaggattttaaaaaataattttaaattgccttcccaagatttgcatttctgtcagcagtgtagaataggatttgtttccctctttaatttttcttcacccctgccaacattgattattatcaattaataaaatggaataaaaatggcaattgttattttaacttgtatttttgactcccagtgaagttgaatgtttttatataatctatctgcaagtatttttaagaatgttaattgcttggctgggcgcagtgtttcacgcctgtaatcccagcactttgggaggctgaggcaggcagatcacttcaggtcaggagtgcaagaccagcctggccaacatggagaaaccccatccctactaaaaatatacaaattagccgggcctggtggcacatgcctgtaatcccagctacttgggaggctgaggcaggacaatcgcttgaacccaggaggtagaggttgcagtgagccgagatgacaccactgcactccagcctgggtgacagaacaagactccatctcaaaaaaaagaaaaaaaaaagttaattgtcctaatactatttactgaaaatttactcttttgtgtttttttgttctgtctgtctgctcttgggctaataccacactatttaaactattctagtgaggcaaattttctcacatttttaatttttcctcaagtattattggctacttttgctttttttaatgtagagggtttttgtttttagagacagggttttactctgttgcctaggctgggatgcagtggtgtgatcataggtcactaaaccctcaaactcctgagcttcagagattgtcccatgtcagcctcccaagtagctgggactatagacaggtgccatcatgcccagctaattatttttttaattttagagatagagtcttgctaggttccccaggctggtctcgaactcctgacctcaaataatcctcccacctcaacctctgaagtagctgcaatgacaggtgcaagccactgtgtttggctagagtctcatgtttttctaattccaaaaaagttccataatgattttgattcagattgtattgagtttacacattaatttaagaagtgacatcttcataatactaactttccccaaaaagaaacagggtatgtttttccatttatatgagtggggttttttttgttttgtttttacgttttgtagttttcttcatataggttttgccagaggttcccaaactttcttggttcatggcatccttagtgtctcagtaattttttcatagcacccctgggctataagatatacttaatatttctgcttattaggtagttaaacaataagtatttgcgtcctaagaacttaataatcatttgaaaaaattatatacataaatcgaaaaaatttattcttaaataattacagtttcttactaatgagatatttgtgtctgcataacctctcaaaccttggaatcagcttggatatagccacccacatttcttgttcttcattgagttttcacagaaacttcaaaaatctagcttgcaaagacaggacattttcaaaaggaatgtagcaccattctaacgttaaactgtgaactactatgaactatctaaagctagtagttcacatagggtcacagataccacatataatagtgcttctctcaaaaatttaaaatatcttgtagtgcttctgggagttcatcatggtgccctgagacacaatatagttacggtgagattctgccaatttcttcatgcttatttctaaatattttgcattttttcttgctactctgaatgggattttcccctatgatattttttaactcttcatttctggaatctatgaatattgagtttgttacaggcaagtctggctgggtccttgaatatttatgactatatggaccttatacaaacaggcacacaaacacatatacaattaatgtagttaattaacccccttaagggacagtagcctcatttctgacataactttaggatagagtctagatacagaacaaaaggaagaactgggaaattattggatattaggagaggctaaaaatagaaaggcagcagaatctgggaagcagagatgcaaagtcacagaccaacagcaagggcaaagaaaaagaattgatggagggctggaaatgaagaagggagcaggaaaatatgggggcaggaggaagtattttaagagccactatggggtacttatttattatttcaatttataaaactgtgcccactgccaagccttctgggtacacgtggaacaataaataatatatgcccatctctacttccaactttgtatttttcctttcttttattagttgcattccccatctcccatttcccattatcagctatcactcctaatcccctgccaggaagacagatgagtgactcccactagatccacaggatgctttctggacaacttggtcagcatttcacttctacacacattccaccttcccctccagaggacatatccagggacccttgtgtatatacttgatatttatgaaggagtatgaatgggagttcagtattttgacctttgcttcatcctaccttagaagaggatttttgacttgagaaactaagctgagcattctcactaccgctctgtttggatattctyttcctacgtaaaattgtctaaaattgttgatatgatgccttttgctcattatagagatatacattgaccttgcttttaagaaacttgttctagaaaataagagagggcatctaaaatccgagggccatctataacatcaaaccttttccttgtttgctttagtttaactttcttgtcaacccttagaggtagatattattattcccattttgtagaagttattattatttctagagtcacactcctgtgtgtatcagagcaaggatttaaatctatctgcttggccgggcgcggtggctcacacctgtaatcccagcactttgggaggccgaggcgggtggatcacaaggtcaagagatcgagaccatcctggccaacatggtgaaaccccgtctctactaaaaaaaacaaaaattaggccgggcgcggtggctcacgcctgtaatcccagcactttgggaggctgaggtgggcggatcacgtgctcaggagatcgagaccatcctggctaacacggtgaaaccccgtccctactgaaaatacaaaaattagccgggcgtggtggcgggcgcctgtagtcccagctacttgggaggctgaggcaggagaatggcgtgaacccgggaggcagagcttgcagtgagccttgattgcaccacttcactccagcctgccaatagagcgagactccgcctcaaaaaaaaagaaaaaaggctatctgcttaattccagatttcgctctttctattaaaccatgttgcttccaggtaaaataggcaccaagctaagaaggaaagacatatgaatgaagagtataaaaggaagcacataaagccctggcattaaatataagctttcaatacacttttagccgccttttattggtgattattcttttaatggcttgttgttactgtgtttaacattcataatttgacatggccatatccaataggtacaagataacagatattattgggaaagaagagggaattggacccgagaaccttcgaggttctggaatgattgctggagaatcctcattggcctataatgagatcattaccatcagcctggtaaatctttccagaatgtgaaatttttgaagaactggctgtgtggctaggtttatttttttctcttatcactgctattcagtcccaaatgagagcatttcttgaagattgtatgtctataattatattttaatcacacatgataataggaagataggataatataaataactgaatttttcaaacaaacccagcactttgttttagcttttagtgtaacttctttttattttctttcttttttttttttgagatggagtctcgccctgtcaccaggctggagtgcagtggcacgatctcagctcactgcaacctccgcctcccgtgttcaagcaattttcctgcctcagcctcctgagtagctgggactacaggcgagtgccaccatgcccagctaattttcatatttttaatagagccggggtttcaccatgttggccaggatggtctcaatctcttgacctcgtgatccacccgcctcagcctccaaaagtgctgggattaccggcatgagctaccacacctggcccctctttccttttttttaagagacagagtcttactctatcacccaggctagagtacagtggtgcaatcatagctcactgcagcctttaccccctgggctcaagtgatcctcctacctcagcttccaggtagctaggactacaggcatgtgccaccacctccaactaatttttaacttttttgtagtgatgggggtctcactatgttgcccaagtaggtctttttttttttgagacagagtctcactctgttgcccaggatggaatgcagtggcgtgatctcagctcactgcaacctctgcctcctgggttcaagtggttttcctgccttggcctcccgagtagctgggattacaggcacgtgccatgacgcccggataatttttgtatttttgctagagacagggtttcaccatgttggccaggctggtctcaaactcctgacctcaagtaattcaccagcctcaaccttccaaagtgccgggattacaggtgtgagctgcctcgcccggccccaaggtagtcttgaactcctgggctcaagtgatccgcccacctcagactcccaaagtgctaggatgataggcatgagccattgcacccagcctgaattttgcatcattgtattttcttttctttgaccatgaaatttgtgtgtgtgtgttgttgtcaatcaaatagacttcataaaaagcaatgtttatttctgttaatttggattttacttatctatgccttagttcttatagcttcagagaggacataaatatgtgacatgtagaatttattcttttctaaggtgacgtgccgggccattgggattggggcttaccttgtccggctgggacagagaaccatccaggttgagaattctcacttaattctaacaggagctggagccctcaacaaagtaagtttctagggttttgaagaagtatgcatagctgattgaagattattgtgtgaattcttaattcaagatcctgattggaaggaagcagttcaatccgtgccttcctcagtctatctcttcccctctccctccatcttttctgcccattgacttgcttgcctttttattcattcattcattcattcatttcatttatcaactattttgagtacttactgttttctaggcactgttccaagccctgtgtatatgttagtgaacaaaccatataaaaccgctgctctaaagtgcttatgttttagtgtcgttgtagaaagacagaattaattgaacgcttctgttctgtcccacttctctctttttcttaatctattagtaaaagatgtgaggagatctatacacagacattgagctgtctctgattccagctgtgctggttcccatttcaggcctacatcatgaattaggtaccggcctaggtgttgagactatcaagttttaatgattttgtgaaatctgtaaatacacctctcgaaaagggcaccgatggtggtctcttgtatatagaagaaatatttggcaaatattgagtgggaagatgggtggatggatgcatggatgggttactgggaaagagtatgcataaagatttatcttcccttccaaagaaagatttgtgcctttttagtccaacttcacaagggtttttccaaaggggaaaaaaatggatggcaaggtcactgctcgaaagagtgaaaactatccaagaatacctgaatgtataaaggacagtgcagttctgacatctttgcaagcataggaaaattattttctcttcagggccagaaaagtataatggaatattctgaggctgactgcccttgtgcaacttatataacctctcagctcctcagctttcttatctgtcaaagggggataataatttaaacctttaaataatgtggagctcaaatgagaaaacataagtaaaagtacctagttctactgggcatgcctagattcccagctactcaggaggccgaaacaggaggatagcttgaacccagaagtttgaatccagcctgacaacatagtaagaccccatctcttaaaaaaaaaaagagtacctagttcttggcaaaaagtgttggcccacattcaaatttcagtttcccgttcctctctctaacatgatttggtgattgagcttatggagttaatacacatactaaattgtatcagatattatgtttactccacttgcaggaactttttatcaagtcttgactttcaagtttaagggtaagaattaagtgttctgtcattcccatttaggaaaaagttgataattccattggtttaattagattttgtggatgtcagaaattagaggaatcatttgatgcgatcagcttgctctgtgcattcatatgaactctgtatcctcctctgggcttgcttttctcatcaaggaaaggcacagcagtgctaacagtggcgaacttggctgtcttcctccctttttggagagtagcctggaaataaaggttgtgaaccactactactgaagattattattgcagtgggagaaactgctgagagtcttaaggttgttgttttttttttttttaagttgctcttttggataccttcttaggatgagatattgatgaatgccaaagataattttaggtaccattatctatgagaacagaatttttgaaagattttaaaaattctgttctcatagataatggtactttaaaaacctatatttccatgatgttcccatacccagtcagagagctaatttctgaaatatatcttcttatattgagtttctttctcccccctgccccgatactatattatatacaaagaatattacaaaaagcagatgttgggtttttggttttgttttgcttgaaaacttgctagttgaatttcatttgtgccatgaagaaacattagagattgatttcttaaaatctgattgaattgttctaatcaaattcattatattcactgtcatagcttacagggctgcttgttaaaacaaaagcttagttacagggtgaaagataaataaagctatagctttaacttaccaaacaatgctcacttccaaaagggcatatttgtttttagctgaagggagtgatcagatacagaggttacctaatgttgctctgcctgcttcactatcttcatgtcagctcctcttaagtatagagctgtgctgctgaagacacccgattttatgcaaattcgttcagaatatcctattagcccctttgcctataaggtatgaaaaaaggaaactaccatgctcagatggcttcctctgactcactccttctgtgtgttgtctttgtgtgtgctggtgtttttcttcatctctgtttgcctttctttctgtaggtatctctctgtattgtgtactttgggtgtgtgcaagtcaccctgagtgcatgtctctttctgtgtgggtgctgatctttctgtctctttgtgtctgtgtcttgcgtatagatccccctctttctctgtctgtgtgccgccctgtgtgttcatgtgtgagaaagtctttgtgtttttgaaacattatagagcctcctttcttaagccttggccattttgctcatagtatgtacctgtgtaaggtggaaatgtaggagacatgcaagcttatatacagtcttagactgtaaatatttgacccccacatttttgagtcttcatcctttatgttaaacattggggtgaagaataaggagtgggggtgttcagaggttgtaggggaaaaaaatcttgtgtgtgcaagtgccgatcctgttgacccctttgaaaattgaaataatgataatgcacgtctcctgactgcatcaaagtatcagcacatcaaaagccaggaggcatgaaatgcaaatgataaagtgaaagcagatggattgtgcatgatcgcctgatgcccaatgaattttaaaaggtgctggtttgcaggaaggggggttggggggttttgggggggactgaaataaacacgttatccctgcaatttttttttgttcttgatgctcactcctgacaatattttttcacacttgagtgaacaccctctctctctctctcccccctccttcttctctccctttctctctcctctccaaatcccctcctctgccccccccttcccccccacctcttacacatctcaggtcatgtcgctgcagctccggtggaaataataagatataaaccacgaggttgttatttgcatagaaatagcatggagccccaggcagcaagggagaaggacacagggatgatttgtctaaaattttaatgaaaacttttgctgaggcagagatttttaaaaactttctttctccctgcttttccccttccttcccctaccccccaaaccccatcattgattttacttaacatggttcagtttgaagagaaaaggttgacactccacatatcatactcccataatgcagcaacctgtaaattgtttcttcctttaatagatatgaagctgaagagacatgcattttcaacttaatacattgcatgtgtgcgcctggcttttatggctatactccatcttggcatacacatgatgttgcctgtcattagcctgtttttaattagtttacaccttcctatcttttgcttccaaagactcttactttttaaaggatttctttttatagccaacagtagtaaccttcatataaaataaatattttctggtgttttcctgtttttttacttttggtggtttttctgtatacttacatgttttattcatggacgccatcctttgycactgtgtcttttattccaaaaccaggaagtgcttcccaccttcgtatttttatccttttccccctgtgaactcaccatttgtgtatcttctttccatgtctgtcttgctttgttgcctgcagttatttgtaaaatattcaaaatattacccaaattgagatgagttgtagtatctggattttattgagtgttactaagcacatttgacattagaactaaaggcagtaggctggtgattagaagcagcccaagtgggtttgcttgaaattcagtcaagaatatctgtctggttccttgctatcttctggaatgggctaatggtatcagggctatatttcgtagacaggaaggcaaaaacagaagggaaagtgacttagtttcattgagagagactagatcagggtcagaacatgaactttcatgtccctaagtttcactgaagaaagctcaggcctctttgcttagtggtctgtaaagcctaagagaaggtggtccggtcgttttcctgtttgtccaaatgtcgtgagaatgatgacattaataagagaagtttctaggggcttgctatttcatgtcactcaaggtagtagatcctaactctaggaactgtaggctgtgggtgacagattccttaaaatgcctcactgcgtggcagacctgatgtgtgtggcaaattaccctgcttgaagggagtcatgctggcctggcaaaggcagtaacctgtgtacttggggaactgttaagatgcacccttaaggagctgagatgattgcagagtcataaactcttaagtctatttgccactggacatttgcagagatgatcatatttacttccctcctcccaccactcttcctctcagtttcctttttactttatttttttctccctttcctggtaaaagtattagtatgtttaacatagtgttaggtggcagataggctggraagagctagtattgtaaaggaacactgatgtgtactggagcctactagctctcaatccattgccccagacttggggagagagagcacattmtctatccagagaaataagaataygcagtttatggttgtcctgtggacattaactgactgtgaaggtaaggtatatgccaaaggcagtgatatgcaggtgatagattcaccrggagatgatatgtgacttttcktgtattttaaagctctgcttcttttttagaaaaaaaaaaatcctatactctcatcccccttagcgagatcaggcccctatttccactgaatctgccaggaaaaaagaagttatgtgatgggtatgactagggccattagtttggtagggggctaattctgctaatcttgcttttgagacttggtgcaagtaagttacatttctctctggttctcatatatgtatttttctgcagctatgcagtatgaaatgtgaagttgtcatagctgactctgttaggcacagtaccagagttcctctcaggagtgggaattgtctgttacaccagggacctgcactgtgtagtctccatgctcacccacccatgactctgtgaaacacagcatgaaagtcatggaggctcaagaagggaaggagagattacttagctctcactgtggggcgggcagcattgtaactttcacataacttaaagaggttacgatagagacagcgccggggcaagcgagagccagacaggcactgggtgactctgtgcctcgctgtggaaaaacaactaaacatgggcaaaggagatcctaagaagcctagaggcaagatgttgtcatacgcattttttgtgcaaacttgttgggaggagcataagaagcatccagatgcttcagtcaacttctcagttttctaagaagtgctcagagaggtggaagaccatgtctgctaaacagaagggaaaatttgaagatatggcaaagacagacaagacccattatgaaagagaaatgaaaacctacgtccctcctgaaggggagacaaaaaagaagttcagggatcccaatgcacccaagaggcttccttcagcgttcttcctgttgtattctgagtatcgcccaaaaatcaaaggagaacatcctggcttgtccattggtgatgttgcaaagaaactgggagagatgtggaataacactgctgcagatgacaagcagccttatgaaaagaaggctgcgaagctgaaggaaaaatacgaaaaggatactgctgcatattgagctaaaggaaagcctgatgcagcaaaaaagggagttgccaaggccgaaaaagcaagaaaaacaaggaagatgaggaagatgaagaggatgaggaggaggaagatgaagaagatgatgatgatgaataagttggttctagcacagatttttttcttgtctataaagcatttaacccccctgtayacaactcactccttttaaagaaaaaaattgaaatgtaaggctgtgtaagaatttttttaaactgtatggtgtcttcttttgtatagttaacacactaccaaaagtgtctttagatagccctgtcctggtggtattttcatagccactaaccttgcctggtacaggatgggggttgtaaattggcataaaaattttaagcaggttcttattggtgcacagcacatgtaagttatatatggggttggtagttttttcattttcaattgtctctgatgcagcttatatgaaacaattgttctgttaactgaataccactctgtaattgcaaaaaaaaaaaaaaagttgcagctgttttgttggcattctgaatgcttctaagtaaattacaatttttttattagttaaaaaaaaaaaaaagatgttatgagcatggagaggctagagccaggctgcccaggtttaattcttggctctaccacctacttagttgtgtgacctcgggcaatttatttaacctctctgggctacagttttattaactgtaaaagatgagtaataatagtatctgtgtaccagagtcgctgtgagaattaaatgagccaaaataggtaaaacattggcactgccatagtcttctctaaggttcatttagggttccttctcattgcaatttcttatcctggttctggaaaggaaatacgaacacattattctctatactttctgattctttgaaggcaaaaatttcttcmagaaaatgttagatgacagtcctcactgtggcagtacattcatgtattgactttcccaatagatgtatctagcaacaatcaacgcactttggaaagccattaatgtgagaggcacgatgttcagtcgtgacagggtagtatatatgtcagtcatctgtctacaagagtccccaaggactcgttgatacaatagctcataatcactctaaggatcagtctagcaatttgcatttttaaaagtccctaactacctattttcacaatagacagtccctgtactcccatagctccagatgggatcactctcctttctaaagagggcattttagcttcctttctgagtaatccttgctttagcattatgaatgaattctcagaaattattgcacaatggacagatctccctaattttcaagcgctccctccccacacataaaatattggtaaatctggccccatttggggggattattttgtttgtttttcattcaatattcctcaagtttggtagaaaactataccaggttatgttttgactctattagtctgccttagtgacctgccaacaatcctgagtgctctggtttggagatcttgcagggtggaatcgccacacagagctccactgcagaagttgtctctgactctaagagagcccatgcatatatggtggcttagagtctaagaatttgggagaccctacagcaagtaccagtccagagcttctagataaagtgaaagctctgagactctatttggggcattgaatacagactcggaaattatcatgtttgacaacctattatgaatgtgctcaaattttttggagttacagaacctttagattaaaaaaaaaaaaacaaaaaaaacaaaaaaaacttggccaggcatggtggctcatgcctgtaatcccagcactttgggaggcagaggcaggcggatcacctgaggtcagtggtttgagaccagcctggccaacatggtaaagccctgtctctactaaaaatacaaaattagccaggcgtggtggcacacacctgtaatcccagctactcaggaggctgaggcaggagaatcacttgaacctgggaggcagaggtggcagcgagccaagattgcaccattgcactccagcctgggcaaaaacagcaaaactccatctcagaraaaaaaaaacaaaaaacttttgattgttcttctccctgacatttactaggtaagcaactttgggctttaatctatttagatgttagtttcctctttgtgaaatggaaggcataatacatttcccattttaaagtagaaaatcaggttggcgtggtaatcctataatccaagcactttgggaggccaaggaaggaggatggcttgaggccaggagttcaagaccaggctggccaatatagcaagaagcaagaccccctctacaaaataattaaaaaattagccaggtgtgggggtgcctgagatggggaaccgtggaacctttggcagtggcatccagggctgggaccatggccgtgaacagggcctgggccccacagagctcatggaggcaaggctgagggcaaggaatggatgaccaagttgggccacctggtcaaggacatgaagatcaagtccctggaggagatctatctcttctccctgcccatcaaggaatctgagatcactaactttttcgtggggacctctctcaaggatgaggttttgaagattatgccagtgcagaagcagacgcgtgcttgccagcacatcaggttcaagatgtttgttgccatcagggactacaatggccatgttggtctgggtgttaagtacttcagggaggtggccactgccatccatggggccatcatcctggccaagctcttcattgtccccatgcacagaggctactgggagaagaaggcccacaccattccttgcaaggtgacaggtggctgtggctctgtgctggtgcgcctcatccctgcacccggggcactggcatcatctcggccctggtgcccaagaagctgctgatgatggccagtattgatgactgctacacctcagccaggggctgcactgccaccctagggaactttctcaaggccatctttgatgccatctctaaaacctacagctacctgacccccgacctctggaaggagactgtattcatcaagtcttcctgtcaggaattcactgaccacctcatcaagacccacaccagagtctccatgcaggggacccaggctccaactgtggctacaacacagagtttttacataagaaaaataaagtgaattaagcctgtttttggtttgcttgttttttttaagtagaagaccagaggatctcttaatcttaaattctgttcaatatctagtattctgtgatgctataaagatgcatattgatctgtagccagggaactgttttaggctggggagtgaatagataggaggtggggaatttttaaagttattgcgtattagggtattatatataaaattacatattagtgatatataaaattattacatactcgtgagaccaggaatggaagttgaagagcatgatgatttaaaattttttttaattttgtttcttatccagattacagaaaagtaaacactatatgttgttcacaatcacaagtggctgtagaattataaatcttgagagtgggaggatcctcaaaagttcaaccacacaattgttgtgtgaatctcctctgtgacaccattgctaaatattcacccaattatgtgtgaaaaattcaactgaatgggagctgagtacttttggagccaatcccattcatctatgtattcatctgtgaattcttttttatatttggctaaagtctgtttccctgtacagagactgatcactctttaaagacagtgttcaaatttaacaaagaaactcccagttttgtgatatgaccaattggaaattgaatggaaccaaaatctttctcatgtacttttgtgttcagagtctggtcttgtctcaagaacaaatgtagtgaagatgaaaatgctattccaagatagaaaagaaattggattcataaataactttgccagttaaaaatgtgaaataagtagaagaaacaagagaaacagttaaaacttaattccacttggaagtactccttggaaccttaggggtctcctgcagtgccatgcagtaccttcggagcccgattatctcctgctttctcctcctctgccttgttgaaagtccagatcctgaaataaggttggaggatatttctttttgactgctatatttgtagataccagctaaaactcattgggcctaagatttggtggaatcagtaaaggtgatgtagacttaggtactcaaaccccaagggtacacaaacacaagctaaactgctagaatgtattaccctcttgcctcagtgaacagtctctggctcacttcatccatgtggaccttcattatatctctaccctatatccattgtccatttccacctccagggttctgatgtgtcctgagtattagaatgaagaaatgcctctacctcacactttgggtggcatgtagggtctctacactgtctgtttctaataaaacattgtctctgaactcaagctaagggcccacttagctctgtacacacggttccttaggaagattggtttcttcgtcttcttcattttatattcagttgtgtgttayaccttcatatgttgaattttcttcacctgtctctctttctacatatattcatagctctgtctttgcagatcagtgctcacttgaagctttgctactctgtcaacccctctcctctcttcagcctttcttctcccccaaccccagcctgaagcccaagtaaattagcttatcacccctgccccctagttgtaaaaaaattcccgtactcctccaacagtgtctattcttggatttgcagtcagcaaccatctccaataaccatcaggctgtcagctttgcagctccctaccacctcccacctcccccattactcaccagaagaaaaagagagccagagcaagagcttgaaatatatcatgcaatagtgtatcatgaatttgttgtgaatcacagtggtgaagcaggtttatttatttctgagaccttaaatcaatacaaagtaggtctcttagttctgaagctgggatggagtgtgaaaaaatgagcccattgtactcttacaactttggggaaaggagatgacagctatataattccatttaccaggcactaggggctttaatgtgaaggtgacagggagctctttgtgcatttagagcaccatatcttctaaataaaagatctgtagacttgatagtggagcatagctccaagtttaataatctccaagcattagaccgagccaatatgttcccaagtcagaaaggtcccccttaacactcataaattaaaagtgcaagaaccacacgttagtagattagaaatgcaaggactccagtcttttctagaaggaagacagagctgggccctggctgtgcacagactggtctatgaatatgataaagaagcggaaatgagactgtttagaaacctgactcctagctgttcatcattctagggaatgttccctgtgcatggatccaaatctagctatgtcccttctcattcagattggccatcatcacacagtctaatcagctaatgtacacagtcaggaatattgaattatgaaaggagaagcttaaagagctttttagattgaactacagattaccatgcctgggcttcaagattttctggctgatttttgaccggttcctaattttaataatgtctcagtgtctgggatttaagccttctaaaatagtatgcgcgtctaagaaattgagaaatcagtgttggtaaggaaaagaacccacccaaatttaaccaacagcataagatgcaaatatgagaagtcaagaccattggaacatgtaatcaacttttgagtaacttcattttctacctgacccattggtaaaatatgcctttctcaatagataaagcaggtttatgcagctcagaagagcattcctaacataatatgactttatagtacttagaattactagtttaattttagcccatgtaaagaattttgacagggagggagggagaggggcatctacattggggaaaactaaaaaggtaggaaaattgaaccactccttttgcttcagaaagccactacacattataacactaatatgaaagacttattttgcttatagtggtttaacttgctgaacatactaatcggttgaggttttatagaatacatagaaatgtggtagatcacatgcatttattgcatgcctgttaggtataaagctgttcttatgctgtggcaatacaaagatgattcctgctttcatggagctgaaatttagctaaaagacaataataggcctttcatgtgttctaaaggaaaaaataaaattgctgcccatcagacgtcaatgagaaaacacaaaccaaaaggccacagagatagtaagtcagtgctactcccctaagagcgaggccctgcaaacaccatactcttggggcctggacactggtgagcaatgcagtcagtcacagcctattcagtaaaaccagtaggaggcgactgacaaacagggatttttttaaaagttttccatctttagaaaatacataatctgataaaagattggtatccaaaagaattctcaaactcagtaagaaaacaacccagtaattaaaaacatgggcaagaaatttgaacagacattacaccaaagaaaatataaggatggtaaataagcacatgaaaagatgcttatcattagtcattagggaaatgaagattaaaccacagcttgacaccactaaatggtgttttttgttttgttttttgttttttgctttttttttttttgagacggagtctcgctctgtcgctcaggctggagtacagtggtgcaatcttggctcactgcaacctccacctcccgggttcaagcgattctcctgcctcagcctcccaagtagctagggactacaggcatgtgccaccacgccccggctaatttttatatttttagtagagatggggtttcaccgtgttatccaggatggtctcaatctccttacctcatgatctgcctgcctaggcctcccaaagtgctgggattacaggtgtgagccactgtgcctggcctaaatggtttttttttaatgtttgacaaatrccaagtgttgatgaggatgcaggacagctggaactctcatagattgttggtgggaatgcaaaatggcacagccactttgaaaaaggttgggcttttcttaaaacctgtacacaaatgtctatagcagtgttatttataatcctccaaaagtgaaaacaacccaaatgtacaccaacaggcaaacgggttaccaagttgtggtacttccataaaatggaatattactcaggaataaaaataarctactgatacctgcatcagcatgaatgaggcttagatgcaatatgctaactgaaagaagctagattcaaaaggctatgtactgtatgactccatttatgtaacattctagaaaaggcaaaactactggaacaaaaagatcaatggttgttaggggtggagggagggaagggaacatgaggagactttgggatgatgaaaatgctctctatcttgattgttgtggtggttatatgactatgtgtattaaaattcacagacttgtataccttatgatggacagttttgctgtatgtaaattatacttcaataaaccagactttatttaaaatttttaaaaattggctgggcatggtggctcatgtctgtaatcccagcactttgggaaactgaggcgagaggattgcttgaggccaggtcttcgataccagcctagacaacgtgcaagaccttgtctctacaaaaaaaaaaaaaaaagaattcctgtttggaattaacttatcagaaatctcaagtccctacctacatgagcagttggtgggtccccctagggtgagtgattacttttggcagctttctttccagaagcctgtgcttcttctcatacatttagcaaactattgtgtggctcctctctatcttttacattacaaatgagtctctgttccttacccactccaccttcaaatccttattgtctttctgctgtctaattcattcctctgttctccactgagccctgtacctcagtaaagagatgtcttccagtgttatttctggcctatattcagcctctttttggctgtttcttttccttccactgacagyaccacccctttgccccagtttatccttcagcatacctgatcacttcatgatttgctgcttatagagagatttttggtcttatagcaaatggtcttgaatccagctgtggctcatgtcagaggcttttctctcttctgcccacagtatgtcaccgagccccttctctaccccaaccctagcctagcacctgccagccagcactccagtttgccagtgacagtagtggcaataaagtggggaaaaaattataacsctttgcctatgcattaagaaactgtattttggaacccccaaataatcttgttggtcacataggtcctggttccatctccctagagatttaattccattcacccttggatatattcctgaagaaacattgacacagtgatatgtgcagcaccacttaaaattgttaattggagattgaattacttgtcagatttttaaaatgtagtcctctcaggtcagggaggaggatattagctgcactgagtagatgagctattgcatttttttcttctccttcctcctttctctccccctcccttttcctctctctcatccttccttctttcttttgtccctattttaccacttttcctctactcctgcttattctttctcatatctgttctctttcagctttagccaacctttatcaataacctgacagatcccagagtgactttaatatctagaatcatggatgaagtccagtgatgacaattactcagtaaatttacaaaacccctcctcaaatcctcttgagaatggaaatgtcctaataagaaggaggattgcagcgaggactcagcttgtgtagcctaattcttagatgcaggaggaattttgtattccctgcttccttaaatagatgtcctgacccaccgagcattgtttaaagagggggaaaagactgaataaagaggargagaaggaatagatttcattttttattccatcattgatatgcatgataatttttcacatcttcagcacatgattgcaaatatttgcctataagtctaagggtccccaacataatgtgtatgtcaggacaaaggcaatttttaaaaaattgagctaagttgcatctgtgaaacttggaaatctcaatgcctgtgctgacaaatatcctgacaagtaaatactgcactcattcagtattacatagtgatttcatttgcacaaaacatcacaatgctctgccacttcagtcaaacgtctggagcatgggggaaaggaagtacgtgtttatcttgatctccaaaaagggctttaagggagagagcaggcggtatattaggctgttttcattgcctgtcagctgtggtaaacctgagctgtctgcagtgtctctagataagcagcagcagcagcagaggcctgagcatggacgtatgactgcattcatttgtacttcttatgtatctcaacatttctaaaggctacgtagcatctttggtggagcctttaacaattgtgtctctgctaatcaccggcttttatgtggtgcccttaattcttaggtccgccggctgcaatgaatgaagtactggatgaggcttaagtttatattgagaatgagtcaagatcctctttcctctcagattcagcccttattcaattctgtcagcatggcactcttcagcagaggaccccaaggtggagcccattcctaatattgcatggtactgcttctccacttagatctggagggcaagaaagtgaggcctcaggagaatcacctctgtttgactcactcctgtgtttaaatgattattgatgcttgctggacagataaattaaaagtttgtatcatacagtaagtagaatgtaagaggaatatatttgggaactgaaacacggcaagaaatgcgtaggtcaaagtttaaaagagtgttgaatgcagctcacctacttcatgaaaatatgttgatgagagttgttgaccccaggtttttctgtagaaggtcagcagggcaaccttgaggaagaaaacaatggttctgtctatgtggactccattcgtcttcctagatactgatgagggtttgtgtaactgttatagcatgatcatttcacagttaggcagaatggattttatcctaacccagattctgcttccttggttggagcttttgttgtgaagtattctaaaatcattaaaaccacttgagtcagcaacgacccctataaatcaggagctattgtgtgcgccctcattctactggcgcatactccaaacatgtggtcattgaagatgaactggagggtactgctttctcttcaccgattgttaagtagttatgattgttagcatttgtttgtgattagtggagcagtttcatttctgtgcccatccccaccctaccccccatctcccaagataaggctggtcagagagtgatattgggatactcttagtctattctgtaatttttctccttaatttctgaattaagtgaattttctcacatgacaaacacttctttagctcagaaataatgttcttggtatgttaagccctggttaggtttcttctaaacataggaaaggagagatgtagaaatactgctgccttttcagaacaatgccaaagcatcagaacccgagttttagcttgtaaagagaagagtactcagttattgagcctaccaagtttgcctcccattattttgtaaaaatatggggtagaatagataagtggcagaggatcacttttaaatgaggaggcaaagacatcagaagaaagtatgtttaaacagctgagcggtccctttttctgagtgtagttcttcattggtccattattagttttggagatgtgtaagattctaagtggttggacattatcaggtattagagataggaagaaaatagtgtttctgagtagaaaatggcccagctctctcttctgggcaacaaggagtacttggctcctgacctagattgtgaatatcagattttcagggtcagcacagtgtctccttttgtattccttttccccctttccaattttattttaataattaaaaatactgctgatcacactgaatgccttctaacagagaggcagtctgtcccagaaggaccagttgtgggccatcgggtttatgacgaccataaaaccagagccagatcagagcgtggcctctgtaagtgacagggtttctgcctctaccaggctcccgcatcaacagactgctttggatatttgctttggtttggattttttgttctgttttgtttcctgatgcatgtgtgagtgtgcatgtgtgtgcacatttaaagatataaatgaaacaggtatgtaatgccctctgcctgttagaaagactaaagccataaaaataacaaacggcgtgtatttgctagaatgtcaaagttatgagtttattttgtaatgatgtgctcctgccttcatgaggtaaactggccgtggcggaggtgttattagtaatatggactcagcagagcagaaagctgagtgaccgagagatcagtgtatcagtcagagagagggcaaatggaaagagacagcaggagaatgagaaaagagccgcagtgcctgggctgagattaaagacggactgagaggcggatgggagctcagtggtcagataccgtcttccctcttcacgaggctccttcaaaggagctgccagcatgttgctcagcttggggctgcctgtaaaggcttgttctctgcgcttccttatcaaggaaaacagtaatctgagagcaattttgctttccatattcctttcagaaaagtatcttatgcccttcctagctgaagttaaatggaatcaaggccaattgggtcacactgaggttattactttggtcaccaacttcctccatctttggaaggtcccgatgggggtgctgacccagcatgcaggggaacctctcaaagctcctaacaagaaggggcaaaatgggaatatacaggcagactttgctggcccttagttagttagattctccccagagactgaaaatgaatacacgtacggaagaaattttgtattgtcgttattttttaaaggaggagrggaaaggaaaaagaaaaggtaaaatacagtaagcgctctacaactgtttagagctctccggggctaccttagatgactgacaattactatacactcagcagtttgcaatagtcagtgatcaggctgcccggcttccatctgctgggtcagaaaacctccttccctgaaagaaattattaaccagtcttcaagggaaaaagaaaccctgcaatttccaagtccaggaatatcttttcttcctctttttttcttctttaaaggaaactttgtggtttccaattgcaggtgccctttgaccttacaaggattaaattcctccagggatataccagggattgaggccctgaactccctggagcctgggaagggaaggaggaggggaagcatgcttgggtataaatcacagccctgcacccagcacacaaagaagacttgagactcaggggttcatgtatgtatcatgagttgcttcaggtttttgctagctttagggcttgtgcgtggaggccagtgttaggctggtgcaaagaggggggcnnnnnnnnnnnnnnnnnnnnnnnnnnnnnnnnnnnnnnnnnnnnnnnnnnnnnnnnnnnnnnnnnnnnnnnnnnnnnnnaaatataaggaaaaaataatcctttttaaaaatgaggaacctaagcccccagagtttctttaactgagacttgtcactaaatattgttgaaagacaggcatgttacctttttgtgtctgtgtgcaaagagacttgcacacaatgaggtagcctatgcctctgggtctcagcctcacccaccactgcagtttcagctgagggtggaagtatgctttgcctatctgtggcagctggtggagagaaaggggcttgctggttttaaaattgcaaccatgaatgtgattgttaaaagtattttttgttttttttttaattttttattttatttttattatacttcaagttttagggtacatgtgcacaacgtgcaggtttgttacatatgtatacatgtgccgcgttggtgtgctgcacccattaactcgtcatttagcattaggtatatctcctaatgctatagtaagccctcttagcgcagctggcagcgcgtcaatctcatattttttgttttctaagttttctttttaggaagaagattcagatagtccctcagaacaaccaacccatggagactgaaatctctgttttgtggagaaaagaacccattttagtgcgacttgtgaaatcgacyatgcctttatttctatagagacaaatgtcttttctcttgctcttttctctaggtcctcgggcgggaagtgtacacctccaataaccagctggggggcatccagattatgcacaacaatggggtgacccactgcactgtgtgtgatgactttgaaggggttttcactgtcctgcactggctgtcttacatgcccaaggtgagcccttcctacccagcactgacatggcctgcagagcctgtcatttccaccacagctcactgcctctgtgtttaaggtcttgtctttatggtggaggaatttttttataaaatatttctctgaaagctattgatttctcttttccttacagccatattttgccttctacctttaagatgtctctggatttcatttgttgggcccctttctaatgtcttccagccacggaagccctcatggcctacctaaggctcagatcccagtatattaaggttcctcctcattgtgggttttctcctctgtaatagccattcattcctcagaggagcatcccagaaagcatgggcacactgaaatcaagagtcaaaacacaccactttgtgccagcctcctaaatgagactattgacctatacatgttccttggggcctggcacatacgtaggattcttccagctgaagattgggactattgggtgcaattccatacgtgggccctgctgyctttgtctrtaactattgttgctgagttggagtctagggctgtcgttcactgattgctgtgctctcttccaatctccttttagagcgtgcacagttcagttcctcttctgaactcaaaggatcctatagacagaatcatcgagtttgttcccacaaagaccccatacgatcctcgatggatgctagcaggccgtcctcacccaagtatgtatatgtttgaggaccccatggtacctggctcttaagcttttagcgttcttttcaatcactatccaattcctgaacaatcacatgtgactaagaaaacagaggtaagtacctagaaatgagaaagacctgaaaaccagccctctgaagaaaaaggtgggaaatccttcatgaaaaaatgaaaaataaataaaatgacatttcccaatcacccattaagtcaagcagtgcagtcacgaatacatttcttctgtttattctgttattaaagcacttattacttaatgggttcaaagactttaacacagttcaatataagccataaaatcataaaattataggactagaatcttcagtcatctaatccctacaaccaaaagagattaatcagtttcgttttagcacacgtctttgagacccttcagtgtagaatatgacttcactcttctcagcaagctctgagcacccacgctgcatgtgcccttcttatgatattggtaatggtattggtacttgctttagtaagtaatagaaggctactttgtaagttcatttattcatgaagagattgtccagaacttttaattatatagatacatggagtgagaataagctctccctccagatatatctaatctactgctttgtcttttacctaacttagaaacaaaacaggaaaaagaagtaactctgtgtacattctcatttgtcagtccatttggctgttctagcaaaccttacttatcaggaggttcttttgtggagcaccaaatccctctgctgtattttgaatccattttttcaaactatgtgaggaagcatttgttcttttttgcatatttattgcaactatttcaaagaaaggctatatataaaagtagaagagattgcagaaggtattttattaagtgtaaaagtcattgtgatcttgctgaaagagaggtcttcataaggaagacctaataaacttttgtgggtacccactgtaagccaggtgggactgtaaagcacttccacatcttttttgcacttacgacctctcttagataaagagagataactattttacaaaaatcagagaagttgagtgattcgtacaaggtcacatagctattatatagctattacattgtttttctacaatatttacattagactttctattatataaaaacatgagagaagtgtttattttaatttataactttacctgttgtcttcagtgcctcttcttgttaattttaataaaacgaaatagtttttctttacatgcctggaaagtccccatactaatcttcttcctaccggtttttttttttttttttttttttttttttttttttagatggagtttcactcttgtcctccaggctggagtacaatggcatgatctcggctcactgcaacctccgcctccacttaccccttctttccccttttttttgtgccatgattatgataagaactatgagcctaagattacctgtcagtctttttttttttctttttcttttttttttttttgaggcggagtctcactctgtcgccaggctggagtgcagtggcgcgatctcggctcactgcaacctccgcctcccaggttcaagtggttctcctgcttcagcctcctaagcagctgggactaaaggtgcatgccaccacacccagctaatttttgtaattttagtagagacggggtttcaccatgttggccaggatggtctttatctcttgaccttgtgatctcaaagtgctgggattataggcgtgagccaccgcgcccggccacctgtcagtcttaaaatgcaggacttttctgggaatgaagtgagcctctttacttctagaatttggaacaagacttagtgagttttttcctgggaaatacgggaagccatcttagccggcttctaaggttctgcatcggaactgggtaggatctactctctggggactgtgaagcacaactacaatagtcagtgactcctcctacccctagcaggagagtttttaaagaagaaaacatttccatcttgaagttaattctgtagttccaaatccctgttattgaagtaagaattagaaaatgatccaaagatataaagttaaaattcagtgttctgatgaacctagaaatttggtttagaaacttcaccaaaatttgagtccttctttcatgggtgaacagaagtatgtgtgtgtaggtgggcattatcctggccattattaatgaaatccacagaataaaatgaaatttttgataaactaagttttctgttttttggataatattttttcattgactccctagtaattcatcctgctgtctatgtgcagctaacactcgctcccaaatcgagtgacttcagattttaatttagtggaagcgttaaagaaagcagatgattccctgtgataagttaaagcagatatcttctaggtgaaaagttaaagtcatttattagaggagatagtgctgtgatattcttcaaactgacgcccaacacaagaccagaatctaaacgatcggctttgggctcacggatggagagataattttgaaatggatgatcacattttacactggggccatagaggcaaggaatgtagaacacagtaattacaagtttagtctagataaaacactctccatcctgtttaagtcagcagaggttagcttgctcagatctccacttttaattggttttggacttgggtttttagggggtggagggccatgttcaaattagaagaatcactgaaaaccgtgagctgagagggcaaactaggaaacggttatttgcagaagcttttatggggctttggtcaaacatttatacctgtggaacaaaagttttttttttaaactaacatgttgaaaattttgggtcttgccagtgaaggaaattctatgtgcaaggaagattaatggcattaagtatgtgcatcttaaccattgtatttttactatctgtcaagaatatgtggcccttttttgtagaaaggttatactttatcagctgtttaataaagtagatatatcttgttgcttttgtagcggagaaactgagttcctatttttccctccaaatttggatccttatctgatcattaatacttattgtttggttgttttyagccttcagttaaaagaaagtcagtggaatcaaacaaaattgtaaggcaagttttaaaatagaaatagacattttgaaaatatctttaatgacttggcagccttttgacaaatgtttgtagtgtcttgaagaaagtcaagttatttatttaaaagcatgcaaactctctctgctagctaaaccttgtcatttaacaataaatgatgcttttgctgataaatgattctttttatgcagactagcaaatgaaataggagatgatgtctgaaggcagatgaacattcagctgcctaatgcttccatctattataatttggttaaaaacaacaaactccccaaaataatcccccaaaccaccttaaattcgtcagttccagcacattgtcaatggattcactgtccttattctctgttttctttctttcccttctgtagcccaaaaaggtcagtggttgagtggcttttttgactatggatctttctcagagattatgcagccctgggcacagactgtggtggttggtagagccaggtaagagctcttttgttttggcagctctttttcctcccaactaaaaataagaaagaaagagccatggctctatagatatataccaataatgttctctttgtctgaactgtctgagaatattggattatagccatgcccaaggcaaaataattggagtgctggttctcagttgccattttgtgtgtcactccaatgatgcgtttaatctgaaggctaattttgacaacacttcctttttataatgtttcaggaaaaacactttgggagctgtaaagcccaactacaatagccagagcccaccaatgactttccctctcccaaagacaattttctttcaggaataggtgacaagtgattcagagactcatctgcttttctatgtaactggaaagaggttcttcgtggcaccgagattatttaagtgacaaatgtactatattggattataatcagatgtgaattgccaaaaaaaaaaagtttacctgaaacaggagtaaaataagctgaaataggttgccaagatacctatatttttgaagtgggaaattgaagtttctattaaattttaatacctactctaagaagtgcttcactcaacagcaagctctgtgcaaaataatctgtagtgcttgctataacgagctataacgagcacctgccacgactgatcttaatctacttctgcactgcagagacatgctgctgagkgaccgcatctggagctcaccttcctctgggggcaatcagttttccttatcttggtgaaaagtggcacctgctcaagattctcaaacatgccacattgggttgagatttagattctagccttgaaaataattctaggctctgtggttctctcagtacagcaggtcagcacgcctccatgctgcctgtgacaagaagccatcagagggyraatcccacagacagggtcttcctctgtgactctgaataggattctggcctggagtcagctcagactgaatgtcccagagcctacctgtctgttttctttaaagtctcaggtcttttatctcaccccaggcttctcagtcccagtgagaagtattctctgtgcctggtaaaattcccagtggggagcttggaagtaggagatacactggagcgagaaccctgatactcgactcctgtatcagcttgttagattcctcacggcacactaagaccaacttttttgagatttgtctcatctattctgcttcaattttcctgtctgtgaaaaaacatgacagattttaagtctcagaaagccaaacctttgttaagttctttaagatcctcccatgggaaataagagaaaaatactttacacttatgattagaagaatagggattgctttgcgaccaagatcagtcaagcttggctttggttagctctgtcattgtttattgcaacactcactctgacttcctcctttctttctatctgacgagttctgggcttcttactccaaacgtatacacatactcacaagtatataaaacacaaatggagctctagcttctttcaaaagcaatggcatttcaagaaataaatataaatgtattcgtctgggattgttactgtaagtgctgccaaaactcatctttggtatgtatgtttggaatatgtgtgctattggctgtaaattgtcttttattattccatggcaccttgtccagggacacactataaaacaagatgtagcatcttcatgtgctagcctgataaaatttatatgaagtataatagaaaacagaagttgttctgagctgttttcaagttcaataaataactgtaatacttggataaagatgttctttattaggtcacatgggccctaatatataagttataagttaccgatttagggtggcttttgcaattacaagtttccagttggattgttaatcattgtgaacagaaatatttctaaaccctcctgtgtatctcctgctcgttgtctggttgtctagagggcttttgattctgattcagtgcaggcaagtgacaagggggtgggtggtctccactcaggcccttgtcagccctcttgtgatgacaggaatccattttcactagccaatttaacaaccaaaggccatctgtcatggaaaagtttgttatggagatgctgtgagaaatgagagactataacccatcccagccccaaccccaaggaatgcaacagtgagaatgaagactgcatcacattttccagagtaaagactcaccctgtactttgtcttgctctctgatttttcctagaaaatctttatgaggaccaaattgggaagtcatagtggagtataaggtgcagaggctttgagctcctaaacagttttttaaataaacatagctttgagattaaatatataattctaatatagacttcaccagcattactactaaaaattatccttgtcccatttgtcttttccaaggaaggagaaaattaagggcttgttgatccacttccctattcttggcatgtgtttctcatcatcctcataacatgcctacatactccctatccacacacctaatagtaagacctattgtaccctcaaatcttatctggaaccacattattaatattccatagaaaactacagctccatttcagcaaggtcagtcctcattaaaagttactgaaagtctcagattcctactgcctttcagaccatttcctaccatcttcaccaaggagatgctctagagtgaactgagaaatttcgtttagcagccacaggggtagggatgtgtatatgtgctaggctgttgagtctaaatgtagaggctcccctagaacagcccttggtttgaatttatcttgtgttgggacatttccgaatagaagtgattctgagggtggtttcccaccatatttagagagtaaatatcaaatccgtagagtctcacatttaactcatagaagaatcagatttcccctgctctctgtgtttgtttctagttttttccccaatgtcttgatttgggattggaaaacaaatggctagctataatgttgacatacattgggttcttatgtgactcatgttttatcaggctaggaggaatacctgtgggagttgttgctgtagaaacccgaacagtagaactaagtatcccagctgatccagcaaacctggattctgaagccaaggtaggccacctcaagtacactgggggctgtgcttggagggtttttctcttcgcagtgcctgtgaatacatcaggaacattgcaaaccatcagttttagagggaagggcatcagcagccttgaatgattttagaacatcatgtgctcacttttaaggtgagtctaaacggactagaagctaaattctgcctcaaaaattaaataagtctttacagtagtcttcttgatgctagaaaacgtatacttttgttggggagatggtcttacagaaaggtagctgagataatactgaaggctctttggtcccctattctctgagtatacacatggaagagctacagctagagttaacggtgaagtctgccctaatgccaagcgtgaacaccacagcccttttttttgagacatggttcatggcccaggctggagtgcagtggtgtgattttgactcactgcagccttgacctcctgggctcaagggatcctcccgcctcagcctcccaaagtgttgggatgagccactgtgcctggtgccattatttttttaaaggatggattatattttcacatcctgacaccattcagaaagtgaggggtcagggaggccagggaggaggctattcagcagtgtgacgtcaattgtctatttgttagccacagtacaggaaaatgctatactaagcacaaaggtgaaaggactgggagactatgtacaattgacttgctttaaagagtagcacaatggagccattttaagtagcttttgagaaacctagaacaagggttcttaggactgcattcttcccttttgactacagagttaytataatcaggacttaaaaagaatagtatttgacaaggtcaaagatcgaggatcctttcttcttttttactccaaacatgatgatcttgatgaacaatagtttttgttgatctgatttttagttttcagttttaaataagtaaaatcttgttcaccttggagagatttccccctggagctgtgttgttaattgtgtcttctttgacttttcctaatagataatccagcaggctggccaggtttggttcccagattctgcgtttaagacrtatcaggccatcaaggacttcaaccgggaagggctgcctctgatggtctttgccaactggagaggcttctctggtggaatgaaaggtgactgggctgcctgtgggctggaggggcatcactgattactgggcactctgcggcagagggagggtatagattcagcagaatctgtgggtgtcctaatagcctaggctttttggggattctgccctctctgagacatcttttgagttgcaacttgaatggaaaaaagtacattttataattccatacagaatttcagaataatctactactagtgttattgaggtgacctactgttgtggatctcgctctcacagatggatgctggaccattctgatggtgctggggaaatatgattgtgactctgtccctcttttctgggcatatactttgttggtgttactcctaatgttctrcagtgaccaagacagatactgaaattagcatttactggaagaaaatgaacaaattcagtaccagaggctgttcagtaccagtggcaatttgtgctatgttatattattatctaacaacagccctgggcctgtggctccagcatattagaccattattacaaaggctctactccatgctatgggaattgctaagtaattaggcagccagtatcaccatttacggagaaaccttgatgtgtagagcgactgtggacactacagggagagccaaaggaaacactacctcttacagtagtgaagccctctgtcccatggccagataattcatggccatgctaagccagagactgcatacctggagggtatgagagtatgctaagtataaattccatctgtcttggggagaatttggggttctaaagcaataggatagggccaggcggggtggctcacgcctgtaatcccagcactttgggaggctgaggcaggtggatcacttgaggtccaggagtttgagaccatcctggtcaacatggtgaaaccttgtctctgctaaaatacaaaacttagctggcgtggtggtgggcgcttgtagtcccagctacccgggaggctgaggcaggagaatcacttgaacctgggaggcagagattgcagtgagccaagattgtgccactgcactttagcctgggcaaaagggtaagactctgtctcaaaaaaaaggaaaaaacagtaggataggttaggggaaggagggaggagtagaaacttttggagtaaatagtgattagaaaatgcttaggatggccaggcgcggtggctcacgcctgtaatcccagcactttgggaggccgaggtgggtggatcacctgaggtcaggagtttgagaccagcctgtccaacatagtgaaaccctgtctctacaaaaaatacaaaattagccagatggggtggtgcatgcctataatccctagctacttgggaggctgaggcaggagaatcacttgaacccaggaggcagaggttgcagtgagccgagattgcaccactgcactccagcctgggcgacagagcaagactccatctcaaaaaaaaaaaaaaagaaagaaagaaaaagaaaagaaaatacttaagacatacaaaatgtgaaacaatgaactctcaatagggcacttaaaaatagcttagggcagaagcacccccagcctatgagggaggaaatgcctggggaaactaccagatggtcagttatgtggcaagagggatttgaaatttttgccgacaatttttccttactcgtctaggaagagccctgtatggccaggcctccttggcaaaatgttgactaggttgattgtgtgtgtgtgtgtgtgtgtgtgtgtgtgtgtgtgtgtgtgtgtgtttggttgaaaagtttacctttgcctgtatttgctggagaactaccacattttatacttttcttgggggagacttggactatatatccaaattaatgattgtatatattttttagattatcaaggtgaattattttttgaccgagataataaattagtggaaataccatgagaaattgagagtatacggttaagtcaatcctacacatttttattgagttctgtgtgttaggaactatgctagccacttcagagaacaaaaataagtcaaaataagtcagaaacaatacattgcttcacagagacaagaaaaatgtcttgagcaaaatgataaagccataatgtataaacaaaataccaggatattcaaaagaagatggtagtagtatatcaaagggaaggggggcctgaaaacccctcattcatatatatgaggttcattcagcattagatttcacttgatcccaaattccttggctctaatatttttgttgagacctgggagagaatgctatgctattactccttacttatctctttgtggggggcccactgagaatgtactcttcctgacattacttcagagtgtcaccctggatattttatcctaackggagttcagagttcaaaagtttccaatgtgccacttctaggaaaagcttcaattctgctacatattttggctcaggcccagattggctgccgcgctgtaacagtaagaacaacaacaattaagattcattgagctcttttcaccagaaacttgtgctaacaattttacatgtattatcttacataatcatcacaacaagcacctctaaggggtaggttatattgttatgaacattttacataaattaagatttatgtaaattaggttaagtaaatttcccaagctcattcagctacaaaatggcagagttgggaaaggaaggtggatctgtctgacttcctgtaacacagttggctgatgtgatgtagctccctgtaacacagttagagcctaaaaccagaactagatctactagaatatccctataacagaatgtcaaggttcctgaaaaagttattatmcacctacttcccctctactttggggatgtccttggttattgtgaaaagaaatttcaagagctcagaaatgagttcattttttattgtggtaaaatatacataatatttatcactttaattatttgtaagtgtacaattcagtggcactaaatacattcacagtgttgtgtaactatcactggtatctacacccaaaacttcatcatcctcaacataaactctataccccttaaacaataagtacccattcctttctccctgctgcccttggtctgaaatgagtttttggcctgatatatagaccagggcaagttctgtcttaattttggtgctgatgcatccttttacacctcacgtaagacaaataagacttagggaagatagagatccctgtgaaggtaggagggggaggaacagtgcctttcatatttacatacaggtcagggtgttgtattatctcatgtaaagggacctaaactgagggcctcttgtcattcttcacatcccttggggagatgtttgcagttttggtttcaatactggctggggattatgcagggagggaaaataaacaattatgccatccctcagtgcacacaaacacacagccaggagccgactgcactgtgggtaaaatgactccaaaattgtgtgtaatgagtaggaaaagattagagacagctcttgctatgctgaaaattgacattagtgaagggaaaaaaaaaaaactctactagtcggcctaggaggtctaattcgagcagtaaagatataaataaataaataaaagcatgtcaagatggtattggtgctttttttcaatgagctctatctggccggaaggctattcagcataatgcaaaattaaattataaaaactggctgaatatttagatggaagagccatttggaagcagtttatttagacgaaccggcaatgacccacaacagggagacatcaagcgtgaaatttactagaaattagcaccagggtcccagcctcagcatgaatagcttgataggatgcaaatcccagtgatattaagctgcctcactgctggtgctacagggtcactctcagttggcttttcatgttatacttattattttttcctgggacaggttataaataacaataaaaaaaatttattgaaaactttaactggaatgaaagtctattttaaagtctctgattactaggatgttgaaatacagtgtcagccgatcataatgaactaaggagagacattatgtatatgtagcttgtgtatggctaatgtttaccttcagtttctaacagataatcttgcccaagccaataagatctgtttcattttcaagagtgtgggacactgtggaaacactctgccaccctgttcccttgtttgatacacatggctgccacggtttatccatgtttataacaataaaagccctaggcagggttggtgcctaggtgctgagagcacactgcaaaggttgtgtgtggtcaccattcatgcagatgtgctttgcccagcatgctagaaaactccaagctcccgcctctccagtgaggaacctatcagtattttccattcccagttgcgtttctcagggcctgagaattgacagcacgtgcatagctttaaaattctgtagactgatttctaacctaaacccttggggatcgcccctcccctgctgctattggctgtgcttttgctctgtctcttaaatacgaagggatttcagacaattgtgtgtcagattgttgccaagtgtttcaacctgcctttcaaaataagtggtttggggcagctgcagttcagtctgagcatgtcgattacagagtttatttgtgtgtttgtttatattttaatagcctgctttttgggtgttttgatggttgggctgtgggtctataggtgttccaagttagatggaggcaatatattagtcccaaacatgtcagctttaacaaaccctgatgctcctttcctactcacagtcttggggccgaaaaatacttgtttggcagtcagatccaagcctcacacaggctggtagtgttatcagtatagttttgaacatttctgaacacagaggaaatccagcagcagttgggaatattcagtcatgtattcaagtctctttttctggttttattttactcatcatattagatgttggaaagcagagtaccccagtctcatgctgtctctcctagcagtaagaatgaagtagtagaggctgggcacagaggcttacacctgtaatcccaacattttggaaggccgaggtgggcggatggcttgagctcagcgagaccagtctgggcaacgtggtgaaaccccgtctctacaaaaaatacaaaaattagctgcgcatggtggcacgcacctgtagtctcagttacttggggtgttgatggaggaggatcgtctgaacccaggaggcagaggttgcagtcagctgaggtcgtgccactgcactccagcttgggagacagagtgagaacctggcgcgccccgctccccacctcaaaaaaaaaaaagaatgaagtagtagaatgtggacattagggccaacaagatctagatttgagtcttatctccaccactcactcttatttaagcctcagtttactcacctgcaacttggatatataaataagataatgttctgatgattaaatgatttatatgtgtgtatatataatcatgttccctggtacacaataagctagccatgatgatgacaaaaaggagcccacgtccatttcataaaattaaaaatcacacacacacactcatcttcatttgaaactgtttgcatatactatgaaatctagtatttttttaatagatgaatgaaaatacattttaaataaaatctccccttctttttgagatgtcaatctgttaattataatacagagatagattttgttgtagctaagtctttaacaagaagaagtgagtaaaagagctggaaactttgtcttcacttacctctaactttttttttctttttcaggtagaatgactttttgtgctgtcttttattgctttattttctccttttatctatacctttcatttcctctctttgtatgatatcattgagggacacttttctgttacttgttcggagactgtactcttggcagcactgaaaaatgtactgctaattacacaattattttattatgtagcactggttgaaatatccactaaagaattaatttagttaaaataatttgaactgagcaattattttcataactacagaattagcgtaaagcacttaaagtcctttattccctgctcttcatacagcagttgttaattagcagtaaatttttttggtcttagcttttctcccaaaggaataaatgtcttcactctgatcatatacatggagtacatatcatacacattccacatagagtagggggtgttttctggggtaacttggaatttctgaagtcttcacagacacaccaggttggggcagtggagcatgtgccttgcagtgaactgtgctcactgatagtttgtatattaagccatttttactttggagaaggtggcagtttaatttgccagtaactacaatgaaagcaatttctatttggtttgctcttaacttcctgaaaaatgcttctttgccttggattcccagaattgatttattccaaattgagatcctctctttgataagaaagtttgatctcagttgaacctgttatttggtatttagaaaggatccattgtggctccactgaagtactcattaaacatctggactcataaacctaaagctttagcaatggacttcagtgagctgggaaatgggaagtccataaaaagttgggaaataaataactgatccagttttccagggactcactttatgtgtacatcatgggtccttttcttcaggctgctcctggctttggagggattacaaaatgtactcttttttttttttttttttttttaaaggcagggccttgctgtgttacccacactggagtacagcagcatgatcacagctcactgcaggtctcagcctcctaggctcagatcctcccacctcaccctcctgggttgctgggactatgggaatgtgccaccatgttttgctaatttttttggtttttgtagagatagggtctctctctgttggtcttgaactcctgggctcaagcggtcctcccacctcagcctcccaaggagctgtgattataggtgtgagctaccattcccagtctacaaagtgtagtctttagcaraatgaagaggtggttcctctcttgttttttgtttattttgttttatgttgtttttgagacagggtcttgttctgtcacccaggctagagtgcagtggcaagatcatggctcactgcagcctcgacctcttgggctcaagtgatcctcccacctcagccaagtgactgggactgcaggcatgcaccaccatgcccagctaattttttattatttgtagagacaggttctcactatgctgccctggttgggtctcttcttctcatgtggctgtgtggtatttcctaagtatttttaaaatttttctctcattgataccctataaaaatgcaactgttaaagaatttgtctttctttctcattatattctttccagagtatataactaatttattcagcattcattcattcagcagatatttgttgagcactaactatgttcaggcactgggcagggatatcgggataccaagatgaaaaatagtttttgaagataaaatttttaaaggatcaatttccattagstgcacatttgaagagctcatcctatgctaagcatcatgagaataactgaaaagaggtagaatagttccttcctttagtaaacttactgtagtgggagagcacatattgacatgaaaaatactcaacgtttgtagagcaaatgtgaattaatgtggtgaaacgtgagtacagaaattcagagaggatataaaatggaaaggcaatctggaagacttacacactgtatcttgtgaaagacagtgcatctctctgttgctgtcttgtgcttttgaagatcctctggagtcttgaatgggatacaggtcgatactccctttagtctatagggtggccaaacaggaggcatagtataaggaggctcttcgtggccagaggtcctgaacagtgtttaaaagtactgctttgaggaagagaaatttcwtgatttctaatttgtctcattctccatagatatgtacgaccaagtgctgaagtttggtgcttacattgtggatggcttgagggagtgctgccagcctgtgctggtttacattcctccccaggctgagctgcggggtggctcctgggtggtgattgactcctccatcaacccccggcacatggagatgtatgctgaccgmgaaagcaggtagcgtgccttccacatttccattcactgcctttagggaccctgtagctgttggtttcctcctggagaatgttacagccatggcactacagcacccrcatcctgtgattccaaaccaaagctttttccttccattacagtccaggtcctcactctagcatttcaggaagctgaagaccatggtgtttgtagcacccaaaaaaactgtaagggagaacctcaggcttattgggaggtggtacctgaaactacctaaataaaacagatctaatctggcatcctttcatagtctgttctcacctctttcctaagtaaacttcaaaacgtgtttctttgacattttccaaggaaattcttacctccagtcgttttagtggaccgcccgcttctctcttgtccccccagattcagccttctatgtcaaaggctgcttaggagagtccagtagtttcactgtcaaacctctaggctgagaggcttattatttacattctgtacttaggggtttattattttttaagtcctaaactcatctgatatcagatcagagacaattcctctatagactttggaatcagactgtctggtttcaaatccagttctgcctcttgttatatttggacgagtctcataacttactaaactgtagtttcctcacctgtaaaatgggaataatcacagaaccttactacatagtagatggagactgggcataggattgttgtaaggatttatatgtaagttattagaacagtgccatgtacatagtaaacattatctataatttttttaaactagaaagctgtgggkttttttttaaacatgtttggggtaaagtttctggggactgaacatcattagtatgcactaaaagtaaccctgagacctttgactctgctcatttccatagcgctgggcagaatgttttacctcctacttggcctggcttagtgtgtctgatcagtgtcctacaagcagactgacagctgtggtataggtgaggtagatagatagatagatagatagatagatagatagtattgatgaagtattgcccttcattattgtacatcctacgtgatggaggtggttcccctgtcactgtgcctacagcatttttttcccctggaaaataatgtgattcctgttactcttatcagctgtaggtggtggaatctgtattcttctccctttgaaatggaagtcgactggtgtggtaatgagaattattttaattgctttttgccaggcctttctcatacctcacttagacacttctctggtgcctactgttctccccggggagatgtctgttaaccataggtgggcaaaatgataatgaagctatttcctggtctacaaattgtaactggcctcattctgttgtctccttcctttaaagtgcctctatttctgttttgttttttctttctttctgatccaggggatctgttctggagccagaagggacagtagaaatcaaattccgcagaaaggatctggtgaaaaccatgcgtcgggtggacccagtctacatccacttggctgagcgattgggtatgtctgcttgtccttctggcaaatcaatgagccattcagctgatttgtaatgagtgcattcataggccaggggaggaggcactgaagcatttgatcaaattcatgataatctttatttactgtcctctatatggtaagaaccctggtagaatgaaatagtgtgtataatagggaaagtgagccctaaaaaagcaaaagtcacctgattttttttcctgatatttccttagagtacaaaaagcccgtctttctaagatgtccttgtagagaatgattagctagagttgctgctgggggcaggcctcaccagagaatatgctagatttaaatatgtcctgtttctgcttgtttctttggacagctcacttcatttctgagagatgggatagaaaagcaggagtctttacccaggyggtgttccggggtcttcctgagctagagaaatagaagtaaagattgcgcactgtgtgcttccaaacagtagctgcagccagaatagccctgagagcaggcgtgcttaatgcttccagccattgctctgttgctcatttgttttcagagcttttggaagccacttggcaatttgaacataggactaaaccatgggagtcctgtgttgagtccagagtctaaatgagtttcagattcttttaaaacactgattttctgcccaggtctcccattgagccccttgctatgttagtaaagataattgctcgaggttcttttgtcagttggtttgtcttgtttttgtttttttctaaaggaacagagattgcctttaaaaggtagtgaaactcagtgaatggagaagagagatgctagctcatttatgttccaagtggtaatttaattaataaagtaccatttgtggastgtatatccccaccatccagagacagaaaaatcccgtttgcctacactgtggagastgtacatccaggcatttggagccmtgagccaggttgcctgccaaacacggtgacttgggttacaagaaaccctgtttgtgtcccattgtttgccactgggtaacagccaccaataactctaactcaccacagtctgatccttttatggggaatgcacacatacaagaaatgagagttgtttctaaaatctattgccacccagaattgaggtgggttttttctctttcttttccaaacagaataattacttctgaccaaccctgtmcactttaattaaagtaactgcagctcaagagcaagttacttacaactgttcatagagagagctctaaaagcttcagccactgataagcatctcacttagatggctcataattgctcccagcatcccccaattgttgccgctgtgtttaccactaattccatacaaaggcrgcaatgccgcaattgcaggacacagcaaattgcatcattttcctttttcctttttttcttcctttttcttttcccttttttttttctttttgctggttttctttctggccaatttaaaatttgtcaaagtcggtcttcttctggatcactgccctttgatatttcgcgcactccatttgccacaaacaagccgcagggccgcagttcatgctgactctagcagaagcagagagagctccatttatcttacactgcctgctgaattcctactcattaactgggggttcactgcctctttttaaccccccaatggctgttatcatcccttcagagtaactgggtggtagggagagggatcctttctccttttgcagaaggactggatggtgaggggtgtggrgataaagcttctttctcttcaaggaaagtgatgtcgctcccaccttcaaccagcaccttttaacttttgaagcacatgaaggggagagggaggagactcccaagtgatagccgtttaatcatttgttacaaatcatctcattatcaatttcctatccgcattggagaaaaccatatttatttaaccttgaccaaaatggcacttgaaaaaggacccttagtctgctaaatgtgaagcaggctctggcctagggcagcttgggaacatgagcagtggacttggaataagaataacgaactacgagtcttgtaaattatttaacttctccgaacatcagtttttttccaaccataaagtggagatcacacctctgcctagctaatatgaggagcagatgagcatgcatttacttcattgcatcattatctttctgtcttaatcattagaaaaagcagatggccatgtttggtatccagtattctctgtggctcagtcccacatgtgaaaatatgaaagaaacagaagtatagtcctgtctctcagggatatcctatacgggcagctgtctctgcgacaaagcaggtcagcctagatataacaggacatattatgaacccagttcctttggggttcacaatgattctggctcttttagtttgcctagaaccaaactaccaaaattctttttcacaaagtgggtgaaaatggtctcatttttcagactgggaaattgaggccaaaaaagtgaatcatctaagatacaaaataaataaatgtacatcagagtccagaatggaattctcattctctgtgttctccttttctcaggatttcttcagatttttcctcaactgaatactgagcccgaactaaattaaacaaggattctttccttttgtaatctaaagccatttccacagagaaaatctgatttaggagaaagcctgtaggagtggatgttatcttgtgttgccgttctctccccaaatctgcctctttactggggagcgtgctcacagatcacttagacaaaccagcgcacaactgattgactgtgttcaaaaacataattactccgggcacggtggctcacgcctgtaatcccagcactttaggaggaggaggcaggcagatcacctgaggttgggagttcaagaccagcctgaccaacatggagaaaccccgtctctactaaaaatacaaaattagccgggcatggtggtgcatgcctgtagtcccagctactcaggaggctgaggcaggagaatcgcttgaacctgggaggtggaggttgcagtgagccgagatcgcgccattgcactccagcctgggcaagaagagcaaatccctgtctttaaaaaaaaaaaaaatcataattgctatgtattttataagaatgagtaatatttgacttctgagcagctaacttcatctcttctagaatttttatttttttaaatggccttttgtcatcttacatggttagtttgggtggaaagatggtgaattactagtttgcaggtctgtgattataacagaaaatatgtaaatagtgcctacactgattcctaatagaagtaaagggaagaattacctcagaaagaaaagtgagcaaagcccasgccccagagtcttgcattgctgaatcagttctgaccctgattcacagaaccagggcttggtagagtcattgcaaggaggagaattacttcctaccatttggttgccttaaggaaattaaatttcttctctggaaatggagccgcagccctccaagtcctttttgtctctctctgacatccttctactgcctcacaaggccasgagcasggagagtggctgtggagcgggacrgccttgctagcctggcctcttgagtgctgtgacctgaggtcctctcctggatccttcccctcctcttgtgttcagagagaaatgacaaatcaatttagatggagagagaactgtccagcccaagtgtgaagcaattgtaagttccccactgtscctctctctcaaaatgaagagcacctgggcaaaggagccgcttaggggaacttgttcttagttgtggccctgttcccaggcagctgggcagcctgccatgcagcaccgcactgcgcccacacagaacatgccctgactgcctgccacagggagcagcagcatggactgagtgagcactgctgctggcccttgcctggtccttctaggcctgcccacacccaccatgccttcagggtcaaggttgccccaggtgcagatatggagcattgtggtggcaggtgaggatacgcttctctgtaaaaatcttcaggaatgccttcctcccaagccttctctagcagccagaatgacaggaaaaggactgttccctgggctaaggggacttaagggttaagctgcttttctggcagaggtgatcaaagtatctgagctgtgtttttccaactcttatgtccatcttcgagaggctgaaagctgaaaagagccagagttgcttgtttgaggcagaaagtatgtctttgcctggaaagttaagactaggaaagaaagaagttccgatacgcatgccttagtgagtggtctttcacctctcacctgttgaacttggagtgtcctcactgacactatggccactgtgtcctttgcggtaaggaggctgatgagaaataacacgaggctttytatcwcgaaggtagatatgggatcttgcctcctctcttttgttagcagtagctgaaaacctacccctcacactgattcagaagctatttggctcggtgaagtttagtgcaatagtgacaaaattttctgagaagagaaaggggtcattttagtttgatcctttaatctgattgtatttataaaagcacctgggcttgcctcccccaaggaagcagtgtttcacaattctgtatggccagagggacctggcaggcatttagttagagggaacccaagagaaagctgtcatcagaatgtgtcttggtcccaaatgaccagatccccgtatcctgacctgccagacatagggagagcaaattagggaaggaaaataatgaagactacagaggcatatttctaccagaagaattcagagaattctgtgctgttccctgaccttttttatatggatatgtctgcgtggaaacacagggacgggactgatgggggagcagtatttttttttattcctgtttggaaatctctgggttttmtattaatataatgatttttaaaaatatgaacagtagagcactaacactgttgcagggaactttagggttaaacatcccctgagaggattgctgttaaaatcaatatgcaaatgtgagtgtatttagataggtatggccccctttgaagaaaagcagatatatgaaaatggggttttaaaaaaagctagatacattgggagaaattattcccattacaaaaggattatttgccttaccaaaggattcactgcagggttcctcataaaatagctcccttaaggcatttaaaacaggatctgatttacgcagtttttcaagaatgcttttgtgtaaagaaaggcacacctgttatggatatagaaatagttttgcaggattttttttttttacctatcttactatgtttatagaaaaatttctttcaacatagaaaatgtgattacatagatcttttaaacaactgcttgtgtttgtacttctgaatcttaataagattccagtcttttttatgctgatttttcagtctcaaggttgagggatgggagtatgttttaacatctgagatattcaggagctttctggggagggtggtcttgttcttatctctagcatcataagtattgaaccattcaaagcaaattgctttctttctttctttcttttttttttttttttgagacagagtttcgctcttgttgcccaggctggagtgcaatggcacgatcacggctcactgcaacctctgcctcccgggttcaagcagttctcctacctcagcctcctgagtagctaggattataggcatgcaccaccatgcccgactaattttgtatttttagcagagatggggtttctttatgttggccaggatggtcttgaactcccgacctcaggtgatccgcccgcctcggcctcctaaagtgttgggattacaggcatgagccaccgtgcctggcgcaaattgctttcttaagtaaaggaagaagggcccatcaaagttaaaattggatttaaatttacataggcttcttagtataactgttttggttttgtttttgtttttgagatggagcctcgcactgtcgcctgggctggagtgcagtggcgtgattttggctcactgcaacctctgcctcccgagttcaagcgattctcctgcctcagcctcccaagtagctgagattacaggtgcctgccaccaagtataacttttttaaaagttgagaatgtktttaaaaacactttaatatcacattcttttataaaacattttccctgtttgccagactgggattgttgttacataaatgaggaactcaactcagaaaaggaaaaagatttctacaaggtcgcctagagcctttggctgagcasagaatttttagtctaccagtctgatttttattmcaagctttgaagatgtcacctcccccaaatcctacttttaggatgtagtttgttcatacacagactagggctgaccttctcctggcctatttaagtgatatggctgggcaaaaaattgcctcctgctgcagaaatcagccgtttcctctgggagtttctctttagcttttttttttttttttttttttcggtcagagacagattctcactctgtctgccagcctggagtgcagtgtcatgatcacagctcaccacacctcgacctgtcaggctcaagcaattctcccacctcagtcccaagtagctaggactacaaggcatgcgccaccacattccgctaattttaaaatatttgtagagacagaatttccctgtgttgcctgggctggtctcaaactcctggcctccgcagtccttcccaccttggcctctcaaagtgctgatattacaggcatgacccaccgtgtccagcctctcttcacctttgataccatggaggagaaatgtggcttttctttgtatcctggctccagggaacacctgataggccactgtgctgcggatactttcaagtcaatttgaactgctttgtttaaggagcatgggctcttaaaccagattacctagtccaaaatcacaactccactrttgcctagctttgtggccttgggtgagttacttttttgtgcctcagtttcctcatcttttaggattgttgtaaggattaaatgagataaaaagtactttaacagtaccagcacacagtaacatctcaatagtgttagctcttcttatttgaccagtgatatttcgtctctgtttaactctttaaattttttaattaaaagtgtgcatttttaggatttcatggggacttattttttaagagacaaggtcaccctctttcacctaagccaaacttgtccaaccgtggcctgcaggccacatgtggcccaacacaaatttgtaaactttcttaaaacattacgagattttttttacaatttcttttccagctcattggctatcgttagtgtattttatgtgtggcccaagataattcttcttcttccaatgtggcccaaggaagccaaaagattggacactcctgacctaggctggagtgcagcagcacaatcatagttcaccgcagcttgaactcctgggctccagcgatcctcctgcctcagccaccagagtatctctgggactacaggcacgcttcaccatgcctggctaattttggggggcatgcaggaggaaagacagggtctcgctctgttgcccaggctggtattgaacccctgggctcaagccatcctcccaccttggcttcccaaagttctgagattacaggtgtgagctaccacacttggcattttgtgtgtgtgtgtgtgtgtgtgtgtktttgtgtgtttgtagagacagggtcttgctttgttgtccaggctgatcttgaaatcctggcttcaggcagtcctcccaacttgcatagggactttttattttggataggaaaggatgggagcacctacctttttactcccactcagccatttcctaatgtagaattctagaaaagaatgacttttctctctgtagcatattcttaaacacactcacacacgtgtacacaccaacttgctttcctaaaawccctgaggccctgcaatctggctagaaaagaaagaaaaccatttcaagatatttaattgtacagggagcttacagcattgatcgagagcttagctttttacaatagtccagtgaataagaaatgctcctgacaaacgatcaatgataggataatcactctttatccccctcctcattcttaccttctttctttcaggagaacagggttcagaagtcaaaaatctttatagacgccacttttaaattaagcagaaaatagacattgacatatttgttaatctcccctaaatcattaccggggctggctgctttgctgtacaaggagagaggggccctcggtgtgcaacacatgatataactggcttaatagcagccttttatttttagaaaataaaattttaaaaatcttttttcccctaaaacaaagcacacaaatccttgaccttcacatgggcatttaaaaacacatatattctccacttcagtcttttccttgttttgatgcttttttgaggtgggtcttgaaccataatcagaggcattactgaaggaatcaaacaaggtaggctttggaggaatgccctgcaatcttcctagtctcaggagggccagagcattacaggcatttattttgttattctttcaaagctctagaatagcttgattgagagggcaagacctttgttagcccagaagccagcatcctccgtccttccaacttggcgaagccaaagcctggtttctgaaacactgtcctcagcccgtagctgctccctcttctgcagccagtgctgagccttgctcttaactccttgcgaacaacaaaccaactctccagctggtttccctatagtggccactgcaggatatctgcttgccagccttcaataccatttaatgtggaagaacacaggctttggagagagccagacccaagtgtaaatcctgactttgccacttaagagctggatgcagccaggtgcggtggctcacacctgtaatcccagcacttttggaggccgaggcaggcagatcacctgaggtcagtttgagaccagtctggccaacatggtaaaaccaaatctctatgaaaaattcaaaaatcagtcaggcttggtgacgggcacctgtaatcccagctacttgggagtctgaggcagaagaattgcttgaactcagggggcagaggttgcagtgagccgagatcgtgccactgcactccagcctgggcgacagagcaagactccgtctcaaaaaaaaaaaaaaaaaaaaaaagagctggatgccattggggaagtccctttacatttcagagctgtggttttcttacctgtaaaatagacaccctggcataaagttgagttgtcctaaggattggagatcatgtacctgaagcaactgggaaagcacgcagtaacgttgaagtattcagcttggcagcagtgttaacagctgaccagatgtaggtgtgtagatctgtattgtgcttggtgattatgagatatgtgatcctgaaagatttgagtgcagtgagtggtaaatgctcaataaatggtgtgttagatatggtccatgtatatgtgcgtttagccatgtcagtggtcttgccatccctttgctccctgcagggctgtgactttacctattattgtattagttcttgaactcacagtaacaagagacacaactcttaaatcttaggcctgcctaggaaattgcatctgaatgggaactattggagacattgtcctggtcttagttatggaattgggactaagatagaacctttatcagccaggagcccaccatcatcacttagcctctcagaaattaaagggacactactactgaagcacgtgtcttctgcccaagtaagcgagaagagacagctaacagtgttcaaaagctttgggacccaaactgctgcatttgagtcttggctctgtcacttgctagctttgtgaccttggtaagtccataaattctcagtgcctcagtctcctcacctgtaaaatgggaataataagaataccagactcctaaggttgttgtgataataaattaatagatataaagcacttagaatggtgcccagtaccctataaatattagctttgattattgattgtatgcattggatagccaggaataagttttcttttccagcttgcctaatttttaaaactttccaatttcacaaaaaagttacaagaataatacaatgcttttttctcaaattcacctattgttaatatcccaatgctttattatttctgcatattcacatgtgtacatgtatttattctctcttgctccacacacatatgcattttctttgagccatttgaaagtaatctgtggacctcttgcctttttttttttttttttttctgagacagtcactcaggctggagtgcagtggcgccatcttaactcactgcaaactccagttcccgggttcaagcaattctcacgcctcagcctcctgagtagctgggatggcaagcatgtgccaccatgcctggctaatttttgtatttttagtagagacaaggtcttgccatgttggccaggctggtctcaaactcctggcctcaagtaacccacctacctcagcctcccaaagtgctgggattacaggtgtgagccaccccgcctggccctaatgcttctttattcataaatattagtgtgtatttctaagaacacagactttctcctacataaccacaatacatttatcaaaatcaagaactgtaaacattgatactactgtctaatccatgattcatattaaaattttaccaattgtctcaatgtcctttttagtttttttttttttttttgaggggcggtctgagatctgatctaatgagcatacattgaaattcattgtcaagtatttttggtctcttttaatctggactgattctttgacctttgtttttcatgtttttcacatttttgaagagtgagccactttttttgtagcatgtttcctcagtttgggtttgtggttagatttcgattctgctttttgggcaggaatgttgcggaagtcatgttctgtccttctcagtacatcatcaggagtcatggtatcagtctgtcctcttggtgataatttaattacttgcttaaggtgttgttcactaggttaatccacgataaagttaccattttcccctttgtaattaataagtgatttgtaaggaatattttaagaccttgtgaatattctgtttcttatcaaactttcacccactggctttgacatccattgatgattcttggaagagtaatttacagtgatgcttgtaaaacggtgatttttctaattccatcatttccgctacacttattgttcttctgctggaagagagagtgttccctttcccttctccctcatttaattacttatatgagggtgaattggtagattctagtttcattccacaaatattctgtctgttaataaatatcattatttattttagtgttcattgtcccagaattgggcagtgggaacacattcaaaactggctcctgcatttttctaacatgtctcaatcgttttttgagggcttccttgtttttttgtcacaatataccccaggttcatctgatgttttccctacctcatccctagaatcagctatttctccagggaatcttggtttctttctgtggagaagggaaaatatttgcttccctaacaagggtgttctgagaatgtctcatctccgaagacaccagccagccctccatccctcagccctcctcccatcagccctcttgccatcagccctccctccatcagccctcctcccatcagccctccctccatcagccctcctgccatcagccctcccgccatcagccctcctgccatcagccctcccgccatcagccctcctgccatcagccctcccgccatcagccctcccgccatcagccctcctccctcagccctcccatcagccctcccccatcaaccctcctcccatcagccctcctgctatcagccctcctcccatcagccctcctcccatcagccctccatccctcagccctcccgccatcagccctccaggcagatctacactagaatgcaatgggcctttgtgtcatcccttagtgtggggcccggtgcgttcatgctgttcaggtgttttggaaggaacactactgaggcgccggggcctaaagcagcagatcagtggcaccttcatcacagttttaaaatggtgatgagcttaaaaaaagaggtagagttgggcatccaaaaaactaataaaaatgaaacttaagtactatagttacatccctcctctgttaacctgtgtttatgtataatacggctcagtcagcagcccaaggctgtttttatggcatatgattcaktgtggtgtaaaaaacaaggcstgttcccagacaggcatgcttgaaatagaccttcctcttstgcatcctatcacctgtgctcatgtatttatttgtcagctttggtgacaaagcacttcagggtgtccctaacaccaggggctgtcacctattgctccttcagctaggcttactcctccttactaggcaggcagctaaattttcagtattgattgcagatcccattctgagagtaattaggaagaaaggcacaccatakcaacacctctactgggacactattgattgggggaggggtccctccttggtataaggggttccaaagtctcctgtctgttgagtcagggtaccsygcgcastgatccaaatgaggtttgccaactgcctttctctttttacatcctccttctcctttagcctaaraagtagaatgtctttgtctggtcagggactggctctggcagtagcagcccaggcgggagagcacaggctaacccactgagctgacacaagatgtgaggatctagctctaattagattgagttctactaattagaggttaagagtatataaacctgagattagaagccatgaagtactatggcttgtaactttaggagttattcaggtccttgccaagtttggcagataactcgcatgtacacggaaacaggagctactagtttgtgctcggagtttaggggtgctctcaccacatcccacgtgtggaatagcccagctgctttgatgctggtcagcaggratgggcatggtgtcagtgtacamgtactggcctcaggggaaggaggagcctgggtggtgtcagcaatatgcagcaggcctctaggtcgctacttgcaccttctcagggagaggcatgggagaggggctgccatctgccttcacacttgtgactgccacagggaaaagagggcatgtgggcttcttgtggcaaggtaaagactggtgtggcatcttgtagggccctgttaatcagcaaagagcagagaagacaacggagagccaggccacagagggaagagggggcaggctgatgttgagcttcccgtgattgtggctgcttttgtgcagagagattcctggtcattacagagtgtgacgggcatgtttatctaattgcagggaccccagagctaagcacagctgagcggaaggagttggagaacaagttgaaggagcgggaggaattcctaattcccatttaccatcaggtagccgtgcagtttgctgacttgcacgacacaccaggccggatgcaggagaagggtgttattagcgtaagtacaatggttgccacttcttgtcagaggcccacatgtgggcaagtgtgtgtgtgtgttgcacacaggctcataagcagggagctatgagggccaaattaaaasaacttctgcagatcaaaacattttcaatattttttagattttcactgtttctgtaactgttatcatcttaaaacaatgtataatttaggtttccattaattcctcaggaggcaagctgcattttactggtgggaaactgagtcacatgtgacttcattggtgacgggtcctcaggatgtgggttactatagggtcaaggctcccgcagcagctaattaataattgatctgcaagttgtttgatccatcttctcaaaacgaatttatccttgtctggttatctgggaactcacagcctcttccccagaacatctcagccatgtgtgggatcagcattagccaggcccatggctgtgcacagtgctgcagacagcagggcatgtgggctgcatttctgccctgggggacatctggaagtgctaggagtttacagccagctcttgggtctgtgaagggcttgcctggagaatcagtttttatgcctgtgggtttccctccagactgagcattaagcaggaattaggactgggctaagtttattcttctctgcatgtaggatatcctggattggaaaacatcccgtaccttcttctactggcggctgaggcgtcttctgctggaggacctggtcaagaagaaaatccacaatgccaaccctgagctgactgatggccagattcaagccatgttaaggcgctggtttgtggaagtggaaggaacagtgaaggtaggtgggacactcaaagagaagcctttttgctgagttcctcacaccacctgagggctgcaagtctcgccagcaaagagtccacaggcctctaagggcaggagtagaagggaaacatagagatccaagctgtttcctcccccagctactccccctaacatgtcatgtcacgacatcttgttagaagaggtggtagggcatatgttgcagcttatgcaatcattcagcagacctttttgaacacttactgggtactagacactgcatttgcttctgggggcatggcagtgaaagaggcaaatgttgttcctatccacatagagctcaccatctagagggggagacaaataaagaggttatgcacaatagtgaggcccatgttaaacacagcaaagggcacagagcacagcgagaagatacctgaccctctctgggaaggatggaggagagtctaagaagccttgtgcagtaagtgatgtctcaggagaggctggaaaacaaagcagaaatgaaccagaagaaaaggctggatttgggggcagtcagggcttaggaggaatgttcctgcagaaggaacagcatcatcctaagccatgagagtaagagtaacatgcatcaaaggaacatcctgcaactgtttcagggsagctcagagactgggtgcctggtaggaagaaggggcaggggcatgatcacacagggccatgtaagctgtcaaggagtttggactttgtcctgaggcctgtcggaaaccactcaggtattttaagcagtggagtgacatgctctgatttctattttagaaagaccactaagggggctgtgtggaggagggaattggaggggctaagagcagaagcctaacaggttgtgatcggcaggagatgccatgactacaactaaagagctgcctacttccaatcagagatggaaggaagtatccacccttatgcagggaaagggacctatgaagctggcattttcttggggtgatctcacagagagggctcgtgacctagagcagtaaccccactgagatggtgtccttggtgctctagcctcagtgttggggatggggcgggtctcaagccaggatgacctagcaagggcaccagcatttgctcctggaatagtgggctgcataagtcactccatggatgggaagaaaaagctggaacttttatttctgtttatttttactaacaaaaagaaattaacctttattagtaattaatatatggattaatcatttacatcaaaaatgcattttatcagaatattggtagtatgtgctcaaaatatatttgtctgtctttctcattgctatgtgatcacaaacatttggtgactaccaggttagagtattgatggagggctgggtggctggtggtggcttgaagggtcctggcccacaaagaggggcactctggcctctgcctagaaagtgttgcctgaagcctctgctaatcgttctcaaggaggagctcccagatttgctgtcagttttaaagccagtgaattggggtgcttctaggattcacctttgtattaagtctgcccattttttttatgactgaaaagcttctttggataaatatttcaaatgtgcagttggggagcacagccttctccracatttggttcaggttaaggtcagtctgtggcatcataattgagtgagacaattttgtcagtggctactggcagcttctagtggaagttggcattgaaagtcacgcaagtgtaaaataagagtttgtcctccagttaagagtggccggctaggtaaatggagtgtgtgtgtatgtgtgtggccaggagaggcctgcactgcctccctaccacattagtcactaatggacgtgtccagcctcagtaggcacaaggatgagaaggaagtttccccccaggcatgaagcaagtagataggcccttcagcttttccctagcatcctgctcccaagcggacagagcgtctgaagaaataggtcactgccgtctcttatcaatggagagaacagttgaccacgtgtgtacaagctcctggctggaattgaagcacagaagagaaccyccaccccgtagctcagtaggaggctgcctaggcactgggggcagccatgctgagcactgaggccatttcccttgtgcccatctacaaaaggcagcattctcctgagttctctgagaggaatgccaaggactgaacgtgaggacgggtaatcctatgatgtcagggcatgtggctttgaaacctccttccatattcggcaggctcagcaggacctagtttagtgtgaggtgggtgataaaatctgcagtgcccttgagagaagaaagggttgcagtgttcaaaagccatctgtgtgcctcagaaggagtgatgtacaatctgcttgctgtttggtgtgggggggggggtggttcttcaaagaatgatagatactgtgtgttgtgtttctcaagtgcaaagactggctgagtctagaccctggctttgcaccaggaagtgaccctctaatccttattgtggttggttactggtaagaaaagacatttcgwgataggcatctattagctatgccttgtgttctttttgttcccagagaatttgttttcttaatcttaatcctgaaaacagaaattctgggacagaaaattgaagacacggtgatattatataactgagcactataattcttttgtttcccttagagatatctgttaccatgagttatgggagtctgtttgaatccactgggacgatcctactgtaggaaatagtaggatttatggttcatagtttcactgcaggcagaagcaaagcatcactacagctccttaacgaaaataacaagaacagtagtttaaattgggtcataagaacatggcacacatttgtatcctgggcatggtttctcacttgattcttagatccaaaatttgaagcctggtttttcaaacaggctgatttattttttcccagaccccaatagtagaaattgaaattaggactctgcatggaacaatgagaatgtgggttttgaaatctcataaacttcgggatcccagctttgtcatttactggcatgggcatattatttaagcctccattccctcatctgtaaaatgggggtggtgtttatgtcatggggttcagtgagttttaaataacatgagtaaagtatggagcataagtcagatgtggtggctcacgcctgtaatcccagtgctttgggaagctgaagtgggaggatcgcttgaggccaggagtttgagaccagcctggataacaaagcaagaccctgtcttcacaaaaaattttaaaatttgctcggtgtcgtggcacacacatgtagtcctagctcctcagggggctgaggcaggagcatcgcttgggccaaggaatttgaggttatagtgagctatgatggcgccactgcaccccagcctgggcaacagagtgagaccctgtctccaaaaagaaaaagtatggaacacaatgtctggctcagtagacattcaaaatatgctagtttccctgctccatgttagaaggtaaaaaaataatagcaacatagaccaagtcaaaaatgtacagctgattgacctcggcggaaagggggctgactcctgagcacagtgggtgctcagacgctctttggtttggcatgctctcatgttcccacaacccgatgccatggtgcattcttattgttcacacagctacccactcgctcttattctggatttccaagtgaaatgaatgctcaacagaggcccctgtgaggaccataggaaaaagcactattgacagggtcacttatttccactgacctcaaaacctggcctcaggctactgatgaataagtctcatacaccaaacttctcacacagggccaggcagggaggaggtaaggtagaacctggaaagtgttgcttggccctgctatgggcctggagctgagatgggattggctcacaggagcttggttcacaggggtctgatggccaccctagcccacatgtcctttggctattgtactctaaagcccttggaaaaaaaaatcacatcctttcttgggcttctgttggatagggcttagccttgtaagtgtaggtgtattgaaaatgtctttccaaaatatgagtgtaccttaggatttgtatgccatccctacacccatcaggctgtgtgtttcccagaagtctagaaggtcagaaatgggaggagcctccctagctggaggtgtctcccagcagctcccaaggtgagttattagtagggtatagtaatcagggctcacatccatcaggttgtgccctggtcactccttggccctgctgaaccattgtmtaaggaggacttaacagctatccagtatgttagaaatgaaactttccaaacaggtcatttagatgttgtgagatagactaattactacataaaattagtgaggctgactagtgcctgagatacttatccactgatgcagacagaaagtgtctgttgaacattcattttaggacaggccactgttgtgatgtagaattattgatattttattgataaaatgttctgatacagatggatatgctgacaggtggcatacgggcccaggcctgtcatgatgttagcagcctagcatatcacacctgtttaaagtccacgctggaatactaggaatgactggccacattttctttttttttttttttgtctcactctattgcccaggctgctggagtaggtatgatgactcactttcagcctcaacctcctgggctcatgtgatcctcccctcccacctcagcctcccaagtagctgggactataggcatacactaccccacctggctgatttttttgtagaggtggggttttgccatgttgcccaggctggtctgaaactcctggactccagcaattccctccctcagcctcccaaattgctgggataacaggcgtgagccactgtgccaggcccattttcataattttaaggagggaaataataatggcttcttcctgggaataaggttggcctatccttctggatgactggaattgagtcttacaactgttctaagggagcaaacaagaaactgtaggctctggctgggcacagtggcacacgcctataatcccagcactttgggaggccaaggcaggggaactgcttgagcccaggagttcaagaccagcctgggcaacataacgagaccctgtttctaccaaaaaaagttttgccaggcatggtggggcatgcctgtaatcctagctattcaggatgccgatgcaggagaatcacgtgagcccaggagtttcgggctgcaatgagctgtgatcatgccactgtactccagcctgggcaacaggaggagaccctgtctgggggaagaaaaaaaaacctgtaaactccataacccagtggaagggagcttgcttttcccaggtggagcaaattatcccacaacagtatggtaactctcccaggtctgttgagaaaaaccagtggcactatgcttacataagtttgtttatttttgctaaacatgcagttgattagaacttgagacccctttccttcatgtactctaggctgtaatccactggggtttggcggtcattgtcatccagttgtactttgcgtaaacagcagatctttttataggacccatattttcaagcaactgtaaaacttggaatgcgttgmcctaatcctgtctgggaacttttcaaaatgtttaaacacctagcatactctgtggctgcaggaggggaaggcagaagagttttctctagagggtagctggctttccagtgtagtgtctgagcattgttggaagcaggcatctcgttagctaatacattacaccaatcaaggagagttatcttaagccacaattaatctgctccctggcatatgttgataggaaagcatcatgctgtttcttaattaaaagcaaacggattaaaaatgattaataagagtattaaatattctcctaaactaaaggctttgggattcttgggtaaatctaaaaatcttgggkttttttttttttccattctgaaatccaagaagcatttattgttttatttttcctcccctccaccccaatcttcataagtaggggtatgtgtagaagtcctgaaaccacggagcagaagagtaaattgccaatgatggaaatggaaatgttgaaatttaggtggcgacgtttaggagtccagggggacccatccatatgtggggcgtgcagcaagctgggtcacaagagtgagttaaaaccatgttatgggaaaagcagtgctaccttctccctcgtggataggggctgatgtgacacttcctttccttaggcgcaaaacactttctcaaggcagtttggccttgagagatgctgggagtcctaacccaggcacagagaggagagggtcactcaggtttgcactgacggggccacacaccccagctgaagaattgctgatctgcttatcagtgattagatacagaactgggcacatttgagtcagaaaaagaaatggacaaagaactaaaagagacatactgctgatccttagtccccggaagccttcatctttccaaygtaaaggagttaatttttagaaacagagacgtcgatgaaatgacrtacattaaataaccagtcacaactaagtcggcagctaagttagagacaggaagtgacagtctgaaaagaaaccattatatttgaaggcacgagatagttagaaaatagcctagtgctcagttttgtactgcttgaggcctcttgtgatgaagacatttcctctgcagcccagtagtcacagctgtggctttggtgaccttgcttgcatacaggcttcctgtagccacgtctcaaacctcaaagcctcagagtccctaacaaacacacccacctattaaattatagcaccaaactcattgtcattctgactttgacttcgttagtgataacagagaaggatagcgcacctttaaatgacaagctttgtgtttaattacccaaacaaaatgacataaatatgaatgagccctaattgtggtacttggttttccggaaaccattaacaaaacgattcctaaatgatttgtaaagaaaatgagaggagaagagagcaaggagaaggctattaggcttctaacacactcctgaattattatgtagtcaaccacctaggaaatactcagctaaatgatcttgaaaaggaggtgagaggtggtttgttgagactttcagggttatggacgtcttgatcctttcgaatactctcataggtaataaaatggggcttaggtttctgacctggtggctgtaccctggcaacaagacttccctcccatcagttccccgtccgtgcctcatcaaaagacagtgggctctatttcaggagacttcatccatccagtgactgccaggcctcactgaggctagagacttatactttaggcattgtgtctcagctcctctgagagcaaaacaccaaataaacagccttgccttctcaatcacaattttactaagtaatttgggcttttaactggttctctcaaacctgtcaggttattgaattctcttagcctttgtcaaataggtgggtccctagagtctgacaggacagagtcagggtatgagcaccagagtgctcgggagagccccatggagacttcaggtgtacacctgtgtccataaaggaagagaaggagaaggggcacagctcctgcctcgaggcctacttcctcctcctgcacgatgctgacagtgaaggagaatcgtggacacggagcacacttttggagtaagcaagcactccagatcctgaatagtcagggtgtcccggcctggcctgacccctggtgtttgaccaagagtcatctgtttgcaggcttatgtttgggacaataataaggatctggcggagtggctagagaaacagctgacagaggaggatggtgttcactcggtaatagaggaaaacatcaaatgcatcagcagagactacgtcctcaagcaaatccgcaggtgagaccaacgtggggaactccactagagaaggagggctaatttctttggaataaaaagtttccaaacaaatcatgagatgatcgcagaaatcttatgatctctgcagtctcttgctgtttgagacagctgtagttgacccacaggtacagatatggcctgaagcccaattctttttcagctactgctccccaggggcacttagtaatctcagctagatgaaggcttaattcactgtgcccacctcttagctctgaatgctgatactcaaaccggatgaacaactctgggaggaaagctgattgtgtgtgtggtggtttcctgggaaaccacctcctcacctcctgaagccaagagttagctgtattcttctagaggcttcagtctgctccataggatcggtggtagagactgcaggggcatttttgtaaaagtttatttggaaacatttcacttacagaaaagttataaaattaaaaacagtacaaagaacacccctatatataatatctgtactcagatttacctgttacattttctccccgttgctatatcacttatgagtgtgcctgccctcccatatgtgtatacatttttcctctttctgaactacttaagggtgttacatatatcatggcctttacccccaaatatttcagtgtgcatttgctgagaatagggatacttttacataaccatcataaaatgatccacttttgtaaatttaacattgattaaaaacttttatctgatatctaccatctgtagaacattgctcattttgagtttgtctgatgtctccccatgatgagatgcaggtgaggcactctggccagaaccttcacagggcaccacatctgggggcacatgctgtttatctgctcctcctcgtgttaatttcatccgctggtcaagatgttgctccatttctctaccgtataattactgattttccccccttgcacctaataagtagtctgcaggaagacattttaaggccatgcaagtatcttgctttcatcaaaatttccctctggtgcagtctttacgatgagcttgcaaaatgataactttccaactccagcacaccctccacaattaccagtcaycactcagtcctcactcctgccgattcttttrtatatacattattggtacagactcatgaagttctattttttactgatttataattcattgctgggctgcttttgatgccccaattgctgtctttgtgacatgcccccattggcatgttttgggttttttttgggttttgttttgggtttaattcctttttcaacatagcaaaatgttttgggtttgtcttgcactaccttggctggatatttgtaatatagggaaacaaataaggtgaggcgtgactaaaatgtctgcagtggacggtgcacacatgtttattgggcagttctttagctgtcctcatctagacacttctgcttctcttttcttcaccattctcaatcttcctttccagcttggtccaggccaatccagaggttgccatggattccatcatccatatgacgcagcacatatcacccactcagcgagcagaagtcatamggatcctctccacwatggaytccccttccacgtaggaagagcttcctgcctgtccctgccctgtctctggagaaaagggctagagctgccttttacaactgtaaccactgtaatragaaggcacaggagacccagcactggagtcaaatggcattttacttcctctcgtttcaggttatgcatgacatcctgggatgtaagatcacagaatccccctccagcccaccagtcacacctaccccattcagtatttattaccctggccaggcctagtcctccactccctgcacaggactgagaaggcaatgaaaggtacaaacatgtaccatgaggtcttactaaccaaagtagggctgcccctcctgtcctgacagccccttggcctcccagcatggggaagcgtgaggagttgcccagcagtgagcagcccccctcactcctggccccatgagccgcagccacaggcagcagaggagggctaaggagaggaggaagcctcaagtccattgtttattaccccgactcttagcccagcacacagtaggcactggagaggaatgattcccagtttaaccacactacggtaccttttatgaagaaaaattagagcataaaatctactacaagctccataggaactcaaagatgagggcaaaactgtgagccaagaagcagagaaagaaaatagaaccagttattcttgatttaggggacctcaaccttgggttcagtctctgaggacaaaggraaaggtagttgttggcctgcctctcgcctgcacgtcactgctggactagctgtcgcatgtggctgggagctgcaaggccagtgcttgaggggccccagcagttccacaggtggtgaagcctgagttggcagaggaggagccagaagagaactgccctttctgcactggtggaaactagttatttatgccatgtggagagccagtragatagatagatagtctgtttgttttgaggacttggaaagttgttcctatgaagcctggagcttggatggttttgagaggttaatggtgcctccacactcactcttccctagttccaggattactgtcctagcagctaacggttctactctcttccccagagtgtagacaggcagcaggtctccccacagctctgaaaggaccctggtgacagctacaccctcagcaccaggagctggccttcctgatgagggaggcttccaggaaacacagaatccacatgaccttaagattatttacaactcagtcatggtgctgctgtcctccaggcttactggcccctcctgactggcatcaggggcttcctcaggtggtggagagagtttactttcaacaactagtttattcaagaaaagaacttactgattcctctgttcctaaagcaagagtggcaggtgatcagggctggtgtagcatccggttcctttagtgcagctaactgcatttgtcactgatgaccaaggaggaaatcactaagacatttgagaagcagtggtatgaacgttcttggacaagccacagttctgagccttaaccctgtagtttgcacacaagaacgagctccacctccccttcttcaggaggaatctgtgcggatagattggctggacttttcaatggttctgggttgcaggtgggcactgtatggctgggtatggagcggacagcccccaggagtcagagcctcagcccggctgccctggtggaaggtacaggtgttcagcaccttcagaaaagggcataaagtggtgggggacaattctcagtccaggaaaatgcattgaccattgctggctatttgcttacctagtaagaattggattcatttttgaccagattattcttctatgcttttttgcaataaatcaaatcccacatatctacaagtggtatgaagtcctgcaccccccaggaggcctgtccaggcatgtcttcagaggcagggtgggttacactcatttacctcccctctccccaccaaattatgacacaaacgagtatgtttcctctctagaaccctgtaatgcctcctcccccatccccagagctccttactgtaggtcttaccctggacaaggattttttcaagttggaggcacagaacatgagcaatctgacattcccacagcccctcaaacatgcaaggctactaaggcaggaggagtataaatgatggatattgaccaagacctgcttggacggagaccgccatattatctgttctcttcgttcacaaaacagccttcacttgtctcagaatttgatggacacatactgtgatgagcaggagcttcagatgcactctttacacattttgttgaaataaacctctacatttgtagaagagttacagtttgtcatttcaatccatgcccagccacctcatttcttgttctgctttcagcaggggctcagtgtggggcaagcccctccatggccctgtaacacctaaagccctttgtctcctgaacttgcataaagatgatgggtaggcagtaaaaagctggccttggccagccctgtcttatccgctgaatcaaggtcaaactctgaaaggctacaaatgctcgggaaccccgtagcagagggtcagttttttagtttctgttgagtttttcaggatgggaaacttcttcctgctgagagctggatgggagtcctggcaggaatgtcccctccaaaagagaatgtctttagagcagggacaagaaagaccacagctgtttagtgaggataacagctccaggccttggaagcccagagcccactgtcctcctcagaagtcccttctcagcatacaggaagttgagagtgctctgataactcagtgtaaacactggggccgcatggcccttgttagagatttgagaggaaggttttagattttctttctttagctattcatggatttttaactctgggcacaaaaaggcactcggggcaggaagctcatgattccatgccgtcaaccctctgcctcagtttctctctctaaaaaaactttctatgggctgggcatggtaactcacccctataatcctagcactttgggaggctgaggtgggtgtatcatgagatcaggagattgagaccatcctggctaacacggtgaaaccccctaaaaatatataaaaaattaggtgggagcagtggcacacacctgtagtcccagctactcaggaggctgaggcaggagaattgcttgaacctgggaggcggaggttgcagtgagctgagattgcaccactgcactctagcctggtgacagagcaagactccgtctcaaaaaaaaaaaaaaaaaaaagctttctatgaatccctataattaaggcaggaataagcaccaattcctgaatgtctgcaaagatacaggtcacaggaggcaaatccctgccctttgctgattattaaactcaatgttgtatctgtctctctctttgggatatattgcaaagcaaagggttgctttttctaaaatgaaatagagtgttaagaaaatatcaatttgattcaccctgagccagatgttccagaaaggggagtcagaagggagatacaggataaaggatccagggggaagattgctactgtttgcctcccactgctgctcttcacaggcaaggaagcccggtctgtgtggcggcctgggcctcttcttccttcttccctcctccctaagcaggcagctgaagacaggccacaggtgtaagcactcagccagcacctgttggtggttctgaggcaggattccgctgctgcctctgggagcttgcccgatacagtttcttctgctggggcgccacacttccttcactcctcttttcaacaaaaggaaataataaatccccattggtcttactttggggtagtaaggaaaagactgcacagtgagggttctaggatccagatctaggcccacctctctttccccggctgaacaataacacagcgatgaacgcaaatgcctaaggaccatagggagggctgttcacccctagtaaacagggctcggtgcagggcagcagggaaaggcctgtagggaggcactgagctgaaaggcaaaccttccttcaaaccactggctcctcaggccctgggcacaagaagggtaacacctgggcctgccctgttccacatggtgaggcagaaagcaccatgggccagagggagtggtatggacaaatgaagcttattggcagagagaggctaccagctgcggcagggtggaagccagggcattccaggccggggcactgggatttacaaagttatttggggggcactgggaaggttgaaggggagtagagcagtcacttgggggagtaatagacaatgaactcccaaaaaacaagccggcatcagatataaagatccttaaatgccaggccaaggagcaagggtttgtcctttggtggtttatgggcacgtgaaagctgtgtataaagctttcgaaagcagccaattgaatgaaaagagcacagtcttgagtgccaagaaaactgkgtcyaagctcagcttaatcgtgtgcagtccccaagctggaggggcacccaggatagtatgcccgggccacccacaggagtggggaacaatcggctatttccagtgctctaggaatcctgctgtgcctcaggcagcagtctttccatgccgttgtctttgtgttgactggagttttacccaggaagtgcagtcctggtcacctcctgctggccagtggctctaatgggtgttgataataagtgatgggggtaggacatctttagaaatgcagtatcttggtaataagcaacatcttccaaagcatggggtttcctgtggttggtggagggcagaatgataacggagcctgagacttggagccacacagtgggctcagcccactaggaaccgcacggagacaggacagaatagctcagatggcgctgagtctgattgccaacattctgtgtcatgactggccttctagagtaatcagggagggctgggggtgggaagaggcagaacccactgtacaagtccaggctctgcagcaggaaaaagctcacagagcattcctgtccatgcaaatagctcctttcatagtcacttacaagaacagggactttagaataagcctgagctgatttccagtatccagcccctcactcttgtccttgagcaagttcctgcctcctcatctgtgaaatgtggacctcaatggggcattttgaaaaatgacattaaattagttgatgtgaatcaagtgcagggcatgagccgcaaaccctcaatgcaggtcaggtttctccatgccctgtctcttttgctcccaagactgggcgcctgtcatcactcaggggcaccttcctcatagggtattggtggagaaccgtcccctggcgagggcagggtctagggattgtctctacgtgttgggtgacatggacactaagcggaagtgccactgaggggctgtgcagctgagcctgaaggccgatctctaagcctggctgccctcacttagggcaggccttgagcagctcaagggtgttctggagtcctgccttccctgggatgtgaaagtagagtgtggaacgagaagatccctaagatcccttccagctctaggcagattttcatctgggatcatgggtaatgctgaagtctggataaaaatactccatgcccactggcattgtcagtaacagcagtaactcagcagcaaacatccagggaagaccagtggctcagcttggctcaagcaatagaccagcagcctagctagagctttaacagaagcaggaaatgatacagccaccaggggcttgataagctccccgcacatccacacaggagagatcagagaaggcccaagctagtcacacagccctagctgatagaacctgtgggcacatgaagaggaaatgccagagggcccagtagaaagtaaaagccagggcagatttcaaaactgctgaaatgttttaatatgtagcccccacgcgcgcgtgcatacacacacacacacacaccaacttatcagcagaagatagatgccttgctggctcaagatacatctgcctaaagcattggctgaccattaggcacaagggtggcccctatgaagctaggcttaaaaaataagaagttttaaaaagaaaaactgagcagaggctcggtgtggtggctcaattcctgcacttggggaggctgaggcgggtggatcacttgaggtcaggagtttgagaccagcctggccaacatggtgaaaccgtctctactaaaaataaattagctgggtgtggtggtgtgcgcctgtaatcccagctgcttgggaggctaaggcaggagaatcgcttgaacccgggaggtagaggttgcagtgagccaagatcgtgccactgcactccagcctgggtgacagaatgagattctgtctcaaaaaacaaacaaataaaaacaactgggcagaaacttaaacacacatacacacacacacatttacagaattaaagggtcaggtaggacaaccttgggcccttatttaaaaaaaaaaaaaaaaaaaaagaattggccaggcatggtggctcacacctatgatccccagcaatttgggaggccagggtgggcggttcgcttgagtccaagagtttaagaccagcctggacaacatgacaaaactccatctctacaaaaaatgcaaaaaaaaaaaaaaactagccaggtgtggtggcacacgcttgtcgtcccagcaacttgggaggctgaggtggaaggatgacctgagcccaggcaggtagaggctgcagtgaaccatgatcacgccactgcactccaacctgggtgacagagcaagaccctgtctcaaaacaaaacataaaaaagcacattctgaataaaattctgaaacatgctgcaacatggatgaactgtgaagacattatgctaagtgaaataagccagacacaaaaacagatattgtttgattccacttatatgtggtatctgaaattatcaaattcacagagacagaaaataaaacagtgattaccaggggttgtggggagaggaatttggggattactgttttcgtttttagagacagggtctcgctctattgcccaggctggagtacagtggtatgatcatagctcactacagcctcaaactcctgggctcaagcagtcctcccacctcagcctcctgaatagctgggactacaggtgcaagccactatacccagctaatttaaaaaaaaatttttttttttttttttttttttgtagagacagggcctcactgtgttgcccaagctgatcttgaactcctgggctcaagcgatcttccttcttcagcctcccaaagcactggaattataggcatgagccactgtagcagctgggagttattgttgttgaatgagtacagagtttcagtatgggatgatgaaatgttctggaggtggatggtggtgatggttgcacaacaatgtgaatgtccttaatgtcactgaactatacacttagaaactgttaaaatggtaaatcatatatttatcccagtttttgaaaaggaaattctgaaaagttgaccagagggactacacagatttgggaagacagaagaatcagtgcatgtgaaatcgtagagtaatagaattatccaatgtgaagaacagagaggaaaaaagagtgaaaaatgaatagaccctcagactcctgtgcagcaacagtgcgtttaccaacatatgtgtactgggggtgccagaagagagagaaatggaaaaactatctgaagaaatagtggccgaaaaattcccaaatttgatggaaaacatgaatctgcagatccaagaagctcaataaaccccaagtaggataaacaaagatacttacacctagatacctcatggccaaactgttgaaagacaaagaaaaatcttaaaggaagctagagaagaacaagttatcacttacagaagaataacaaaataaatcacagctgccttctaatcagaaacaatggaccccaggaggcagtggggcagtattgtcagagtgccacaagaagaaaaaaaatgctgtcaaacaagaatcctatatccagcaacactgtccttaaaacaagtacaggtgaaataaagacactccacaaaaaaagagaattcattgttagcagaccagctttataagaaatactaaaagcaatagttgaggctgaaaagaaataattccagatagtaattcaaatctactcaaagaaatgaaaaggtaaacagtacctaggtaaatataaaaaactgtgttctctttaacttcattaaaagacataaagttgcattaaacaataagtataccactgtatttt

SEQ ID NO: 95477 - DNA, 32368 bp, Homo sapiens
  misc_feature (1)...(32368): n = A,T,C or G
gcaagttcgcagtgcaaagtgaaaggaagtttattaagaaagtaaaggaataaaagaatggctattccatagtcagagcaaccctgagggctgctggttgcccatttttaatggctatttcttgatgatatgctaaacaaggggtggattattcatgcctcccctttgtagaccatatagggtaacttcctgacgttgctatggcatttgtcaaccgtcatggtgctggtgggagtgtccagtaaggatgaccagaggtcagtcttgtcgctattttggttttggtggattttggcccactcctttactgcaacctgttttatcaccaaggtctttatgacctgtattttgtgctgatcttccatttcatcctgtgacttagaatgccttaaccatctgggaatgcagcccagtgggtttcagcctcattttacccagctatttgagatggagttgctctgattcacacacctttgacaatagcatcagaacccacaggttgagggctcagccccacaagagttcttcccacttcagatctgaagtaacaagttctcacccatatttctgtccaatcggctataaattgggtttctatgaccgccctgctctggctttattaatttgttcggacaattcacagaactcaggaaaacacgttttctggcttattattgtaaaagatattacaaaggctacagaagaacagtcagatggaacaggtgcacacagcaaggtatgtgggaaggggtgtggagtttccatgccgtctctgccaccctccaggaacctccatatgttcagctatccagtctttttggatttttatggaagcttcattacacaggcatgactgattaaattattggccattggtaatgaactcaaccttcaggccctctctcctcaccaaaagttgaggtggtggggctggaagccccaaccctgtaattatgccttattgtttccagtgaccaattcttatcctgaggctatccagggaaagccagtcatgaatcattagcatacaaaaagacacatcactttggagattccaaggattttagaagctatgtgccaggaaatgggaagaagaccaaatatctgttttacaacatcacagttccctaacatcatccaaaggtgacaagtgaggttttaaaaaatcattatgaattcatgtatgtgaatatatttgatatttttcaatccactgaagttattatacttgtcgatgctcaaattttcccatctttaaccagtgggaacctatttaagttggctcccaaatccttttgacataaccctactggcctttaaaacttccctgctttccgacatgataagatgttccaggctttctttacgtttcctaatccgacccaggcctggggttagccatttttccaaggcagaggttctcaaagtttggcccaggtcctcttaagagtccctgtgatccttttatggggtccgtgatgtcaagattattttcatagtaagagttatcactcagtatccatgtccccaaggatactgagggtcccaggacccctctcagatacccaaatccacagatgctcatctcccttgataaaagaaaaactgtagacaaattaaatttaacaaagtttaattgatcaaggaaaaagcaattcgcaaattgggccctcagaatcacagcaaattcagagagttatttctgcacagttggagagattttaagaatagaaaaaggaaactgaaatacaaaaaaaaaaaaaaacacaacagaagtgaggtacagaaacagccagattggttacagcttggcgtttgccttatttagacctggtttggacagttggccacctgtgagtggctgaagtatggctgcagtgattgactgagatgcagctattgttacagaagtatgtctccattagatttttcagtttgcttatctattaagttaggttgcaattcctaagtaagaactccagtatgcaagtatggagactttctcgggccagattttagtttggtttagcaccctcatataaaatggggtagtatttgcatataacctatgcacatcctcacatatactttaaatcatctctaggttatgtaactgagtatccccatttttctaagaaaaagagaatgagttattattttttattagttttcttcttttctcttctgtttcttgctattctccacttcctactagcccgtttgaaatgcaattataacctttacctccccttcaccagacactccctacagggcaagttcatctaactttgtactcagaagctccagaacaaactctcacccaccaggagattgcctcaagaggtaacagtcgatttacaacccaaagtatacatgatgagaaactctttcccaccgggaaagtttttggccattttaataacttatttctgcccatgaagatgccaacttgactgcctagtagataaggtgccaagctagcatgtggacttcctacccacttgctgtctcccctgcctttcgaaagtacccactttctgctccaaaagtggagcagtacctttgaggctggaagcccatacttcttcccctaagctagctttggaatacaaagtcactttctttataccagacctcgctcttgttaactggactctgcaagtgttgagtgactaaacctgtgtttcagttacaattacttataatacctaatacaatgtcaatactctgtcaatagttgttaggctgtattgtttaaaattcatattactttttattgttttttttcctgaatagtttctatctgtggttggctgaatatgtaattgtggaacccacagatacagatgactgactgtttgccctttttattttacccttataaagtctcattctctcacaaatatacatggggattttcagaggctatacgatgtgttacattatgattgaatgcagaagcagttataacaattctgctgtcatttatgaagcaagacattaaagacatttacaaaaatgtaaaacaatggcactcttctcactaattttttaatgagtacattgttactttaaaatgtttaatttctaatgcagtaaacatcaatagattaacccacataaacaaaagctctttgggatctccaacaatttttaagaatttgaagaagtcttggaagcaaaacttttgagaactgctgcttcaagcagtcctagttcctttcagtggaaaatgtacatgagagatcacaacctaagaacaaaagatgctcatgattattggtttgccaatttcttttaggccattatcaacaggtagagctaagacaaaattatatacatttttaaagataaaatacaatatgagttcatactgattcttcctgttcacaatttgactataggatttttacttaaacacatacaatttatatacatgtctccccataccaaaaaagatcagtttttacaacactcacgtaaacagttattttcagtgtcagattaacaataccatgatcaacaccactatcctcaatatgattatttaaaacagtttaagattttttttttttttttttgagacggagcctctctctgtcacccaggctggagtgcagtggcgcgatctcggctcactgcaagctccgcctcccaggttcatgccattctcctgcctcagcctcccgagtagctaggactacaggcgcctgccaccacacctggctaatttttgtatttttagtagagacggggtttcactgtgttagctaggaaggtctcgatctcctgaccttgtgatccacccgccttggcctcccaaagtgctgggattwcaggcgtgagccaccacgcctggccaagattttttttaagttgttttttttttgtttgtttttgcgggttgtctctcagtggatttacaataattcaatggtttaaagttatagttgatccttgaaaaaaacaggttgaacttcgagggtccatcatacgtggattttcttctgcctctggcaccccaagacagcaagaccaacccctctctttgcctccttatgattttcttaataacagtttattttctctggcttactttattgtaataatatagcatataatacatatacaaaatgtgtgttaattgactgtatgttatcagtaaaacttctggtcaagagtaggctattaagtttttggagagtccaaagttatatgtggatgtttgattgtgccaagtggaggggattggcactactaaccctagcgttgttacaagggctattgtatttagaatgatgtgtacctttgagattatgccaccaagtggaccaattaagagctactggtttttacttgatttttatggactgctttttgtaaatttaattttgttttgtaatgatattgttaaaattaaaactttagaaaaattaaatttagcagaaattaattgagcaatgaccaatttgagaatcaggcagccctcagaaccagaggaggttcagaaagtatcgttccacaaagaggccaggcagcacgcatagaaaaaaaacagaaatgagatacagaaacagcttgattggctacaggttggcctttgccttatttgaacatgggctgatcagttgaccacctgtgatgattggctgagactcagttatttgttacagaagtatattcctaagttaggctgtgagttaaattgcatactaagttgggttgcagttcattatataaggactcaaaatacggagacatctttaagctaaatttaatttcacaatatgaaatatttacttggttctaaagtcaaatttatgaagtaagatgtttccagagatgtctagattctatccctgtctcctctatcctatttatttcctccaccataggtagcatctttaaaaacctcaattgttttcattcccattattttgaaaatttaagaaaatatgtatatatattgaaattaccaccatctttctctttttgggtaaaagcatactgtataaattcctatccattttttttccactttgtaatgtattctggagatcacaccacagatgtatatagagttcttccttattacttttgacgattgtattagcatttcattgctttgttgtgtgaaagtttttgggaagccactgttttggactagcttcacgcactaggccccagcagaccagaccaaaccagaatggagtcgtttgtgctaagtaccacacaatcaaactgaactttgaaatgggccagtttcccaaaaaataggaaattcccttaagtctgagtcagtgaaacaaggaagtttcttctgctttaaccctaaaagtaactttgaaacgatgagtccactttttgttcggtttctgctttcttcagcccctatttgccaataaaaccaaccgcctctgctcagctgatcagaacactcattctactttatagaatgaggtgttttttgattctagaatcacgaataagagtcaattaagatttttaaactaattcgttgtaatgctgtcttttgactgttgtactacaatttattcaagcagtcctttatttaggaatttgggggtaatttccaatattttggtattatgaatcgtgctgaatagtcgtgcatgctctttcatattttcaccacacgtatttttgggtgaaagcatgaattcatctatgcaattttgctagatattaagctactcttttcactattcctgtacagatggagggacggatgagacagctgcccagggcacttcagcagttactggcatagctgggatttgaactgggatgtaactattttcatacactctctaggtcattccaaggtgggagaggcaagcaaataattttgaatctggccagcatattcactgaaacatttatgcttatccttcctcctcccagcatacaagttcttccttagcaaaacctccagtcctctaatttagcatactttcgtctaatctgtcactttcctcaggccccacaactacgagtactccttgtccccacccggtcctaatttggtcgggtatagcggaggtgggcgtagagagaactggaggtggagacctttgtgcatgcccacacactgctttcctcgcgaggaatstggggcccttgcagaggcggaaccaggatgtgacgtaataaccgcgcgcggcgctcggcgttcccgcaasgtcgctttgcagagcgggagcgcgcttaagtaactagtccgtagttcgagggtgcgccgtgtccttttgcgttggtaccagcggcgacatgacggggtacactccggatgagaaactgcggctgcagcagctgcgagagctgagaaggcgatggctgaaggaccaggagctgagccctcgggagccggtgctgcccccacagaagatggggcctatggagaaattctggaataaatttttggagaataaatccccttggaggaaaatggtgagtgacagacctctccggtcccccccaacacatcccactgctgccggcagcctgaacactgaacgtccgctccctgcagccacaccaaggactgataacgctcagtgctctgggacactggccagtcccgagagtcctcctggagtctcgggaggcaggagtccaggaatatgtatggctttgagagaatcatgccttttactgtcaagtacagtggacgggggcgaattttaatacttaggttttccaggacgctgcacgtttggttctcttttgactgtagaaatcttccctcagaataataaccaaggactcgctagaattaaaattctgtgatttaagtatttgaggacacttgtctgacttttaagtgtgaggttctagagaccaagtaacacagtatccaaccaccagagggcacagccagcccctagctgatagtacagccccatgtgatccccgtaaaagacagggtcctgttggtatgccttgtgagtcacattcaagagctacctttctaaactaccgttctgtacttttaacacagtgtttcattaaaaaaatcgcattttgggctttgaagaaaatcactcattcaagaactttattttcaaggcctctgggtattttcttgaggactgttatggatgataaacatctcagaattgctttcagttacctgcaacacttactgatgacaggataatagtagtaacaatactacgtaacacacgggtgcttgctgtgtgcttggcactctactgggggttttacatgtgttacttcatttctttattcctgtaaggtagatattcctaatcctcattttaaatgtgaagaaactgaggcctacaaagcttcagtgatttgctggtggtcagggagctaggaattgaatatgagttcatattgtaatcaacatgtatctgattcttactgtgctacaaagtctagtgcaatagaattgttgaaaatttttctgagaaagtgatattggatacttatttatggtggtaaaattcaactcttctcccaccctttgtatccctgacattatcggaatattggcagtcactgatttaaagttgacatcccatccatcagcaagtgatataaggaagtaaataaataataatgtgtcgaagttcaccttaccttactttaatttattcttttataatcatatctgttataattcttagattctggattgtcccttccttgaatggataggtgttttttaatcaagttggaagacatgggaaagttccatttttagttcttttttaaaatagtgttgcagagggcattttggagtgagtttgggacaccccatcttagtatgtaaaacgtcctttttccagcattggcgttgtcaaggttgtctgccttatayctaaaatgatgtgagtgtcattgatcaataaataagggagatgactatacctgaaaaattctgtaggtttgattactctggttaaatacattaaaattattctttcattattttgctatattttatctttaacmaacttataataaggatatttttggaagtctttaaaaaatctataaawgccttgttatagtcttgcaaaatactgcttaagcattttggtctggactttgtaggtatcttctagcagactctgcatttactaagaatatttgagtagatgaggttacctacagactataagaaaatatgtgccatttagagttttgtaaaatagtcatggcattgttacatcattgatgccttttgttctgccataaatataaaaaatgggatatgtttattttgtgtatgtgtttttccccccaggtccatggggtatacaaaaagagtatctttgttttcactcatgtacttgtacctgtctggattattcattattacatgaagtatcatgtttctgtaagtatgtccttttcagaattcatttttaatattgtccaaaattactttctttgtggctatcttaccctacttagtggaaataatctgccacttataaacagattttgaagtactttgaattctcttaggtaaaaggtttaatgaaagttacataattgggtatagtttttaaaaaatattgtcactagtttacaacttgaaatggatttcctcatagaaattagtatttaagtgataagaatgtagtgacctaataatactagggtaaatttggagtcatgaataggaagggagaaaacaattctgctcctttttaaaaacctgtatctcgtataaggtaaaaattcaaaatagacaaagcatatctttgtcatcacccaatttctgttcccttcattttatctgattcttcacaatttttatttatttagaactcaggatgtccagatgcctgcactttttcactgatacagatcttgcatgggctgatggaactgagccagttgtggtattttaaaggcttggtctggtgcagggtgttggatcccaggcagaatgagaagggcatgcattttgggaagtggcgtggcagagggagcagtggtgactgcgtagcctgaagtgttggagcacaaaagagtgaggagggcattcgtataccaagagaggggtgttagatcctcagtgggttgcaggggaggagggtgagcacatctgtttggggagcaacagtggcaacagcctagtataggatattggtacctgagcagagggaggaggacatctggaagaaggatggtatgaggcagtgaggcaagtggtaactcagagcragatgtcagaacctgaatgaggtgaggcaggtattaatgctgggatgtggttgtggtgacaggagatgggttatatatagggagattggccaaatacaggcatacctcagagatatttcagaattggttgtagaacaatgcagttccaaaagtattctttggttytagaccaccaaaacgagttacacaaattttttggcttcctagtgcatataaaagttatgtttacactgtgctgtggtataagtgtgtaatagcagtatgtgtaaaagaacgatgtatatgctttaatttaaaaatactttattgctgggccatgtgtggtggctcccacctgtagccctagcactttgagaggccaaggtaggaagattgcttgaggccagaagttcgaccggcttgggcaacatagtgagactccatgtttccaaaaaaaaagaaaaaaaaatagctggatgtagtggtccacacctataatcccagctactcaagaggctgagatgggaggattgcttgagcccaggatttcgaggctgcaataaactgtgattgtgccactgcactctggcctaggtgccaggttgatatgctgccttaaaaagaaaaaacaggccgggcacggtggctcatgcctgtaatcccagcactttgggaggttgaggcgggtggatcacgaggtcaagagatcgagaccatcctggccaacatggtgaaaccccacctctactaaaaataaaaaaaatgagctgggcatggtggcgggcgcctgtagtcccagctattcgggaggttgaggcagaagaatcacttgaacctgggaggtggaggttgcagtgagctgagatcgtgccactgcactccagcctggcgacagagtgagactccgtctcaaaaaagaaaaagaaaaaaacaaaaacttcattgctaaaaaatgctaatgatcatttgagccttagtgactatgtatgatctttttgctartggaaggtcttgcttccatgttgataactgctgactgatcagggtgatggttgttgcaggctggagtggctgtggcaatttcttaatataagatagcaggcggggcgcggtgtcccacgcctgtaatcctaccactttgggaggccaaggcaggtggatcacgaggtcaggagttcaagaccaccctggccaagatggtgagaccctgtctctactaaaaatacaaaaattagctgggagtagtagtgggtgcctgtaatcccagctactcgggaggctgaggcaggagaatcgcttgaacccgggaggcggaggttgcagtgagctgagattgcaccactgcactccatcctgggcaacagagcaagactccatctcaaaaaaaaaaaaaaaaaaatatatatatatatatatatatgcacacacacacacatatacatacacatatatatacatacgtatatacatatataagtatatgtacatatatacatatatatatatgtatatgagacaacactgaggtttgccacatcgattgacttttattttcacgaaagatatctctgtagcatgagatgctgtttgatagcatagcattttacccacagtataactttcaaaattggagtcaggcctttcaaaccatgccgctgctttatcaactaagattatgtaatattcgaaattctttgttgtcatttcaacaatgttcatagcatcttcaccaggagcagattccatctcaagaaaccactttgtttgctcatccaaaaggagcaccttctcatctatcaagctttatcatgtgatggaggcasttcagtcacatggtcaggctccacttctaattctagttcttttgctatatccactacatcgagttccttcctgcaccgaattcctgaacccctcaaagtcatccacgagagttgaaatcaacttcttccaaactcttgttcatgttgatactttgaccacctcctgttaatcacaaatcttcttaatggcatataggatagtaaattctttcccagaagattttccattttctttgcctagatccatcagaggaatcactatcttttttttttctttttgagacaaggtcttgctgtgtcacccaggctggagtgcggtggtgccatctcgactcactgcaacctccgcctcccaggttcaagcaattctcctgcctcagcctaccaagtagcttttgatatgaagtgagaaacatgcagctctttcttttatttgaacagttagaggtcattgtagtgttattaaattggcctaatttcagtattgttgtgtctcagggaataggacagtccaaggagagggagagaggtggggaatggccagttggtggaacagtcacaacacacaacatttacttattaaattcactatcttatatgggtgtgatttgtgttgcccctaaaatttgtagtagtaacatcaaaaatcactgagtgcagattaccataacmaatattaatataacaatagtgacaaagtttgaggccaggcatggtggctcacacctgtaatcccagcactttgggaggctgaggtgggcaaatcagctgaggtgaggagttcaagatcagcctggccaacatggtgaaaccccatctctactaaaatacaaaaattagccgggcttggtgcacgtctgtagtcccagctactggggaggctgaggcaggagaatcccttgaacctgggagaaggaggttgcagtgagccaagatcgcaccactgcctgggtgacagagcgagactccatctgaaaaagtttgaaatattgggagaattaccaaaatatggcacagagacgtgaagtgaacacatgctgttagcaaaatggcactgagtttctgggatcggttcccggcccatgccagttttgcagagcacacctggtgtagagccctgtgactggggcctggaccagcttgagcagctggccagcgggtgccactgcctgcggggcccagaggcgttgagtacatctgcagtgctccagaagcacaagactgtgaagctgcgggccctgtgcagcccgaggaagtttggcatggcgggcaggagctgccgggagatgctgcgcaagggctacctctgcttctagctccctcgtacgaggatggcatggagctgaccgaagcgtcctcgacgatgccgagctggtgctgctcacctcacgccaggcctggcagggctatgtgagtgacatcgggtgcttcctcagtgcttttcgccagccgcacgcgtggctcatccaggccgcccggcagctactgtgtgatgagcaggcccccacagaggcagagactgctggccgacctcctgtacaacgtcagccagaacgtcgcagccgacacccgggctgaggacccgctgtggtttgaaggcttggagtcccgattttggaataagtctggctatctgagatacagctgtgaaagccggatccggagttacctgagagaggtgagctcctgctcctccatrgtgggtgcagaggctcaggaggaattcctgcgggtcctccrctcyatgtgccagaagctccagtctgtgcagtacgacggcagctatacaacagaggagccaagggtggcagccgtctctgcacaccggaaggctagttctcctgccagggtcccttcgacatggacggctgcttgtcaagatactccatcaacccctacagtaacagggagagcaggctcctcttcwggacctggaacctggatcacatagtggaaacaaaaacgcaccatcattcctacactggtggaagcagttaaagaacaagatggaagagaagtggactgggaatatttttatggcctgctttctacctcagagaacctaaaattagtgttgtctgccataagaaaaccacccacaaaaccagctatgacctgaacagaatctacaaaccccagacaaggttgaagaggaagtggcctgtgtgaaagcgccagtgacatatacacaccatattctcgtctttgttcgaggcctgtcgtgggcataattttaacaggtgcctttttttttttttggtcactccagtagctcctggaaaaaaccttaaaaaatatttccggcaaatctgatttcagtacatttctgaatcattgtttgtttgtttgttttttgtaggtggagtttcactttcgttgcccaggctggagtgtagtagtgtgatcctggctcactgcaacctccgcctcccgggttcaagtgattctcctgcctcaacctcccaagtagctaggattacaggtatgtgccmccatgcctggctaatttttgtatttttagtagagacagggtttcgccatgttggtcggsctggtctcgaactcctgacctcaggtgatccacctgcctcggcctaccaaagtgctgggattacaggcgtgggcctccgtgcctggcctgaatcattttttgtaccttctgacagcccaacttccagaggacaactttggggtactcactggatgtcttgtgagtcgtcagtagggataagaattgtcctgagctgaggaattcttctgttctctggttttaccagtatttggtttgctcatgtggtgtggtcaccatactaaaacggtgtcatggctgaagttagccactcttgtttgagggacaagttgtttatgcatcagctgtctgctggctctccatttccatggcaaatgggcagctccatccttcttgactgttctaaatgcccaaaagagaggtgtcatgctttgggggtaagatgtttgtactccataaagaacataaaaggacattcactgctgaatttttttcttttttttttttgagacagggtctcactgtgtctcctggctggagtgcagtggcgcgatctcggctcactgcgacctctgcctcctgggttcaagtgattctcctgcctcagcctaccaagtagctgggattacaggtgtccgccaccatggctgactaatttttgtatttttagcagagatgaggttttgccatgttggccaggctggtcttgaactcctgacctcaagtgatctgcctgctttggccacccaaagtgctgggattacaagcgtgagccaccgcacctggcctgctgaattgtttataatggcaaaaagtaggaaacctcccaatgtctatgaatagggccatagctattatgtcgaaccacatgaaactgccgtttttctaggccaaaaatggtgagcgatcgttaatttcatgattcaacttgatacatttacatagtgcaaaaggatgttgtagtttcaagcttttatgaagaaagtgtttctgtgtagaaactggaagctgttcagtgcactggcagctgaaccctgctcctgctccrtttatcagagttactatcatctcagataatatggagctcatgtcagcagtgcaggtggtgagtgcgcagagacaatctggaaggaaacgctgatctgaacagcagtaatcctgggggacatgggggtgggactggattacagaggactcattttctaaatcatgtattttatgatacttgaatttttttgaaatgggcatttatttaatgacatgttataatgtactttttttttaaanaagtgtaatatttgaatttttacatttgttgtgtaatcagcagaagcaataaagatttttcagaaaaaagaaaaatggcactgatagagttgcttgtctcggggttgctaaaaccttctatttataagaaaacacaatatatgtgaagtgcagtaaagcaaagtgcaataaagtaaggtatgcctgtgagtacatatgttgatgataaagggacacaggattctcactgccggaaaagggagttacctatgtgaaaaggaagaaaagtttgtggtggtagaatggaattggaggtactggtgtgaactcatggtttttaaaatgtattgatagacctmgaaatagatatagatgtaaatgtggatgtgtgcatgcgtgtttgtgtgtacatattctctagctatgtccactgagaggacctggaaacattgccactccttagtaattagcacacttagaagctaggtcttattttctaaatacagttatgcactgaaaggacccagagctcagagcagtggccaattctagggcgggaggagagaaagtataagatgagcttggaacatattattgtgccagaaagtaaagaagtgctgaaagaatgatgggaacatatttcaaaggacacagagtcagcttgcaaggactcctgcctgggcagtttgaacttcaaagtaaataatgatagtaatagatgatagtcacctgaataaaatgaaaatccatgagtgcaaactgatataaataagtgaattaataaatgggtagaaaagaaagctttttgatgcaataatttgctgaatgatagaattagaaaaattaccatttgagaatcatcatagtaatatttaattcagctaaggaacatcaaaggatgctaacattagtctgggcacagtggctcacacctgtaatcccaacactttgggaggctgaggtgggaggactgcttgaggccaagagtttgagatcaacctgggcaacataatgagaccccatccctccaaaaaaaaaaaaagcccaatagtcccacctgttcaggaggctgaagcaggaggatcgcttgagcccaggatgtggagcctgcaatgagctatgattgtgctgcccactgtactccagccatcctgggtgacatagtgagactcccatctgaatcaaaaaaagaaaattaaaaaaaaaagaggatgctaatactaattttaaaatacttatcctcaaartatttaatttgttacaaagagagaaagagtatctttgtagtagagaaatctggcagacgccaccttagtcaaggggtctaaattaacattattgataatggggcaaactgaaattatgttacttgataggctgcaataagaacacagcattacttttgtgatattcctgccaaaggtgcataacttgaatgtaatttattgattaaattcatatgaggaaacagaagataaacccaaactgaggggctgttctccctcattattggcattataccttcagaaatgtcaagatcatgaatgttaaagaacagctttaagattgttccagattgaggaagaataaagagatatgccaactaaatgcaattcttcattaataggcataattgcattatctgtaagaacagtgacggtgttggcagtcagaattttaaagagcctgcacagtcaatggagaacatgtcatgtaaggggattttctgataagtccaaacaattattgagacaattgagaagatttgaatggattttttagatcaggtagagatagtaatgtatgagtgttaatttcctgatcttgatagttgtattgtaattattttaagaatattgtctttgcttgtaggaagtatactagagtaataaactagtcagcaatttactataaagtgattcaaggaaaaaattattttcattcttgcagctttatgtaagtttaaaattatttcagaataaagacagaagttaaggactgtctaacaaattatagataatccagtgaatgttggctttctgttagcctattgacagaagagtgaaacaaccaaaattttggggggttttcagaacacccctgcccccaacataacttactctctttgattgtgttctctattgattgtgtagactctttaaaattctgattgctgacatctttgttccgtgtactaagcagattaagccccttgattaacaagtacggagtgcctagcatgtcctcttcctttattgctatagaaagaatatacaagaccaaattcctgacctcaaagactttatagtaaagttggaagataggtataatttgggaaagagtacggaggaaaaaagttaattcctgttagaagcaaacatatggagtcagtaatgaacgtggccgtatgtacctaagactgaggagctgactagaatggaaggtctgttgactaggtagcctgggaccaatttatggaaggtgttgaaagttagatagaagaagttgaactgcatgtgataggcaatgggaagctttccattttttaatgggagagtgacttgatgaatgtgatacattgaggaaaacaaagaaaaacattgaaatggatggtgaattgaagggaagaaagttctgacagcagggcagatcagctggaggccattgcgttttagtagatgtcagttgagaatctggttagggtgaagatagcagggatgaagaagaaaaataaagccagagacacttctaaaggaagaaacacctgaagttggtggttgattaagttggggataaaaccaaagttcacagtcatttatgactgcaawatctctagccttggaaattacaagtagggtattggaagggagggctttctgatgatgggatagaagtgaatattttagactgggtgyggtggctcatgcttgtaatcctggcactttgggaggctgaggcgggtggattgcttgagctcagaggttcgagaccagcctgggcaacatggtgaaaccccatctctactaaaatacaaaaaaatyagctgggcttggtggcatgtgcctgtaatcccagctactcagaaggctgaggcagaagaattgctggaaaccaggaggcagaagttgcagtgagtcgasattgggccaccgcactctccagcctgagcgatataacgagactctgtctcaaaaaaaaaaaaagaaaatagtgaattttttaggagcrtgtgctgccatggcagttttggagatgtccaagtggacatggcctgtcttatgtgttagaaacatgagattgttagttctaagaggaattagagttgggttaggggattttcacattacaaaccaacacaaactctctctacaactattaaaaagggctaacaatttgtatatctaagggtgagagaatagtttgtatttctgttgttgatgggctttaaaaaagtttatgttcataaaaaggctacttcatttcattatacatctgttatgttttcactattttggcatgtaagaccctagagaagaaaatatattactttctgtcagtgaaagtttaacatccaagagtgatttttatgtgcagaaagaactggttacagtgacttaaaatccagattaatgtatggttcttgagtttcaaatataaaaacatatttttttcctaattctttaaattcagttttaaaattctattaaactatgcatctagtaaaataagaataatctcctttgtttttactatctttggattaattgaagttgaactcttctgaaacaattccatttacaaacatagctaaattctgttaaatattttaaattgtatttatacattttgtgtgttcaattttatttcgaagtatttatatggtaaatttatgattctaagaagtaatttttttcaacctagaatcacaaatcaattatgcattttaactagaatcctaaacctaattttttaaaacctctgttagccagattatcttacacattacaaactctgatcaacagaatgtatggaatgtagcaatgttttcagaacttttaaaagttgacacattcacttatttatactctgggtttaacttactttatcatatctaaatttaactacatttttctgggatcgaaaagacatttctaagagaagcaaatttaacaaactgcagtcactaggttgacaatttaatacagtaatgtggttgcttatctgagggttcacacttccaggtgatttttcctgagccatagatggacatatttagttaaacattttgtgtcagtagaggtcccagagccactcacttaccttactttttctcttgattttggtaggtaaaggattgcatcttcaataagattgcaaccagtttgcttcagctcactcctttgctgcctaattgaattctgcatctctcagatgacttttcagtgtctttttgccttttagcacgtaaagacattttaaagtgctcacattgtattctgagtttctctcatgttccagttctctatgcctcatatcatgccaataatcttttaaattttgggcagtggtatcttgtgcagatgtatatgcataaaaagtacatgtattcaacaattacttatgtagtacctcttatgtgcaaggcattgttttaaagaccaggatacagcagtgaacagagcagattgagtccctcccctcatgaaatgtttagttttagagactggtaataaatatataaacaaagaggtatattaatgttataggagaacaagtctatagaagaaaaattaagcagggtaaaaactagagaatgataaggcttgctattttaattaggcctctctgaggaagtgatctttgaagacaaacataaatgaaatgaagatacaggtcaagcagtatttaggagaagagcatttcaggtagaggaatcatgaagtacagaggccttgaggcacaagcaggcttgactgaattggactcctaggaatggagccactgtggctgtagtagagtaagtgagggagaaaagactggctttttctctaagaattatgaaactttgagcagagtgacatatcttaaaagaatcagtgtactctgccttgaagtgtggagaatagacttttcatttgcataggagggcacaagtggaagcagggaggctagtaggtgctgttgtggtagttgaggtgaaaatatgatagaggcttggacaaggctggtgatgagaaccagttggattcagggtatattcttaagatagaattaacaggctctgctgaggagtcaaggtttctgtctttcataactgggggaataagagtgtcatttactgagatgggggacatggggaggaacagtttggggatgggagaagttaagtgtgggacctggttaagtttgagatgcctgtttgatagctaagtagagatgttgagtaaacagttggatatgtgaatctggagttctgtgaaagtttggagcttaagttaaaatttggggtatgacctatttcttattttcagaagaaactcttaacaccataattaacacagagttaacttttattacaggaaaaaccatatggcatagttgaaaagaagtccagaatattccctgtaagtcttaacacttctgatttttcttttgtttattgtttttctctttccttttcctccctttccaagcaattattagattaaaatgttctttccttctcactttcggwttaagtccctgttttgtgtattcttgtaaaaaacaaaacaaamcaaaaaaaaacaggaagaaataccgtgaggtaacaattacagttcaaatgggaagtgagcacatttattttcaacctggctgtaaaacgtgttttgtgaccttgattttcctaaagggagttgaaagtaccaaaagtttttcactgtgtcctgtttcatgttgggtaaagagcttagggcatgagcctaagcaaacatccatgcatggtgacagcaactgaatttctgttattaattccaaactctcatgtcctatggctttgtacctcattttcaagatttgaccttaagttctccatctgtgaatttaatatccactaatgggtgttttaaattttatactatgggccaggcacagtggctcatgcctgtaatcccagcactttgggaggccaagatgggtggatcgtgaggtcaggagatcgagaccattctggctaacacggtgaaaccccgtctctactgaaaatacaaaaaattagctgggcgtggtggcgggcgcctgtagtcccagctactcgagaggctgaggcaggagaatggcgtgaacctgggaggtggagcttgcagtgagccgaggttgcgccactgcactccagcctgggtgacagagcgagactccgtctcaaaaaaaaaaaatgtatactatgaatgtgtgagctatagtactaatttgaaatgagttattttagcattaaaaggtgactcagtagtcagttggtatttactagctgtttgtgaggttattgtttagcatagtagaatacatactatgttcttgtctatttctagtcacagataatgaactatcataactcaaaagtacacaatttaaataacaaaagtgtgattcttgctttaatcaaatgacttagtcacagtaatgattatctgttgcaacaggggaattttaggaagggccaccaaaactggccagcggtcccagttggaacgctggtttaagaaatagttgggggaggggccaggcgcggtggctcacgygtgtaatcccagcactttgggaggccaaggtgggtggatcacaaggtcagaacttcgagaccagcctggccaacatggtgaaaccccgtctctactaaaaatacaaaaattaccgtgcgtggtggcgggcacctgtaatcccagctactgaggatgctgaggcaggaaaattgcttgaaactggaaggcggaggttgcagtgagctgagatcgtggcactgcactccagcctcagaaatgagtgaaactccatctcaaaaaaaaaggaaaaaggaaaaaaaaaagtagggggtatcgggggctcatgcctgtaattacagcactatgggaagccgaggtgggtggatcccttgaggctaggggttcgagaccagcctggccaacatggtgaaacaccatctgtactaaaaaaaaatacaaaaattagccaggtgtggtggtgcacgcctgtaatcccagctacctggaggctgaggcacaagaattgcttgaacctggaaggcagaagttgcagtgtgcggagtttgcgccactgcactccagcctgggtcacagagtgagactctgtctcgggaaaaaaaaaaaaaaaagtgggggccaggcgcggtggctaacacctgtaatgccagcacttygggaggcagaggcaggtggatcacctgaggtcaggattttgagaccagcctggccaacatggtgaaactccatctctastattaataaaaatacaaaaattagctgggcatggtggtgcacgcctgtaatcctagctaccggggaggctgaggcacaagaattgcctgaacctgggaggcagaggttkcagtgagccaagattgcgccactgcactccagccttagcgacagagcaccctgcctcaaaaaaaaaaaaaaaaaaaaaaaaaaagtaggggatttctccttttgttttattgtgtaacattgatgtgtgttacagcctaggtagtctcaaaataggaaattatcttgctggtttttccagctgggcaatttatatttatttagtcttccatttattccatttaaatgttaatttattttgccatttactgttcaaaggaaaaggagagctctattcagaagaccatatcagggatcctgtagcatttctcatatttctgtattttttgccactgtggttctttcttgtttctgtgccatgacccctttgaggaactgaagaatgctcattgtatatatgtttagaataggacaagtaataacaaacttccaaatctcaatggcttaacaaaacagaggtttatttcttgttgacatcacagactactgtgaatcaggtgatcttcctcaatcttacagctgtgcctrtcgaatatgaggttccaagatygtgatacaaagatacggcaggatgtctcrggggatgatttttaggatctaagcttagaagtagcttacatcacttctgctcaaattctgttagctaaaactcactgtcatcttcccaaatattatctgtgtgctctttgctatttcccagacccctgttcatggagtttctgctacattccatctttctagtcaccaaacagctcttggcttctttctttacccatgcataacacacttagtctctctccttagggagaaatcccaaagtcccattccatcattgcaccccggccccaaatccatgatctccagatgatgtaaaatagtatgtcaggtttatatatgacttctgttgatctgaggatcagtgaactaagaagacaagttaactgtatccttgtcccccaaccacacccattgttcagtggtagaatttggatagcatagtagtcactggttcttggcaatcctgaaatctcactcctaacccgtgtgtgagaaattacttgaatgggcactgattttgttttcttgaaagaacacctttatccatcgttcttcctggttcctggctctgtccagggggtttgttcttttcattatctacctagaccacatctaaatggtattgggaagcatgccctccttagggggctgtatgggcttcagaatctgccacctgcttgcaggaggttgaatgccagaggttgttttaatttcaaacattctggcaggattctgtaaactatatgtttggtttgtccatccatttcccttaacatttagaagcatgaaaagaaaaatatttggtagacatctaatgtgtttacttctagtcagtttctcatgccagtatctgtttttcctatacacagttaccagcttgtctcatttctttgtccttatgcatctgcctctctcacctctgtggcagctatgtggaggccatctgaggcagactggttcaaaggctaccttcattttaaactgatctttgccatagggctgtgtccctctgtttgagttttattgggcttctgttgctcagatttcttgtgttaacttattgtttaggaattctgaagtagtgtgatttttcaataccacaaggtcctgattttttatttattttttagatacagggtcctactcttgctcaggctggttttgaactctgggcctcaagcaatcctcctgccttggactcccaaagtgctgggattacaggcatgagccaccatgactggcccaaatttttagattctattaactttttttttttttggtcaggaacagaaagtctctagcgtgcaccaaagtgttctctcgtcctctccatttttatgtcgcctctcaaatcagccactttttgcctgagctcatgcttcttaaagtacattcccaaggcatccaaggatcccaaggatccaaacacatactataactttttttcccagctacttcttctagaacctcaagttcattaggcagtcagcttccaagttataggagatattttgctaaatagtttgccactgccttttgtttccatctttatctttgctaccagactgctaagccagtgccctatagcttgatttttattacagcagcattagtgccacttcaaggcaatgatttctattgggataatgctagctgtactaacaaattgttgcccaaatgtataatggcataaacatatttattttttcattggactataatcctgagcagtaccaggtcagggaatggcagggattggggtgggtatggggacaattctactcttcccagtcattcagggactggcaggctaacagaatctatcttaaacacatggctgaaactgaaattgaataatctgtcttaaaactatacagcttgtcagtggaggttccaagattcttaccacttggttctggcttcaatgcccatgcctttttgcccacatctatatcaagaattgaaaagacatctggaccagctgcctagccaaagtttgtattctgtattcagtatgtaagccaatcagaaaactggtgattgcgtaacacattcagttgctgggggtacattacctccttatctggaactgcagatgtttccttgcarcttctttctggggcctccatttattggggtcatacaaaataaaagattatccctttatcacttagagaacacaattttcgtgccctttttgattattttgtttctgagtgaaaatttccctattatttcactataccttaaaattttgaatactgattgttcagatttagtcagcttctactttgtctagggtccttttaaagggaatgccagaactcaagtacattttccatgtgagatctgatgaacatagaacagaatagaactatcacctctgtagacttaagatttttgtactaactgtatctttgttttcctagggtgatacaattctggagactggagaagtaattccaccaatgaaagaatttcctgatcaacatcattaaagattatgtaaaaagttaaaaggcttatgagcctaagtttgttcctatattaccatatttactgaattttctggaaaagtaactttaataaagtttaatctcagaaattgtcatatctgttttcaagcattgtacaatttgagactgagtaatttaacaataagtaaaaagtggacatgctaaacaaatatgagagactacctactttttctggtcattcttgacttggaaaacggtatggaaaagtatttagttacatgtttgtttgtttttttcttacacagtacttacactaatttggtatcagggtatgcaacagtgaaatatcacaataaacaaatgtaagaacagcaattccatgcacttttgttttaaggaaatctttccggccaggcgcagtggctcatgcctgtaatcccagcactttgggaggccgaggcgggcagatcacgaagtcaggagatcgagaccatcatggctaacacagtgaaaccccgtccctactaaaaatacaaaaaaattagccgggcgtggtggcgggctcctgtagtcccagctactgcggaggctgaggcacgagattggtgtgaacccagaaggcggagcttgcagtaagccgagatagtgccactgagcctgggcgacagagcaagactccgtctcaaaaaaaaaaaaagctttccgaatcatttttgaagaattyagaaacttgattgaaaagcttattccaactatgatctgacactcaagactgtcagatttaggttgctgttaattttgtcatgagaatgtaaaatactaaaatctctaagtgaaaaatttgcatactagtgcttrttataaaggataatgcaaaaataaacttgggaactttgcattatgaattttatttttatatctacataagcatgagggaaagaactgtattttcagataattaaatccagaagagttacaaattttcattcgtcccaaagattttgtctgggtatttcttccttagctgtcgtcttgcagacaccatcgaagcatagatgatgcagccccaggagattaaaacgatggcaagcagcaactaaaccaaaaatcgcaaaggaggtgtgaaatctacctgatatttcccctcgcccccgtcaggttaccgttgccattgctaaggtgggaattaaagtaacaaagtcgaataaatggggttccagtggcgggtacacccagcagcccttacgtaagaagcggaagatcgtatcctccaggaagaggcggagtcgaggtgagggagtgaaatgcttaattcaggaatggattttggagtttctgggtgctgaagaaatagggcctttccgcctgcgggcccagtgagtcgacacggtgggggcccgcgatccccgggacttaccactgaataaatccastccagcgtgcgacgacttactggcttcatggtaaggaggcggcagcagtccgcgggagctggcgggagctgcgggccttacagtaacctcccaggcggtggctgccaggcgccagcagccatcttttagccgggcacgagcgcccgcccactcgcttcgtgcagcgctgtcgctggcctcttccgcccggagttggggggcggtatcacgtgatcgggggccttgcccgccttttagagaggggaataaacgagaaaatgttaaaaattgcttttttttttttttttttgccaactaaggagataggcgtacctccactggttttctttctagttgcaatgcaatattaatgcaggataaggtgctgtcgtgtccatttaaaagttaatttgaaaaacaatccacgttttaaatattacgtctggctctaaagctggaagaattaacgctttctcccccgctccctcccccacgcctccccgcatctgataccacacgatttagatggacgttcgcctgttcatctttgacgtaaaaataccacccactcttttatatgtgacaaatcgttgtgggaacccctgtaaatcgagccattcttcagaaacgtatagcgtaatgtatatctctaagaagaaatacgtgggacgcgttacccgccataatgtatcagtcaagcaacaagtgtttgttgagcgtgtctgatgttcttgaactgccgcgcgtgagatactaagccccgagcacggcagtttggtgggcgagcgtaccaggttcagctctagaatgtttggggcgctcacatttgaggcctgaggagtagaatctggcaacgggccgcttaggctctagacgttctttatacctcgcagttatcttaaaagagttttagtctagatttcagggagtgggaaggggaagagcggagaaaaacgtggtctgtttagggaggagtccaggccctgttttgttaggttgtcctgtttctccccagcctggaggggatccctctctgaagactttataggatactggttgggctctggtttgggatcccgttggactcctggtgttgcttccgggaggcgtacaacaggaggtgagagacttcaagtccatctaacaattcccctatctagacactaaagataatttcctaagtttccgcagagtttggtaaggttgaaacgacatcgaactagttctcgtgttttccgggtaagttaggggcgaacattcagtcagtgtccccagtggctgagtaccagtaacaagatggggagggtcgcgctgccctcctccggggtctggagcggcgggggaggggccgcatttgggccggtgcgctgagccccgcccccgaggccggcgtccatctgctgcgcatgcgtgaggaaggcgggtgttgtgttttgatgcgcgggagctggggggtgggtctcgctctctgccctgcttccgagctgccattggtgatgagccctttgcgtcacaggggtcgcagccgccgctggggtctccgctgtctcgcgaggagggtgaagcgcccccgcctgctcccgcttcggagggtaggcggagaagtcgccgggtacgccttcgcggatcctgccgacaccgacctagctttctgggctgccgggagctcgcggcgagcgccccagccaggcctgcgccggcatcctccgaggtgagtgagattcggaacaatgggacgcgggggtcggaagggccgtgggagttggcgctcccgcctggagcggcgcctcgggacccgagggttgcggtcatggcctgcggggctgtccgggcctcggcgggccagggccagggcccccgagcggctcctgcgcgcacctgtggattggtgcgggcaggcgagggttgcgcttcccacaagcgctcccgaggggcgcgagcctggccgtgtactggaaagagcttggtctcagggaaaagcaaaaaagcaatgagactgaatcgtggcgtcaccacttacaggatatgtgaccttgcctaggtcccttaaatccctgagcctgtctgtaaaatgggaataacaatatttaagttcgttgtggttatgtaatgctcatggtgcttatcttagtctagtggcagttctgaaccaaagtaaacgactatcaccgtggctttgggagttgggacttgtctgtgttgtgttaaacattctgagcagaaattgcccgtgacttgttcatccatccatttactgcagctttcctcatgggttgctgattgtaggctggaagggggcagtgctgagatgagccacatagtgatttaagaggaaaacggagtagaccttttgataggtaattttcaagattatttaagataattaagaaacagctgcccaagatttaagttaatagtggtgagagctttctgggttttgtccatgaaatgcaaagaaagctatacaatcagctaaaatcaatcatacttgtctggaatgagtggttttagaggcgaacggttcccagccaattctttttgctggaattggattaaatttgataggatctggataaatttgataggatctactgagatcctgtgacttttgtatcttcttttggagttgattaaatgcagttcagagaggtacagtgatttctttaaggtggcaagaggtaggaaccagtttatttttaatacttgggtgatctttctatttcatctattcgtgaaccctttttagtcactttgcctagaaatattaagtataataattatattaagtatgatgattattttgttgttataaactatcctctgtctggacccatataatcagttatgggtgatgagctaccgaaattcacttcgtgttcacgtaacatagagaacattgttgagttcttactgtgcatcaagcactgtgctaagggtttttatgaaatatgtcccgtcacacaaccaccttttcaattccattttagaattgagaaaacgtgagattttgagaaaaaacttcctccaggttacacacctactaagtggtggcgattctcagccttggctctgcagcaaaattaacatcactcccgcaaatgtaatcagcagatgattaaattttatatacagtgtatgccatagatgacttttgatttttattgatttattttttttgagacggagtcttgctctttcgcccaggctggagtgcagtggcgcagtctcggctcactgcaagctccgcctgccaggttcacgccattcccctgcctcagtctcccgactagctgggactacaggcgcccgtcgctacgcccagctaattttttgtatttttagtagagacggtttcaccgtgttagccaggatggtctcgatctcctgaccttgtgatccgctcacctcggcctcccaaagtgctgggattacaggcatgagccaccacgcccggccatagatgacttttgtagtaagtctaactttaattctacagagcagttatacttcgtttatatcattgtgcagtttttcaaatatccagtctcctgaaatgtagattcgagcttcctgattctttatctcccccatccattttccctagacgtgtgtccatattaattagctgaaatttccccgaattgttattatccttgttaaagccagatttgaggatttttcgggaaagggaagttttggcttaatcagtttatactaaagatggtgaacttcatttaggatttgggagacagtttaggaagtgtgactggaagaactgattgtctcctgtgaggaaatgtcctaattcctagagtgctaggatggaaaacccgtaacacaggcttcttacagaacctgaagcactgtgtttttcatcgggtctacctttgctacttaaattcagaacgtctcttgcagatcagccactcttttgtgtgtgtgtgtgtgtttgtgtgtgaggcagagtttcgctcttgttgcccaggttggagtgcagtggcgtaatctcggctcactgcaacctccgcctcccgggggttcaagtgattctcctgcttcagcctcccgagtagctgggattccaggcatgcgccaccacgcccggcgaatttttgtgtttttagtagagaccgggtttctccatgttggtcaggctggtctcgaactcccgacctcaggtgatctgcccgcctcagcctcccaaagtgttgagattacaggcgtgagccaccgcgcccggccagcaaatcaaccactcttaatctgtatctagtcatcccagtttttatgccttaatttgtatttttaaacagctttgttaagattacattccgggctgggcgcggtggcttacgcctgtaatcccagcactttgggaggccgagacgggcggatctcaaggtcaggagatcgagaccatcctggctaacacggtgaaaccccgtctctactaaaaatacaaaaaaaaaaaaaaaaaaaaaaaatgccgagcgtggtggcgggcgcctgtaatcccagctactactgggaaggctgaggcaggagaatggtgtgaacccgggaggcggagcttgcagtgagccacgatcgcgccactgcattccagcctgggcgacacagcaagactctgtctcaaaaaaataaaataaaagattacattccatccataaagttcacccgtttaaagtttgtaggtcaatgattttttagtatatttacagagttgtacaaccatcacaataattaattgtagaacgttttcatcaccccagaaataaacctctttactgccccagcagcagccaccagcctcatttcatctctctagatttgcctattctggacatttcatataaaaggtatcatacaatatgtgggttcttgtgaattttttttttcattcatttagcataataaaaagtttcatccatgttacaacatggtaccagtactttgttcctttttattgccaaataaaattccatagtgtggatagaccacattttattagtctgttaatcaattgatgggtatttgagtttctccttttgaggtattatgactaaagttgctgtgaatattcatatacagtttttttgtgtggacaagttttcgtttcccttgggtatatctaggtgtgtaattgccgggtcatatgttcgacttcatttgcgttttaaaaaacattttaatttagtatttagtgatgattttgaagagctaataacttatttgatctacatgcattccaattgtttgatgtttctttttcttttttaaaatagagactggatctcgctttgttgcctaggctgtttcaaattcctggcctcaagggtctcctgccttggcttcccaaagtgatgggattacaggcgtgagccaccgtgccccgcctctttgatgtttctgatgaagactgtttgtttgtttgtttgtttgttttgaaacagggtctcattctgtcacccaggctggagtgaggtggtgcaat

SEQ ID NO: 95478 - DNA, 91442 bp, Homo sapiens
caaaaaaaccatgaatttttatgagacccaattcttcacctaactcccctttcaaatccttaaaagtatgcctatcccttgatctagtaactcctaattaagaatgtgtacaattctaatgttttaaaagatggaagaactatggtttaacaggagagaattaagtttggaacactattcaatcatttacaggaccacagatttcaaaagatgatcctgttatattaaatgaggagattcctaatatattctgtattagtaatataccaatgtgcaaaattatgtctggataaaagaacattatttactaagctgctaagagttatttctgattgataggatcatatataacctaattaagaatgatttttaaacaattataaaatgttaataataaatctgccacagcattcaagacttcagaataagtaactcagaactcacctttgtcaatatgaacttctaaaattttcttctctcgaactatcttccttccgttgcagcttttacatctatctttaggactgatccgctccccatggccctggcactccatgcacacagactgaatttgctgaaccattccaggtcctatctgatgaattcttatttgcattccagtacctcggcaattgggacagcactctactgctcctttcttacctcctctacctaaatttaaaaagaaaattaaataatgtatgaattagtagtgtatacagtagtaaatgttttaagaagacaattcctaaatgctatacttttaatattttcgaagcctgatggaatgctaccctctgaatgtacaactgatgagatcattccaatgagtttcattcttattagaacacactttccaataaataattttacttattacaaaaaagataccaaactagcttgatcccaactgtatttaaaatatacacagaaaaaagtgctgatatttctttaggtgggaggttttcagttggttttcttcatatctgccctctcctcccccaaaatctaggtagtgtacatgaatcaattttacatatctatctagaagtcttagctccattttcaggtgtcatattaaaggtgcttaaaaacaaaacaaaacaaaacaaaaaaacaccgtaccttcacatttgtcacaaatcacattcttttgcagagccagttttcttgttgcaccattatataagtcttctagggttactgagagctgatgtacaacatttttacctaaaacaaaatatttctcattgcaaatctgtttaagatgctggatcttatttgtgctaaaggcactataaagaatgtggcaaagaataataaaagatgagcctcacagggtacatctgttgactacctactatatacacagaatgttcacgttatcacagatgatcctcaaactgtgatgtaatcacagatgagggaaaatcaggtcagagattaaatatttgcttaagggcacagacgtggccatcttggaaatatggtaagcaaaagcattaccttcaaagtcacttgagaaaaaccaatgttatttaaaagggcacatttcacaataatccaaacattcatttctgtcacaatatattttttgaagctttcacttcgtaccgtattgagcaacatggccaattacttcatscaaaaattctgtagcacagtaaattctcattaatcaagattggccagggaagctgatgtatttattgagtcaccacagaagagtatcaatttctacttcttcctgatttagtagaaaacagcccatttactgctgggccagcactggttgttttgaaggccaaatttctcataccttttataatagcattgcccaacagaactttctgcagtgataaatgttttatatctgttctgtccaacgtagcagccaccaatcacatgtgcttattgagcatgtaaatgtggccatttagactaagaaaccgtatttttgtttttgtcttaaattaatggagccacacatggccagtggctactaaggagtgccttacttcacttaaatcagaataggaaatggaaggtcaagatctcataaggacactgaggttagaagtatgaagtcacctgctaataagttagtaagttcctaactagtggtccttccacaaggacttattcacaacaatattattgcctttccaccaactgaaaaaagttctcaaactcgtttctgtacaatatgcctaatgaacattttaactttctaatcaagcatgaaataccattaattatgtccttctgcttatagttccacctttagttttggcacgctaaaatctagctgcccttattttgaacagtgttgagtataaggaaggaaaaataaagcttctagagcttgatgaagcgcatttccccagaaataacctctcaatatgatcataagccacataaaagagcttgccaatgttaacctgcaggttctttgtaaggtaagtgaaaaaccaccactacttttttgtggacaaattctaacaatttactaagcaagtcatttggattgtggactttctttttaaggagtttaagtatcttaataaaaacataatcctttccttgaagatctttaaagaaaaactgaataaacaatttcccaaatctttctgaaccttaagaagctcaaagtgaaatttaatggcttggccattcattctaaaactggttctgctcatcagcccttatttgtatacactatactggaaataaagtgagactgatttctcttgaacattttactcctataagcagtatttctagagcccataggccactttcctgataaacatattaaatacataattttgacacaataaagctgaaacaagaatagatagatggcaggcaacgaaccagttttcagccctggctctgttggcttgctatatgagcttgaagaagttttaggtttctgaactttaacttactcccatttgaaaaaggccactgtacctaccatcaaattcctttggggagtgagggaacaccaaataagatctgtaaaaagggcttggaaaattatattgctatatactttgtctttttttttttttttttttttgagacaagagtctcgctgtgttgctcaggctggagtgtaattgggcgatctcagctcactgcaacctccacctcccgggttcaagcgactctcctgcttcagccctcctgagtaactgggattacaggcacgcaccaccatgcctggctaatttttggatttttttgggttttttgtgacagagattcactcttgttgcccaggctggagtgcagtggcgtgacctccgttcgctgcaacctctgcctccagggttcaagcgattctcctgcctcagcctccagaggagctgggattgcagatgcccaccaccacgcccagctaattctgtagttttgtagagatggggtttcaccatcttggccaggctggtctcgaaccctgacctcagtgatccacccacctcggcctcccaaagtgctgggattacagaatgagccacagcacgcggcctgttctcataatttgtttgataatatctaagatttttggaagcagtcatttgctaccactctgttggctattttttaggccccttaaatctcattttaaaaaaagcgacaccactggctgggcatggtggctcacacctgtaatcccagcactctgggaggccaaggcaggtggatcaccacctgaggtttgcagttcaagaccagcgtgaccaacatggtgaaaccccatctctactaaaaatacaaaattagccgggtttggtggcacatgcctgtaatcccagctacttgggaggctgaggcaggagaatcgcttgaacccgggaggtggaggttgctgtgagctgagaccacgccatggctctccagcctgggcaataagagggaaactccgtctcaagaaaaaaaaaaaaaaaccacaacaaaaaaacacgacaccataaatcagaggcaatttgtggtcagtttgcaacattataccaacatgtaaacaagcatttaaaatgggtgatttctcaaagatctgctctgaccaacagctaactttagttagctgcacaaagactagattcttcttacctctcctttctctctgcatccttcctcctcctccaaaaaacatatcaaagatgtccatgggggagccaaaaccgccacctgctccaccctctttaattgcctgttctcctcctttgtcatataattcccttttctttgcatcagagagaacttcgtaagcttgagaaatctgtttaaactgtttgagaaaagaggagtgaatttcattttttaaaaaacaagtgttacctagctacattacacttgatcttagctaaaaaggccgagaagtgatcatagttactatattagatactcgatttcaggccataatagaaatactatacgtctggcaaagaactattcagatatgtttaagagtagatactattmaccttctctccttcatttgggttcttatcwggatggtacttcaargccagtttcctataagcctttttcaattcttcctgagtagcattgggtttgacccccaaaacatcgtagtaagttgtttctttcaccatcttctactgcctraaataagaaaatgcaactttaaccggctttcaactggtagcttttaataaaaaagagagctaaggccgagcaatctctttgcaaaatccgattataagaacaccaccttccctaaatttcaccaaaaaggtaacaattcctgcgataattcagctataaactcgaacagacaaaacaaataatcattatcgggaaataatctgagagccgccttctagcagctggttccaattttcctacaccaaagcttccatactaatataacacaactattatctggattcttcccgtttgccctagaggcggtgacagttgtaaccaaaagaagcactgatatgttcagtctaccggtcattacactatcactgtctttggcaaatctgataaactccatatactctccagaaaaagacgtctgggcacacagtggtgggggggagtggtttatagaacaggttactggctccacacagcaagccctccaccgcccacggcttacagcttctccagccgaatccctctcgcccctcaggctggcagagtttacctgccaggtttccccttgcacttggcgctgaccgatttccttcctttctccctcccaccctggacccaagtggcggtggggaaagcccagccctcaacaaacaaagggaggggaaacagagaaagcgaaaccaaaagccgcagtctccgcccggctccccccgcagcccctcgcccctgcctccctgtgcgcgtgcgcagggtcgccaaccccactcccccccccaccccgagcgagcacggacggggaggggggccgcgggggcgcgcacggaggggcagccgaagacagtagctccttggagatcccaggctggggaaggagggaggtctaggaaaggtctcgggcccattcactgtgcgtgccggggatgggttgccagggcaccacaccagccctccaaaagggaaatcgtgggcccaggaactgacagcggtcctacccacgcggccaactgcctcccgaccgcggctccatcggtttcccggcgccaatggcgccaggcaggggactaggggcagcgcgagggctcaaactcaccggtgcgggctgaggccggtgtgtgagggagcgggaaggagcgccgagctgtgcgcagccggggtagttaccgctcctccgcctctcaccgagcgttctggaaagttccgcccggcgcgccgcagccgtcstcttttgtagccgaacccgggcgcgtcacccgccggaagtcccgcccttctcggccgctgccaccgccccgccgttacctgggcaacggcgcgggggcgcacgggtcgggaggagctgcgccgaaaggccttgtgggkgttggtgctagcgcggcttcccggcgctcgtggaatcttctggagcccttttctccactcagcgagcctgagagtgcggaagtctccggctggtggggcatggcccaggagcactgcaagtcctagggttcccaaacctgtggggtggccgcctsggcccgcgagggcgggaagggctcgagtacagtgacccagtgggagctgtgtgtgaacgggaaagctcttggaacagtcttgccccccccccaccctcttacgggcgcctcttctctttttgggaacgtggcgagcaaaaaatgcttgagccaggtgggtctagtccccagaccaatagcataggccttgggtcttgctgtttttcacgcgtggtccaaggcggcataattaatcaaattgtgaagttgttacggctttttgtgcaagtccaggcccctagacacatgttatctgccctggacctcgctgattcgtgcagattgagttcagtgtgtctgggactgagctaaacagtgagacgtttggaccgtctttgatgtacagagggccgtggactcctctggtcaggttttcacccagtttggctacagagtagccgcaagagtgtctgactaaaacaatttgtttaattatttgacctcacttttaaatcctacgggtcagggaacctggatgtacaatctgcaacgtaagacctcggacttgaaaatggtaccacgggggcttaatgggaattggggtccgcttctttatccagggacacagcaggtatgtcagtatctagcaccaagaaagatggagtttgccacgctcggtggctcacgtgtgtaatcccagcactttgggacgccagcgtgggctgattgcgtgagctcagaagtttgataccagcccaagcaacatggtgaaaccccgtctcgatttaaaacaaaaacagaactggagatgcagagttgaaaagccccagttagactttagtgagaagccaaacaagtcaacagactgccagagaaaccatgaggtagaagtcagtaggggagagcctcctatattaacctgatagatcagagagaatttctttgggaaagtggcaattgagctgagttttgaaaatgggaggagagcagtggacaaagcacaggggaaggctatactaaggtgtggaagaatatgatgtttttaggaaattgcaactaattggatatagccatagctaagggagctagaatagccggaggtgaggcttcaaagctagttagggcatgcctttgtctgttggtrtatatgctacgctaagaattttgaactttatccttggaagcatcctcatgctgcctcttcagccttttctctttcattaattttaactgtgcattccagtcacagaactatccgcagtttcccatatacgccttttcacctttgtatgcttttgcattggctgacagacacctgatttttttcaatcttaggtgttgccttctcaagtatcacctctggtataaagttttttgtttaaaccaaccgttaataaacgtctaatattaccaggcagtgtactagggctttgtaatacaaaaatcacgtaagtcaggccgggcgccgtgcctcacacctgtaatcccagcactttgggaggccaaggtggcggatcacctgagatccggagttctagaccagcctggccaacttggtgaaacccttctctactaaaaatagaaacaattagccaggtatggtggcacgtgcctgtagtcccaccttctcaggaggctgtggcaggagaatcgcttgaacctgggaggcggaggttgcagtgagcagagatggtgccgctatactccagcctggttgacagagcaagactctgtcgagtctcagaaaaaaaaaaaaatcacataagtcgtggtccctgccttcaaggagctcacaacatagggaaccagaaacaaacagttgagtgttaaatgctaataaaggaagagtagggggtgcatggtggctcaagcctgtaatcccagcactttgggaggccaaggcaggcggatcccttgagtcccggagtttgagaccagcctgagcaacataataagacctcgtttctacaaaaattagagttagtgtggtggtgtgggcctgtactcccagctacttgggaggctgaggcaggaggatggacctgggaggtcaaggctgcagtgagtggtgattgcaccactgaacctcagcctggacgacagagcaataccctgtctaaaaacgaaactaacaaaaaagttaacacttttaagaagcattcttacgtaaaataaaataaaaaaactggcaataactttgtatgtggtcttcgtttgtacagaaatgggatcattatacaagctgtttacagcttgcccttttcactttgtcatcttactatgccaggataaataactaatctgccttgttatttttaatggcgtagtatgtaggcaccgtaatttattcccctactgatgaatatttcagcaatttccagtgttttacaaactgctgcagagaaattagcaaatacagctttgagtactcatgcaagtatttctgttggatggacagctagaattgaaattgctgagtcaacatgaatgtagatttaaaattgtaataaataagtttccatactggtttgtaactgcttccagcagtgtgtgagtgggccttgccaatatgagggccttttgttgttaaatctttgctaagcttggagataaaaagtgatatcttattgtttcgagtttctttgttagtaagtttaaccatgttttaaatgtttactgactctcctgtcaactgttcatattattttaccatttttctgtggtgtaattccactattttaataatagcccttttaggggtagatattagtctgtcatgtgttacaattgttttctttagtatattcttcgctttttacttagtatctatatatatatttttcggccatataaagattttaatttttatgtagataaattgtgactcttcctttttggcctttttcttctctccaccttccccttcatcagtccagcattataaatataaatctgttgtcccaggtttacaggttacrtctagtactttcattgtttcccctttttttttttttttttaaattaacagccttgatgtgttgcccaggctggcctcgaactcctaggctcaagtgattctcctgcctcagcctcttcagtacttgggactacagacacctgccactgcatctggaatcattgttccattttaaacttaaattttttattccatctgaaagttattttggtgtaaggactgaggattatttgtaagtaactgatctttatttttctccaaatggcaaactagtttgtctaacactaatcttatttttcctgactaatgtgaaatccgccccccaaccttttttttgtatgtgcagagatagggtcttcctatgttgcccaggctgttcttgaactcctgggctcaagcagttgtcctgccttggtgtcccaaagtgctggtattataggcgtgagccaccacacctggccaccacttttaatgtatacttaatttccactgaaatacatggtactacttcccttcattgttcttgctttttagaatattccttgtattttttttaatatgtttattcttccagaggaacttaggaatatttctggcagattccccccaaatcccattgtgagttttattgtgattacagtgattttatatatcagtttggagagaattaacacatttaaaatgtcgaatcttcctactcatgaacatataactgtatatttattttcttcattttttaaactaggtcttcatcatttcttcttaaatgtgttactaggcattttttgttgttgctgtcatggatggcctcttttcttaccattatattttatttcagtgggatatttcatactttctttttttttttttttttgagacagagtttctctctttttgcccaggctggagtgcaatggagccatctcggctcactgcagcctccgcctcccaggttcaagcgattctcctgcctcagcttcccaagtagctgggattacaggcatgttccaccacgcctggctaattttgtattttttagtagagacagggtttctccatgttggccaggctgtcttgaactcccaacctcaggtgatctgccygcctcggcctcccaaagtgctgggattacaggcgtgagccaccacgcctggccaataactcaataaccacatggccgtaagtgttcrtagaggtagctggagatggctggaggcctggcaggagcaaagtaataagggcttgggcattatgctaaaaagtttgaattttgttttgaaggctcttgagagacactggaggattttagggatggggtgatataacctgtgacagctgactttttgtttcttttctctttcctcatctgttctttcttttgtgaggacctgccaggcactgcgctaaacactctacaaacgttgccatattgttatcctcacagtaacccttgttttagagctgatttgattacatttaaatttcacaataatcacttgggtgctaatgcgaaggttggattcttagcaggtttttatggtgagcgatgagatcagaaatgatgaggcctaaatagaagaaatggagagggagaaaaataaacacaaatataaaaacatgtaaagtcttcaggtagagtcaygrtgacttgatgcagaggtagrgaggaggaatgacttccagctttctggctttagcaacaggatggttggagatscccttcctggggtagggagcccagaaggaggaagaagccagggtaggagcaaaattgggtgaargaaaaggtgagtccaggtttgaatgagtacaactacagctatacttttttctttagtttacaaagaaarggagtcggagccagggcggttatgtgggacgtggatgcagacgcaggyggaggcgccaactgcggggatggctagggtgatcacarctgccccgggggcgcggacaccccggcagctccrgccagcggagctcccccaccgcacgtgtcaggtcctagcagaaacgcagcgtctgtggccaagggccaggaatgcggccgcacatattcaccctcagcgtgcctttcccgacccccttagaggtggaaattgcccatgggtccctggctccagatgccgaaccccaccaaagggtggttgggaaggatctcacagtgagcgkcaggatcctggccgtccgctggaaagctgaagactgtygcctgctccgaatttcccttatcaactttctcgaccatctttctctggtggtgcggaccctgcagcactttgggcccccagtttcccgctaagcctggcctgggaaaatggggcgaggtctaaccttgcgtctcctcctaggcagtgcatccatcctccctagggcaggkaattcccacagttgctactttcccgggagggcctcatggtcggcctgtactgcctttgtgtgctcaggggtcccttgttttctctggttcttaaatgtttgttaccacagaaaataaaactgagctactattaaaaagaaaaaagaaaaatttttatcggcacaaagtggaaagtaaatcctaactgaaatgctattttttatgtttgtataaattaatttaaatttcttagaatatttagtttttaattaactggggccagacttttatttatttatttattttttgagtagcaccaatttgttgtggttcttctcttctgactacgtacaatttcagtcttttttatgaactctctccttcattcctacccccactcaccacccttcatttttttaaactgaactttatatttaagaatagttttagatttgcggaaaagttgtcaggatagtagagttcctgttattccgcactcagtcttaacctattgttaaaatttacattaaaatggtacagttcccacaactaatgaatcaacgttgatacattattattaactaaagttcgttctttatttgggtttctttaatttttcccttttctgttccaggatcccaccaaggacaccacattactttgagttatcatatctctttagtctcatcttgactgtgacagtttctcagactttacttatttttaaggaccttgacagttttgaggagtacatatctttctttttgagatggagtctcgcactgttgcctgggctggagcgcaatggcgtgatgttgggtcactgcaacctccgcctcccaggttccagcaattctcctgcctcagcctccccagtagctgggattacaggtgcctgccaccacgcctggctaattttttgtatttttagtagagatggggtttcactatgttggccaggctggtcttgaactcctgacctcgtgatccacctgcctcggcctgccaaagtgctgggattactgcataagccacagtacctggggaagtacagtcttttttttttttttttttctgagacgaagtcttgctcttgtcccccaggctggagtgcaatggcacaatctcggctcactgcaacctccgcctcctgggttcaagcgattctcttgcctcagcctcccgagtagctgggattacaggtacctgccaccacgtctggctaatttttgtatttttagtagagacggggtttcaccatgttggccaggctggtctcaaaatcctgacctcaggtgatccgcccacctcggccttccatcgtagtagagatggtgaaacctcatctctactaaaaatacaaacattatccaaggtgtagtggcacgtgcctgtagtcccagctactcgggaggctgaggcaggagaatcacttgaacccagcaggcagagkttgcagtaagctgagatcgtgccacmgcgctccagcctgggtgacagagtgagtcgtctcaaaaaaaaaaaaattaaataaaaaataaaattttggttttcatttctgactcctggccagaggtcctaaaaccgttgaaatttcctaagtgataagagtgaaagtggtatcttgttattcataacaagcccctttcaatcacatctgagattatattaatgaagtgacttttggagagcccgaaaatgggaggggtggggggggcgctggttgctagggcaactaaccaagtgattagaggattggaactttcagcctcacactatgacctccagggaggagaaaggggctggatattaccagtgggcaatggcctaatcaatcatgcttacctaatgaagcctcaataaaaaaaccctaaccaaaggagtttggagagcttccaggttggtgttggaaggattgagctcccggagagggccttgaaggtccgtatcccttccccaaactgagaaatgtaagaattatttctaagttctgtgagctgttctagcaaattattgactctaaggcggttgtgagaacctctgtgctgtggtctgaatgtttgtgtcctatcagaattcataaattggaaatccccaagttgatggtattcagagatggggcctttgggaagtgactacgtcatgggattagtgcccttacaaaagaaacccaggagagcttgtgagtcccttctgccatgtgaggacagctctgtctacaaaccaggaaacaggccctcaccagacacccattcagctggtaccttgatcctggactttccagcttacacaaatgagaaataagtttctggtgtttgtaagctacccagttaatggcatgttatagcagctcaaatagatgaagacaccccgattcatagccagtctatcagaagtacaggagaccctggacttgctattggtatcttaaattggaggtagtcttgtgagactgagcccttaacctgtgggatgtgcaataatgttggataattagtgtccacrytgaattaaattgtaggatacccagttggtatctgcagagaattagagaattgtttggtttgaagcccctccacccccaacatttggttcaaagtattatgaatagaggaacagttttatttgtaggcaaagatttttgtctgttttgttttataatatatcgcaagcatctagaacactgcctggtacagagttggtactcaataaattatgaatgaatatgcattttgccagaatttgtgccaggtactgggcatatagttgtgaaaaagcggagatggttcctggcctcttagaacgtccagcccagcactacacagtctggtgatttttctgcctgcctgggctgccctcctctaacatcagagtgcctaattgctgagctcagagtagactttcctcttagcagtgagtacttttcagatagttttgtttttctgctttttttaattctaaaaaaatggggggggggagtgtaatgcattctatttagtcactctaagttaaaagtccacaattttcctcaatacagagacaaaatagtgttgtctttaaagctccagcctggtagaaagccgaaagaagtcgtgaggtacattcagtttactttttctttcctttatttttttaaacctaaaggaagatggttgtaatgttttatactaccgaagagtgaaaggatatgcagtaaacatgtttattgctgtcttttttgtaaactggattgctcatttatgagatcctgacctatttcttgagatcttctgtgtgctgtttgttgaaatgaatttttacatggctaaaacgcttaagaaaaaaagctaaaattgagtgtattgagagagtatctgctggttcaccacacttcagatgttgtgtcagcaacaatactttctctcaccctgttctcacacaggcaatcacaccatcacgggaaactccaaggttgggaatatacctgaaaagtggaaagaattcgggaagaatactgctgcacagatatgagactgaacaaaatgacttttaatagcccttcaaaatctcagactcttggtctagataatacgaactcctagataccatttggcawcgtttatttaaaaaaattcagttgataacattttgtgtatatacatcttctagataattattttaattcttcacctcaccttgtcaaatgtattctaacttaagtttgatatttcatctgaatttccttccctgcacaaaaattcagatgcggatatgaattgttttgccccataatcttgttgtcagaaaaaaattgatgaarggaaactctcatggaaatagctttgattagttataaacaacttcagtgtgtcctataagcccatgatatgacatcaagatctactctgtaagattaaaaaaaagttttcttgcatgcatgtggcagcaaccttgttttaagattggtgtattgtggcattctcagcaaaacacagaacaaaagaaaatacaggccgggcgtggtggctcacacctgtaatcccagcactttgggagactgaggcaggcagatcatgagatcaggagttcaaggccagcctggccaacatggtgaaaccctgtctctactaaaaatacaaaaattagcrgggcatgatggtgtgcrgctgtaatcccagctactcgggaggctgaggcaggagaatcacttgaacccgggaggtggaggttcagtgagctgagatcgcgccattgcactccagcctgggcaatagagtgaggctccgtctcaaaaaaagaaaagaaaaaatacaactcaggcaatgacccttatgcaagatcttctctaatgcctttgataatttataaggcgttattatttgtgttcccacatcacgcagtgtacacacttccatcatagcatttgtgcagatgtgtataatgtattataaacattgaaggcaatgctttcatccagaagggtttacagccacttccaaggatacaacaaacagagacaatataccccaagatgccatacattaaaagtgtggagaatgaaaaaaataaaaacacgggtagtaacaaaatggaaccagagacaaagctaaaaggcatacaagaatgaccttcacatttgatacagctgggccatgaatttgtctctaaactgacaacctcattggtcccacaattcatggtatctgaagataaaacatcaatccagtactctggagaagtaaaactattcctagaatggagatcagattggaatgtctcccagggatgcttataaagagcacattgtgttatgtgaggagcagtgtccttgacagtatccctgaccgggtgaccagtgtagagggatgcctctgatggcagcacaacaaagggcaatttgctgagctacagcaatacttctagggtggaggactgtcttggtgatcatggcttagcaatgttttatctccagcacctagtatagtaattggcatatagcaagtgtcaagaagtgtttgttgagtgaatgtctaacggacaagacccagtttaagggccccctttagggcggctcccctgattaccaaaacctgatgtcctgctccccagctatgcatccttttgttaaggatgtcctgctgctccccagctatgcatccttttgttaaggatgtcctgctgctccccagctatgcatccttttgttaagctgttaagtggtacagctatggaatatttattctactgttgggttaaactgccattttctaccacctaccatgatttctaataaactgccctttagatatttttgtgttaaatttcccacatctccaaatwtgggagtgaggccaggggtgtttgttcatacacacttgctggtggtggtagtggtggttcatcaagaaagtcctgtacttaccagactgagaggtcagtcctcaggtaaccttatgagtgctattggcttagactcctacatccaggttgtccctcagagyagaggcagggctggtaatggtgccagagtaggcctttgccatcagtttctgtgctgagcattgggaagacctaggcacaagccacagtggtatcagcattaaaagggactctgcactgaattagcagctactgactagggtctctttacactcctgttgggatattgcagttgggttgagtgcataggttggagttcagttayttttagctgccagatttagagccctaggggtgaggcctgatgtaaaagtctttcttcctggtggttgcccccacctgtcatttctttcatctccctgttatcattgacattgaaaaggcattttagagcaggagcttggtcttgtttttgttttgttttttagacggagtcttgcaccgtcgcccaggctggagtgcagtggcgcaatctcggctcactgcaagctccgcctcccgggttcacaccattctgtctcagcctcctgagtagctgtgactacaggcacctgccaccatgcccggctaatttttttgtatttttagtagagatggggtttcaccgtgttagccaggatggtctcgatctcctgaccttgtgatctgcccgccttggcctcccaaagtgctgggattacaggcatgagccaccacgcctggctctccatgagcagcttcctacctgcctagtcatgatgttgtcttcatcgtgaagaagttgtgatgaagataactgttcatctgctgtgtaactttacctttttctttttttcaacagcaatggcactgtcagatctaggacaggaaactgggaaaggcattgtagtggctaacaatacaaattctggaaactgaatcctggccccgccacaaacaagttacttattttttctgtgcctcaatttccttgtctgtaaaagtggataataatagtatctagctcatagagttattgtgaagagtaaatgagttaacatgtacaaggtgtgcagaagagtatccacatataaataaacactagtaaatgtttgctaatagtaatggtcatagaaattatcctattcaaacagaggaaatagtagagctagtaaatcaacattacattgatttactaaaatattgattgagtacctactatatgtcagggtgttttctmggtcagtaaaacaatgttgactgtgacagacacaatcccttttctcatggagcttacgaatgagtggggcacagacattaacatttacacaagtatataaggcaactcttctattaggaagttgagccttgacccagatttcagacaatcttatgacttccagaacgtggtaggaatagtgcccccaccctttttctaaaagggagtgttctggttatctaatgctgtttagcaagctgccctcaaaattggtgacttaaggtagcaatcatttatttaatcagaattccgcagttggggcagggcttagcagggatagtgcatctctgttctgtgtagcaactgctagggtggcttccctagggctggaggacccacttccaagctgggtcactcatatactggctgttactggctgggagctctgctgggacctctccttcatgtggctaagttgggcttcttacagcatggcagctggatcctttgaacaggagcacccccagaggataggccacaatgtgtaagcagttattaaggttctgcttgtattgtacttggtaatgtcccattggcaaaagccagtcactcagccaagtccagtcaatgtggaaggggactatggaagggtaggaattctgaaaggtgagaatcaattaggtctactaaagtaattggctaccacagagagaaaggctaagtatacattttctaaaaaattttgcgttctttttttttctttaatcatgtatgctatatcctctctctctaaaatatccaagaagtcatacaggtgaaaagtaaggtctcttgtgaatcaaagccctttggagggtggttaaaatttttgttacaggcctcataatttaggagcaatattattctatgaaagcagaagttttactgtggttaaacgtatggtgaagacagttgttgaaatagtattattttcacatagacagctggagctttgcttgtgaaaagaatgacaaagtaggagtgtctcggggttgtctgaatggtgtaaatgtrtagacattcaaatttgttgtcaagagggaccaaaccatgctcaggaaaatgccactggacgtccagtctgaagtgcagtaagaaagacaagtgggagaaagagcagcaatgcaatattggaaagactagcagtaaggagactgcaggttcaggagagtgggctcagcactgaggctgtgaaaggtgagcgtgtcctgcagctgtcctcagtagactgaaagctccttaaggggaagggctgtgtctggcttgttgactcaacatggaccccactgcgtgacacagagaaggcactcttaagtgtttgatgaatggatacatttaaagaaacgcagaattggaaaccattccctctctttaagattctggtgccataaaataattagagtaaccttttaaaaaatatggcacttcgggcgggcgcggtggctcatgcctgtaatcccagcactttgggaggccgaggcgggtggatcacaaggtcaggagttcgagaccagcctggccaagatggtgaaaccccgtctctactaaaaataaaaaattagccgggcgtggtggcaggcgcctgtaatcccagctactcgggaggctgaggcaggagaattccttgaacctgggaggcggaggttgcagtgagccaagatcgtgccactgcactctagcctgggtgacagagcaagactccatctcaaaacaaaaaaaaaaaatatggtgctccactgattaaaatcctttaatggtttctcatttcacccagatatccacatgacttttttcttctttcaggtctgtgctcaagagaggcctcccacactaccaagacatcctcaccacttttttttttcttttttttgagacggagtctcactctgtcacgcaggctgtagtgcagtggcacgatctcagctcactacaacctctgcctctcaggttcaagcaattttcatgcctcagcttcccaagtaactgggattacaggcgtgcaccaccacgctctgttaatttttgtactttttagtaaagatggggtttcactatgttggccaggctggtctcaaactcctgagctcaggcaatccacctgccttggcctcccaacgtgttgggattacaggcgttagtcaccacgcccggccatcctcaccactttctatatcccacttgttttttctttatagcatttatcctcacatgacctgtatctttcttttcttatgatctgcctcacccatttagactgtaagatccttgaaagcaggaacttttttttttttttggaacgaggtttcactcttgttgcccaggctggagtgcaatggcatgatcttggctcactgcaacctctgcctcccgggttcaagcgattctcctgcctcagcctcctgagtagctggggttacaggcgcctgccaccagcctggctaatttttgtatatttagtagrgacggggtttcaccatgttgaccaggctggtcttgaacttctgacctcaagtgatccacccgcctcagcctcccaaagtgctgggattacaggtgtgagccaccaygcctggcgaacgcaggaactttgttttgttcactgtggtagccccagctcctagagtgattcctgacatgtagaagttgctcagagttgaatgaatgaatgaatgcgccagccaatggagagctagagttgctttggtttcatctgactggaggccaagaccctgagactgtgggatgtgggtatccgtgtgggctcctatagccatgtctctcccagttgactagtaagaggagctggtctgacggtgccaagagcccaggccctcctgttctgggaactactattgcctgtctgtgattgtgagattgagggcccagataccgtaaggttcttatggtttggagatggtgcagaaggcagccccatcagtctttaaagtagccagagaagttttctaagtttcaacccaggactcttgactgaatgggttcaagaaattgaaggaaaggccctgtgtttgggcaaataggcgaggagagagtggtagatgagattagagagatggacaagaacttctgtaaaactgaccaaacaagggagtttattcttaatttgatgagcattggtaaaggatttaagcaggggagtgacatgatcaggtttgtttgtgttttgaattttttttcccttttcttttctttattattattttttttagagacagagtatcgccctgttacctgggctggagggctggagtgcagtggcataatcatrrtttactgcagccttggacttctgggctcaagcagtcctctttcctcagtctctcaagtagctgggatcacgggcacataccaccgtgcccggctaagttatttattttttatagagagagggtctcactttgttgcccagcctggtctcaaacttctggtctcaagcagtcttcctgcctcggcctcctaaaatgctgggattacaggcatgtgaaatattttctctagttgcagtgtgattggattggaggggacaagagtgaattagggagaaaagaaagaataacattccagaaagaatagcacgaacatcaaggaactcaatatactgatgtattggggtgggggaaagggtaggaagttcaatattgctggtacaaggctgggactaaagaggtggtggaaggcaaggcaggttaagtaagttagaaggcattcctgtgcctttcttcttaatgtttataagaaatttcaggatagaccactataagatctgtgatttacacagatcagcattgctgaattgaaataaaattttccacaaaccaccaatgatatgaatgtcagtgcttgggattacagtaatcatctcctaaactcttaaaaattagatccttgaaagagttaagagttaataagattcaagaaatcagcacatagtgggagaagttaaccagtcctaaaagcaggagttgaaaataatagagggtaaattatagttggaagattttaaagtgaatttacagggtgtagtttttatgaatacctcatcatgtttacactgtaatgtatagaacagaactgctcaactggtgtcccaattacaggtatgattaccaagaatttgaaaagattatcattaaaaaatcaatcaggccaacgcggtggcgcacgtctgtaatcccagcactttgggaggtagaggcgggtgggtcacctgaggtcaggagttcgataccagccttgccaacatggcaaaaccccatctctactaaaaatacaaaaattagccgggcatggtggcacatgcctgtaatcccagctactggggaggctgaggcaggagaattgcttgaaccagggaggtggaggttgcagtgagccaagatcgtgccactgcactccagcctgggtgacagagtgagactccatctcaaaaaaaaaaaaaaaaaaatcttaatcaraagctgtgtgtggtggttcacacctgtaattccagcactttgggaggccgagtttggaggactgcttgaggccaacagtttgagaccagcctgggtaacacagtgagaccctgtctctaatttaaaaaaaaaatcttagtcagaaattgtatagctattttatcatgaaaccttaatatcataaaggttatatttacagaaatatgctcaatttcctcatcaaaaaaaatctaaaaatattttacttggatatgtagccaaaatcaatgttattttccccaatactttgttgtttatttatattattatatataattataaagaaaaaataaggaaatttttttcaccaagctcctcataggcctcccctcagatttacccccatgtgttctgcaaatattagaattttatctttgtgccatgacataacgaagttgggaagcagtaggaggttaacttatctaaaaagtaaataaaatgatactagaaaataggaggagtgcattaggttggattcccccagagcagacagtgtcacaaggatttggaatgctggtactttggagatgatctcaagaattaccagcaggggagtgaagaagtgagacagggatgggaaggaaaccagcagaggacgggttgataggcagagtacccctctgggcagcctgggctcagtcttggtggggagcgttggggagacagtgtagtacacacatcaaagttgtttcaccctaggggtgagaaaacatgtttacctactttttttttttaatatcgttttcattacacttagtagcataaatcccctcactttagacctgtatatggtcagagaaggcaatgtcgcagttcttgcagtaagaagtttttggatatatgaaacatgcagctaaatttatgtttcgctagattttcattctatcaccactaaataacttttatgatttggcatcagacctaggactgcctatagaaaagagtatgttttgtcttgtccagttgatgctgcccccaaatatcccttgagtcagtgaacttctgtcccttcgttcaggctgccaacgtcctttgcactgcatcagtaaactgctaactgctttccacttttctgcttttgccttccccrctagtccattcttgctcacagcagccacaatgaccttcataaaatgaacatcaaatatgtcacttcctaactaactcttcaggggtttttcaatgaatgatgaatccacatacagttcttaaatggtttactattgtccttgctcaggcctccttatcttcctttcactaactccattggattttcacctccactggacttctagcaactctaaaagaataatctaaaagccctgctattgggcctttgtacatgctctttcctcagtttggatcacagacctagaatatttttccatcaagtcttcatgtgtttgtttcctttctgtctttctggactcagtctaattgtcctttcctcagataggcctttctttctttctttctttctttttttttttttttttttttttgagacagagtcttgctctgtcgcccaggctagagtgtagtggcgcaatcctggcttactgcaagctccgcctcctgggttcacacctttctcctgcctcagcctcccaagtagctgggactacaggcacccgccaccttgcccggctaattttttgtatttttagtagagacggggtttcaccatgttagccaggatggtctcgatctcctgacctcgtgattcgcctgcctcggcctcccaaagtgttgggattacaggtgtgagccaccgcacccggccagataggtctttcttgacgccctcacaaccctctccctctctactgtttctctggagaactctgactaatacagctttccccaaatgccaaaacaaaatgaggtgtcccagctatactctctctcagaatttcatatttttccttctgagcaagtctctggaccaggcaaccacagcctctggcttcacctgcttttcccttagatcaggtaggtactctgcctccaactgcttttcccttagagcaggagtctcaaaatcttaaagaaagaagggctttcagggggccagacaggttatataagtgagtgggtggaaacagtggcaaactggagagcacatggcagctattcacaattctagctatttgttgttagacttggctagatttattgatttttcccccaagagatcaggaatcctgatttttaaaaaaaattctttttattaaaattttttttatagagagagggtcttgctatgttggctgggctgatcttgaactcctggcctcaagcaatcctcctgactcatcttcccaaatgctgggattacacacatgagccactgagcccagccagaatccaggttttcatgtgagatctcatttctaactgttggaattaaaacaaacaaacaaacaaacaaacaacaaaaccctgagcagagtagccaaaaacaatcttgaaaaaaaaaagaataaagttcttatacttcctgatttcaaaaagtattacaaagctatagtaatcaaaacagtgcagtactagtgtaaagacagacatacagactgatggaatacaatagaaatcccagaagtaaatccttgcataaatgattaaatgatattcagtaagtatgtcaataccattcagtgaggaaagggcagtcttttcaacaaatgatattgttaaaatctgggtatccacatgcaaaaaattgaagttggagccttaccttacatagtacagaaaatgaactcaaggccaggcacagtgtctcacacctgtaatgtcagcactttgggaggctgaggcaggaggattgcttgagcccaggagttcaagatcagcctgggcaacatagcaagacctctgtctctattaaaaaaaaattagccaggcttggtgggacatgcttgtagtcccagctacttgggaggctgaggtgggaggattgtttgagtctgggtggtcaaggctgcagtaagctgtgattgcatcactgcactccagcctgggcaacagagcaagactctgtctcacaaaaacaaaaacaaaaacaaaaaacaaaaaaataaaaccacacctcaaaaatggatcaaagacctaaacataagacctaaaactataaaactcttagaaaacataagggaaaagtttcatgacagatttggcaatgttttcttggatataacaccaaaagacaggcagcaaaagtaaaaataggtaaattaaagtacttcacaattaagttttgtgcatccagggatacagccagcaagcagagtgaaaagcaccctatgaaatgggaatcttatatttgatcagaggtcaatatccagaatatataaagaactcctacaacaaaacaaaacaaaaataaccccattaaaaaatgaagtacttgaatagacatttctccaaatacatacaaatagacaggaagcttatgaaaagatcaacatcactaatcattagggaaatacaaagcaaaaccacaatgagataccatttcacacccattaggatggctgctatcaaaaaaaagtaacaagcggccgggcgcagtggctcacacctgtaatcccagcactttgggaggccgaggtgggtggatcacaaggtcaggagtttgagatcagcctggccaatatggtgaaaccccatctcttytaaaaaaaaaaaaaatacaaaaattacccgggtgtggtggcaggcacctgtagtcccagctactcaggaggctgaggcaggagaatcgccttaagccgcgaggtggaggttgcagggagccgagattgcaccactgcactccagcctgggtgacagagcgagactccatctcaaaaaaaaaaaaaaaaagggttggcaagaatgtggagaaattggaactcttgtacactattggtagaaatgtaaaatcatccagctgctatggaaaacagtgtgacagttcctcaaaatattaaaaatggaattaccatataatccagcagtttcacttctgtgtatatattcaaaataattgaaagaagaatttttaaaaattgtttcacattaaaaacaaatttcartggctttaggggtacaaatggtttttggtttcatggatgaaktgtataatggtgaagtctgaaattttagtgtacctrtcacccgagtaatagttacacccaatatgtagttttttaaaatctctcatcttcctcccactctctccacttctgaatctccaatgaacattataccactctgtatgcctttacatacccaaagcttagctgccaattataagtgagaacatgtggtatttggttttccattcctgagttacttcacttagaaaaatggcctccagttccattcaagttgcttcaaaagacattatttcattcttctttatggctgagtagtattctgtggtgtatatgtacgacattttctttatgcattcatcagttcatgggcatttaggttggttccatgttcttgcaattgcaaattgtgaaaacaggatctcaaagagatatttatacactcatgttcatagcagcattattcacaatagccaaatggtggaatatccacgggtggatgaatggataaagtatggtgtgtacatgcaatggagtgttattcagctttaaaaaggaactttttacacatgatacaatgtggatgaaacttgaggacattatattaagtgaaataagccagtcgcaaatgggcaaatactgtctgattttacttacatgaggtacctagagtggtcagactcatgaaaactgtaagtagaatggtggttgccaggtgggggagggaaaatagggagctatttaatcgatacggagttttttttttgaggcagagtcttgctctatcgcccaggctggagtgcagtggagtgatcttggctcactgcaacctctacctcccgggttcaagcaattcttctgcttcagcctcccaagtagctgggactacaggcgagttccgccacgccaggctggtcttgaactcctgacctcaggtaatccacctgcgttggcctcccaaagtgctgggattacaggtgtgagccaccgtgcctggccgagtttcagtttttcaagatgaaaaagttctggtgattagcatggcaatatgaagtgcctgaaagtcttcactgcctgccatacctttagctatacattgtgccatgtgatcttgcttttctggccactaatacactatagacaatggactaggcctaacaagcaggacgtggaaactctgcccaattttgcacattatatagtgaatgatgtaattagaatgatccaatccaacttttggatgcaagacacacaaaggcaggtcaaagaagcacccttaaccgagagggatgcttaattgagggaacaacaaaactggtcaggtcaccagagttgcctctttttatcttgggcagttgtgaacaacattcctcagctgtaaggcctgtgtggctgctgagatgctgcttgtgttttcccacttccttatatgaccctaatataaacctgcatcttctctgctaacaaaagcaagcctgtcctctgtgtttcttggaagatcctcccaccttctgtcttgaaggctctgatagcttcatcataccattaagtctctgcttttccatggaaggaaacaatactccaccttgatgaagaatgtgactccttaaatctcaattttgttaaagaaaagattattcaatgatacttgctgaagcatggtaaggaagactttattcaggaacttcatgataggtatatagagctcactgcaacggggttttgcagtggaagagagattaggctcaactccaaacagcagcatgggcaagtgggcatttatggccaaggagctgtgtaggggtcagtggatggaaaattactaagaggaaacatcggggtaaaggagtttctggctaaatatacctaacaggattcttgctggagacaggccaaggtaatcagacatcatctgggggatagtggagaataaggaacctgatcagatattgagaataaccacataaggcggggtggtggtggtggttcttggtaaactgacttagccagggtctgtgctaaaactggattttacagggaagtgcacagatgggcctagcagaaaattcagaaacctaattcaaccaaagaatttttgccagtgtgttgtacttgagaaaaattataaactatacttttacctccgagatagggattgttccttctgccaaaatgcctttgaataactgcaatatgattcttagggaactttctggaattgctgtaaaaaatcagtacacgcatcttatccctgcatcttgctttttttctcccggattgcccctcagttcatttagtgtacacagcactacaaaaaacaggtttccctgcctcttaccsctccattctttcctccctgcacaaaggagaaagcggactgtagtttaaaaagcaagtagcagtgctacagcaggttgtctgcagcaggagagatggccttaaaggttgtgaacgtctccttatggagtatcgagaagctgcacagccacctagaaacgtccacagagggattgggtctgaaatgtcacccaattcagagactgtgaggcagtgacaggcgagtggccctcaggcagagagatgctgagagagctggtccccacaggcataacttccaggatcctcagttggaccacggcccagagagaacccaattrgggcggacgctttttgatctgggaastgggcaagattctttcagccaatccgttagagaggtgctggtgacgtyactggtcgcgatacagccggcctctgacgtcatcccgcagcgccggaagcggtgaggcacagatgagtaacgtgaatttgtccgtctccgacttctggaggtaaggcggtcgtcagcctatctcttctgctggctgggctcaatgccgcgggtgagcgttcggccgaggctgctcctacccttgagtgatgtgccttgaatgacgctgctttcatksgctgctytcacggctgctttctccgtcctcccctgttactaccttgggctgtttcagcgggcgctcgcgttggtcttcgacccactttgcgtttgttcacgtgtgctcccgacacctgtatgtaccttggtcgcaacacaagccgaaaaaatattagagaatgggccctgtccaaccaaggaggcggcccagcttgtcgggaagggcagcgtttccgccagaaatgcttcgtgaaaggcacttgagggaccttagcagcatcctcaacaggccttgtagggaatgccagaagaagcagtccttggccgggcggggtggctcatgcctgtaatcccagcactttgggaggccgaggcgggcggatcacctgaggtcgggagttccagaccagcctgaccgacatggagaaaccccgtctctactaaaaatacaaaactagccaggtgtggtggcgcatgcctgtaatcccagctactcgggagggtgaggcaggagacgttcttgaacccgggaggcggagtttgtggtgagctgagatcgcgccattgcactccagcctgggcatgccaagagcgaaactccgtctcaaaaaaaaaaaaaaaaagaaaaaaaaaaaaagcctttccccatacataccagtgatagtggcttaacaaagcagggataaaatttctatttggaattgctgtgatctaggtttggaacttttggggattgttcatatgtgagacaatacagatttgtgctcgttcttcttagttacacagttattactttctttttttctttttcttttcttttctttttttttttttttttttttgagacagagtctcactctgttacccaggctggagagcaacggcgtgatctcgcctcactgcaacctccgtctcccgggttcaagctatctctgcctcagcctcccaaggagctgggattacaggcgtgtgccacgacgcctggctaattttttgtatttttagtagagatggggtttcaccatgttggccaggctggtctcaaactcctgacctcaggtgattcgcccccctcggcctcccaaagtgttgggattacaggcgtgagccactgtgcccagccgcagttattgctttcaaatgatctttttatatgtccacagctcctgcttgccctaccttcgctattaacaagagtgataatagtgttgaatgctttttatcagacactgagctttacatactttgtcctttagctcttgtgacaaccccatggtgtagagcaattgttaataccgcttgacacttgagggaatgaaggcttggagaggttaaataacttgcctcaagtcacacagcgagtaggtggtagaaccaatgtttgaattcaggcagtccaacttcagagaccttgatcttcgccactgttctatattgtttttcttcgactgtccattaagctcccagacacctactctttgttaccttttatttttatttttatatttttttgagacggagtctctgtcgcccaggctggagtgcagtggcgcgatctcggctcactgcaagctccgcctcccgggttcacgccattctcctggctcaggactacaggcgtctaccaccacgcccggctaattttttgtattttttagtagagacggggtttcaccgtgttagccaggatggtcttgatctcctgacctcgtaatctgcctgcctcggcctcccaaagtgctgggattacaggcgtgagccaccgcacccggcctgtttgttaccttttattttatggagaaaattagggtcatgagatgtgctttccctcacatttctgcctctgctttcccttttaaagtcatcaagatttatacccttttccttttgtctcagaggatgaattgtctctctaatcagagcagtttctttatgtttgcttctgatattttatgctgtcacttatgagaccttgttttcatttgtcatttctgtttccagtcgtgtataaacaaggccaggtttctcagatctctgacacttcccsttgccgaagaaagaaaaactccttggtggtccattataactttagctgtcatccaataactttctttctctttatatccaaactgttttagtgagtattctgaactctgcctccatttcctcaccttttgtttccttctgtatctagctctcagacccatcattcccctgaaatttcaccccaaggtcaccagtgactattgtcaaaccagataaaaattttttgattattactggatctctttgctgcttttggaacttggtcatccctttactcccttcttctttgctttacgtgtcagtgctctcagatgatttattcaacaagtattgattgggatacagagatgaacaagacagataaattgttttctcttaaggaatttacattctagctgttctccatgtgcctttcttaccagtcatttctgctatgggtagtcattttcctccttccctaaaatgttgggtgtttctgttgtttgtgactttggcatataaacaatgaaaaactgttcttttttttttttttagcttgaccaattttttttttatactttaagttctgggatacatgtgcagaacgtgcatgtttgttacataggtgtatactaagtgccatagtggtttgctgcacccatcaacctgtcatctacattaggtatttctcctaatgctatccctcccctagcccctcaccccctgacasgccccagtgtgtgatgttcccctccctctgcccatgtgttctcattgttcaactcccacttatgagtgagaacatgtggtgtttggttttctgttcctgtgttagtttgctgagaatgatggtttccagcttcatccatgtccctgcaaaggacatgaactcattcttttttatggctgtataatattccatggtatatatgtgccacattttctttatccagtctatcattgatgggcatttgggttggttccaactctttgctattgttaatagtgctgcaataaacatacatgtggatgtgaagcttgaccagtttttataaaatgattatacctatgtgaccaccatccagattaggttacagatacataatattaccagcattcagaatgaaaactgttcttttcattctgtacacattgcctgagtgaacccatcagctggcttggttttaactacctcctacatgccsccaaattgaaattgtcagcttagacctctctgagctttaccctcacatctgactatcctcctggacagctctgcctgcaagtcccacagacacttcaaattcagatgactgaaactgaactcagtgtctttcctggacttaactcttatcacattcatcactaagtcctgatagttttaccccctaaacatctctcaaatctgtgcagtcttctccatctctactgttgtccttttacctgcaatatcatggccttctaactgatttccctgcttctaggcctgttcccccatatcttttcttcacattactcccctccacccccagatggtctttggaaacaagtctgtatcaaattcctgcttaatctttaaagatctgtccatgcattcatccattcttttctctaattcattcagcaaacattcattgtctactggcttgcaaaatccattgaaagttctaaagtttgagcttctcagccagggctctgcctgttctgaaccctgcctgtatctccagcctcttctctgcctcatgctttaggttccagcaacactgaatggcatcttcatgggtactgtgctatttcttctttgtgtacttgcccttgttgttctctttgcttggaatcttctccctgtttcctttctccacctcctgctcctcacctaattaggctgctccttttcacctaattaacccagtttataaatgggactcagttataaagtttaggtccacctcctccaggaaattttttcctgacacctccttcctcccaatctcggttgggtactctagcattgtgcttccaccctttgcacagagcaatcatcatgtttaccacatctactattaayataattgtttctgtgtttttctcctccacaagatttattttttttagatgaggtgttgctgtgttgcccaagctggacttgaacccctaggctcaagcaatccttccacctcagtctcccaagtagcagggactacaggtacgtgccaccatgcctggctaaggctgagttttttgaaggctgggctcatatattatctctttattcccagtactagaatggcacaagwtacacaggagtgtagtaattttgactgaacgatcaaatgagtgaagccaaaagttatatgatgcagtggttaagaacccattctttggaattcaaattgtagttctggcacatattggctatgtgacttgaacatgttacttatcttctcatcctgaattttctcttctcagaatggagttgtgagtgttaaaatgagaccatgtaagtaagacatttagcatagtgcctagcacatagtatgcacttgataaaggtgctgaaaaccgggggatcctggagtaaagactaggcctggcccaggacagtgatctcccgaaacccctcctcattgttttgtgaatgcgtaggcagtgatgcagtctgttagcagggagattataatcttgtttggaaagtagaattacatccacattaaacagtcagagaactgtgaaggtagtttgaccacatccaataataagatgtagagaagagaagacagctcaatgaaggctttagggaggaggtgaggcttgaaagttaaataggatttgggttttaggagaaaggaataccaggagaccatattaagaatgacttaggccaggtgtggctcctacctgtaatccgtgcactttgggaggtcaagacaggaggattgcttgaggccaggagtttcagaccagtgtaggcaacatagtgagaaccccatctcaaaataaaataaattagcaaggcatggtggtgtgtgtctgtagtcccagctactccagaggctgaggctggaggaccactttagcccaaggaagttgaggctgcagtgagctgtgatgacgccctgcacccaatctgggcaacagagtgagaccctgtctcagaaaaaaaaaaaaaaagagcgatttatttgggagatgctgttcagtatattatacttgaagggtatacatacaggcatacctcagagacgtgggtttggttctagacaactgcaataaagtgaacatatgcatgttttggtttcttagtgcatataaaagttatgtttatactatactgtagtctgttaagtgtgcaatagcattatggctgaacaaacaatgtacacaccttaattaaaagtactttgctaaaaattgctaatagtcacctgagccttcagtgagttgtgatctttttgctgatgtagggggggtcttgccttgacgttggtggctgctgactgatcagggtcatggttgctgaaggtttggatgtctgtggcaatttctttttttttttttttttgagacggagactcgctctgtcgcccaggctggagtgcagtggcgcgatctcggttcactgcaagctccgcctcccggattcacaccattctcctgcctcagtctccagagtagctgggactacaggtgcccgccaccacgcccggctaatttttttgtatttttagtagagactgggtttcaccgtgttagccaggatggtctcgatctcctgacctcgtgatccgcccgccttggcctcccaaagtgctgggattacaggtgtgagccataacacccagccctttgttggcgttttggtaatgttcattacatcttcatcaggaatagatttcatctcaagagaccgttttctttgcacatccataagaagcaactcctcatccattaaagtatgatcatgagattgcagcatttcagtcacatcttcaggttctacttrtaattttagttctctttatttctgctatattgggagtgacttcctccattgaagtcttgaacccctgaaagtcatccataagggttggaatcaactttttccaaactcctgtttatgttaatattttgacctcctcccataaattacagatgttcttaagggcatctagaatggttgtatccttttcagaaggttttcaatttactttttccaggtccatcagaagaatcacagttgatagcagctatacccttatgaaatgtatttcttaattaataacacttgaaagtcagaattactccttgatccatgggctgcagaatggatgttgttttatcaagcacgaaaacaatatttatctccctgtataatatatctccatcagggatcttgggtgcattgtcaatgagcagtaatattttgaaaggaatcttttttttatgagcagtagttcttaacagagatcttaaaatattcagtcagtcatgctgtcgtccaggctttgttgttccatttatagagcacaggcagagtggactgagtataattcttaagggccttaggatttctgaaatggtaaatgagcgttggcttcagtttaaagtctccatctgcattagtccctaacaagacagcctgtccttgaagctttgaagtcaggcattgacttctctctacctgtgaaagtcctagatggcattttcttccagtagcatcaaagatcaaagatcactgatcacagatcattgtaacagatataataataacgaaaaagtttgaaatattgtgagaattactaaaatgtgacacagagacctgaagtgagcacatgctgttggaaaaatggcactgaaagacttgcttgacacagatttgccacaaactgtcaatttgtaaaaaatgcaatatctttcaaatgtaatagagcagagcacaaagcaggtmtgccagtatgtatgtgtttcttggggaagagaggagagagagggatgggcaagtgggactagttctgtgaagaggaacgggaggtgaaatacataagcactgtggagttacagtatgatgagcttaacttcaggcctgagggacttgagatggatcagggcagggcaagtttccaggactgtggtggatattatggtagccccccagccacgtggagttatttaactattaagtaaaaaatgtagtttctctgttgtactagctacattttagatgctcgattgtcacgtggtgggtaatttattggacagttcaggtttagaacatttccgtcattgcagaaaattctattggacagcactatttgaggttacctgatttctggccttgtgtggtctatcagatcactkgagttctttaaggaataatcagaatttctttctgacggatcccctcaactctagaatgaaagatatagagctgggccgggcgcggtggctcacgcctgtaatcccagcactttgggaggccgaggtgggcggatcgcctgacatcaggagttcgagaccagcctggccaacatggtgaaaccccgtctctattaaaaatacaaaaagtagtcaggtgtggtaatgcacccctgtaatcccagctgctcaggaggctgaggcaggagaatygcttgaacccatgaggtggagtttgcagtgagctgagattgcgccactgcattccagcctgggcaacagcaaaactctgtctcaaaaaaaaaaaaaaaaaaagatatagaggtgaaaaatagagaattgggatttatccacctagatgtgagaatggatgggattgcccaaagagaggaacagagcattccatcgtaagaagagccatagaaggaagggagagagaaggcaggaaagaaaactgggataattattactctcatgcagagagtaaatagcatttgataattcacttgtaaatatttattgtatgcccgctgtatgccaagtgttagattaggtgctacagatatattgataagcgaaaatggacatgacctctattgtcatagttttcagtttatggagttttactggagggactgggttgaagattcaggaacacccatccttctgcacttgccatattgtaaaacactccatttctaaaagttggaattggaggctgaaacgggtgaagttactatttaaggttggttacataacygttgtgcagtcactacttcagcttctcaggaagtagtaaaaaggaacaccataacttgagaactttgggggaataaagtatctgtattgatggagggcagaaagggtagttcttattatcctgcatctgccagccatgctctctgctgctcactggattcctctcttgccctgctctcaaaatctgttctcttctggcttctcttattgtcagtatgagtagtcagtcaccacatatttcccaatgcctagtgaagacatatttcacttctcagtctgttacctgctcattcatctgtttccagcaagtgcaaacagatgccccttggaacgcatagcatttaaaagtgggacctgcccataacaccatcatcatttgaggctccaggtttaggattttagatttatagctgactcttcgtgcacctgcatcagctccttcacagagacttgctgaactgcctttttgacctctctggctcacgttatattaacagcctcctcactaatctctgactctggatttctccatgctagactgcctacacacagctgttaagtgttctttggatgctgttgttttatcttactgtgaagctcaaaacctggcagttgtctcctcttgattatggtaaatgtaaacttttcagcctagtattctttcaacacctctgtctttttttgtgactctccgaggcagctcctctggttcagccaactaagtctgcttttaccccgacctatggcttgccattgccgaaatctgtgttgtcacttgtgctttttaaaatggaatggcccctcccactccatttcttctttatcagtccccttggctcctagccatctctaaccaggaggtttctggaagcctgtactggctaatacaggactttttacctccttagtactcatatactcgcactaatcttattcatttgaatttgcatctcctcagctgtcatttgctcactttgccttgcattgtcttgtctttgcagatggtaatgaaactgatttttaaaaatcgggtttcttttttctttgcttatggacatgaaacttgtgcagagggcatatgtgctgccttgactataggcaggtttccgggagaggcatgttagaggcttgagcactgataagagtctggagtctagagaggcaatctctctctgcccataattccctgtttcacctcattgggtgatctcatcctctctctctttgcctcagcctctgtgacatgttgatgcctctcaaatatatgcatttagtccattcccctctcttgagcttcatacccacatatcacagcttgagtcttggatcttccacaggcaacttaaaataattacatttcaatatgaaattggtccttctctcttcactttcctttttatccccaaattatgtctccttgtgtatttttcatttttgttaatgggcatcttccaaatttgaagtctttggtgagtgtctcgccttttttttttttcttgagatggagccttgccctrtcgcccaggctggaatacaatggtgcgatctctgctcactgcaacctccgcctcctgggttcaagcaattttcctgcctcagcctcccgagtaggtgggaggcacctgccaccacacctggctaatttttgtatttttagtagagatagggttttaccacgttggctaggctggtcacaaactcctgacctcgtgatccgcctgccttgggctcccaaagtgctgggattacaggcctgagacaccgcacctggccagtgtgtccttttattcctttgtcattccccaaatgtcatcagtaattaagtatgtcttccagatttctcctggctcttcttgctctccatcccctttgcttcggccattgttgaggtctcatctctcttctgaatttcttgtctctttctcttttactgatagtccacatggccataagggttgtttttcaaaagaatatcagcacttccattgttttgcgcgttgcgtattgcacaaaattgtcacattcacactttagaaattgtaggtttgcggccgggcacggtggctcatgcctgtaatcccagcactttgggaggccgaggcaggcggatcacctgaggccaggaggtcgagaccagactgaccaacatggagaaacctagtctctactaaaaatataaaattagctgactgtggtgacacatgcccataatcccagctactcgggaggctgaggcaggagaatcgcttgaacccaggaggcagaggttgcagtgagccaagattgtgccattgcactccagcctgggcaacaagagtgaagctccgtctcagaaaaaaaaaaaagtaaagaaattgtagatttgcatatttattatgactgtctcctggcagatgggagtgaaatatattgttctaacatcagtatgtcatgacagggaaggaaaacctatgacacataaagacacctaagcactagagaacatcttttttatgtccttagttctctggcaggcaaactccttctcatcctttaaaaccgcacattaatatcccttcctcgtgaagccttttaaaatattctccacaagagtcagtcagtccttttactgggctaatgccatatttggttactctcttcttgtagtgtttatcacattatattgtatatattggtatatgattctgtctgtcctactgcactccaggctcctcaaggacagggacaatgtccctgttttattcatcctttgactttcaatatgtagcctaatgtccagcacatatcaatacatgtgtaacaggccaggtgtgatggcttatgcttgtaatcccagcactttgggaggcagaggcgggtggatcacctgaggtcagaagtttgagaccagcctggccaacatggtgaaaccctgtctccactaaaaatacaaaaattagccaggtgtggtggcgggtgcctgtaatcccagctactcaggaggctaaggcaggagaattgcttgaacccggaaggtggaggttgccgtgagccgagattgcgccactgcgtgccagcctgggggacacagcgagactctgtctcaaaataaataaaataaataaataaataaatgtgtaataaatatttgattgcctagcgtgattcaggcagggaggtaaatacttactcacattatctcatttaattttcacaacagcctcctgagtcccatcattatcatggtttataggtgaggaaattgagactagggtggtgaagtcacttgcctcaagatgaacagctggtagatcacatgcgtggtggcaccgggtgtggccctggaggactcgtgctagtggatctgtttttctagtgattcttttgttttgtcccttagagtgatgatgcgggtgtgctggttggtgagacaggacagccggcaccagcgaatcagacttccacatttggaagcagttgtgattgggcgtggcccagagaccaagatcactgataagaaatgttctcgacagcaaggtaactggtcatagaaatgtggagattactatggttatgtgggatagtgataaccaaagatgcatattttctgggtgatcttgatggaaaatctattgtctgccaaaaatacagctcaggaactgagctcttttagccaacaccagggccctatttattcctgattctgccctcccaatgtgataatgttcaaggcagggtgggtgaargttgggagcagtcaagttcatactgttaccatgggatggtggaattgagtcctgccctcctttccccagggacattgctcaatgggcagcaagatgtaaactctggagtctacaggtgaaaccatgtctttctgagaagtaatggggtagtgccgtcctttacatattgcttcacgcaaagtattatgagacagtggcatctagcacttgtcttagggtttaataacatgaaagtccttgccctcagaaaaaaatccttaccatgtaccttgttttttcctgtaaacatgcacactgctggctggagtgtgacccccccacagcaaggtttcccaagggttctgaacttagagagttggcatctgcagcactgattatgatctttcctatatgagttaatctaagtggagggatacaaagccatgcttgagctgagtaggcccaagatgcagaagcagtggctgcttctctctctgttcccttcctcacaacagcaactgaaggggcatgtatgtggcaccctgtcctctctggggagcagctatggtggttcttctttcctccctgtctcaactccagataccttgttcatttatcagaacaggaatgcttaatgttaccacttctcacacatgctcagattgttctgtctctgcaatcatctttctagaacattctttccactccttctacccaaagccacctgagtttctgttttccaggaatgtgtcttttactgttttatcttttaaagcatctaatagttgttgtttttccaaaataatagtggaagcctgatttaatccttggtcaagagttcgtgtgagaaatggatctttttttttttttttttttttttttcctcctgagatagggtctcactctgttgcccaggctggagtgtagtggtgcgatcttgactcactgcaacctccacctcctggggctcaagtgattctcccacctcagtctcccaagtagctgggactacaggcatgtgccaccacacctggctaatttttgtatttttttgtaragacggggtattgccatgctgcccaggctgggaraaacaggtcttcttttctggcggcagagtctgtgatcatgagcaggccaggggttctggaatagggaaacttrtggggattaattgaagctgcctcatagggatcttggcaatagctaagggagtatgtacgctgttggacattttatggaaggatttaaacctttaraaattggtaggatttggagctccagccacctgcaataacaggtgattgctaataggcctttaaggaaacaccacctgttcagctgccgcctgtagtgaagcttgttttctttagggaagatargagcaagtgcctggttctttgttgcatttgtgtttaactttttccaatctctttcagtacagttgaaagcagagtgtaacaagggatatgtcaaggtaaagcaggtaggtgtatttataacttggaattttatactcgatgattttcttatgctgttgactttagagtgtctgtgccagccagtgaaggcttctctgtcatgtatggaagtgatggagtaatataggtgaacataaggcaaggtgcttggcatatagtaagtggttaacatagcagtggctatcttactgtaggtgctgttgctattattataattattttctgattgtttattccataggtaggagtcaatcccaccagcattgactcagtcgtaattgggaaggaccaagaggtgaagctgcagcctggccaggttctccacatggtgaatgaactttatccatatattgtagagtttgaggaagaggcaaagaaccctggcctggaaacacacaggaagagaaagagatcaggcaacagtgattctatagaaagggatgctgctcaggaagctgaggctgggacagggctggaacctgggagcaactmtggccaatgctctgtgcccctaaagragggaaaagatgcacctatcaaaaaggtgagggtagtgtgattggtagatgatgtggagaagaaatgaaatataatgactgcttaattgttttgtacactttaaagttcagaaatgygtgaggggttattaaccatgatgaaagagtcacttgtttgtggcgtgaaaatcatttggatgaatgttcctttatgtgcttttttcttaaattcctgaggtaagccacctgaaggtacaacaataatggcagtgtgtacttaacattgaacaactaaagtggatcagttgtttatgcatctatagaaggttttcatagatcatgtaattcatatgctgatgtcaaagtggagaattggtcaggctgtagctgcagtgagagagggcaaagaaggtatgactcatactctggcatttctcgccttcatttagaacagccagctgtgaatataggaaggctggctgggtgcagtggttcacgcctgtaatctcagcgctttgggaggccgaggtgggcagatcacttgagggtcaggagtttgagacctkcctggcaaacattgtgaaactccatgtctactaaaaatacaaaaattagctgggcctggtggtacacacatgcttgtaatcccagctactcgggaggctgaggcgggaggattgcttgaacctggaaggcggaggttgcagtgagctgagattgcaccactgcactccagcctgggcgacagagcgagactccatctcaaaaaacaacaacaataataaaaaacagctgggtgtgctggctcacgcctgtaatcccagcactttgggaggccgagatgggcagatcacctgaggtcaggagttcgagaccagcctgaccaacatggcaaaacctaatctctactaaaaatacaaaattagctgggcgtggtggtgcatgcctataatcccagcaactccagaggctgggcaggagcatcgcttgaacccgggaggcagaggttgcagtgagccgagatcacgccattgtactccagcctgggcaacaagagcgaaaccccatctcaaaaaaaaaaagaaagaatatagggtcgggtgtggtggctcacgcctgtaatcccagcacttggggaggtggaggccagtggatcacctgaggtgaggagttcaagaccagcctggccaacctggtgaaactccgtctctactaaaaaatacaaaagttagctgggcgtggtggtgggcacctgtaatcccagctacttgggaggctgaggcaggagaatcacttcggaggttgcagtgatcacgccgctgcactccagcttgggtgagrcagagtgagactttgtctcaaaaaaaaagagaatataggaaggcaatggagtgaagcagagtcaagtgaatcttgtttaattctcaaaaactaagcttatttccaagtttagttgtgctatcacacagtattaactgttgccaaatttaattattggcatttgtaatttacattgcttgtttttttttttttttgttttttttktttttttttaggaatccctgggccactggagtcaaggcttgaagatttctatgcaggaccccaaaatgcaggtcagaatacaattttggaatttcagtacmtttcatgttgtaaatgaccactccacagaggtcttaattacaaatgaaatcaaaggatatcagtctttctgaatgagattcattttattgggctgttctgtgagaacaagaggcttttcacattggcaataaagtagcagctgtcattgtttggagagaaagctgagttcttcaaatgaatatcccctctgccttgtgccttttaaacttctgggtactttaagggaagttgcattaaccttagtatggttcctttcaggggagcatcagagataatacactgtgacagtagkactgtgctgccctggcattaacagtcagacatccctgtaatcccagcactttgggaggccgagacgggaggatcacctgaggtcaggagttcgagatcagcctgaccaacatggagaaaccctgtctctactaaaaatacaaaaaattagctgggcatggtggtgcatgcctgtaatctcagctactcgagaggctgaggcaggagaatcacttgaatccgggaggtggaggttgcggtgagctgagattgcgccattgtactccagcctgggcaacaagagcgaaactccatctcaaaaaaaaaaaaaaaaaaaaaaaaacaggcatcatccttgaggagcctttgagtcccacttcaattatattccttgytgacaaggggcaggtctaatagggctcactggaacccacgtgtacgtgtcacacagtctgccatgttggagtggagaaggatgcttttgaatttatgtctacagagattttacatcacattcttgggaactattttgtactgtgcatcttctgtgtattctgtgtagtgtggtggttgaaaacagactctggagtcaaccacatctgagttggaatcctagatttccctcttaggaactatgacttgtgcaagacactcaacctgtctgaatttcagtgctctcctctctcaaaactgggctattaaaaccatttgcacaagactgtgggaattaagtgacttagtgaatataacaaccaggcacacagaagattcttagtagatgtctgtttccttctcttgtatccctctgctaggtttacaaagatgagcaggtggtggtgataaaggataaatacccaaaggcccgttaccattggctggtcttaccgtggacctccatttccagtctgaaggctgtggccagggaacaccttgaactccttaagcatatgcacactgtgggggaaaaggtgattgtagattttgctgggtccagcaaactccgcttccgattgggctaccacgccattccgagtatgaggtaagccaggtgggtagtgctgctggctcctggttctgtccaggtgggcagatagattcagcctgggcttgctgagggcacatattgcactgagacccagggaagtgggatggagtttttccaaagcaggtgggctgaagcttccacctctctgcctgacttgcatgcaagctttgagttcccacttctgcctataattcagtcatatttggttctttgttcctctcaaaatataaaycttcgagagcctaatatatgaactagatgaagcagcttcattatcctcagataaagaattgtggtcagtggcttttatcagattcttcaaaagcgtctataaccccagaatgattaaggaccattactctgaaggaaacaaacatcatagacttctgtaatgacagcgtagtagatccaggatttgaaaataaaatgagagaaaagtatagaatttgttttcctgtggcttatgcccagaaggattcagaaaggaatgactgatttctttcaaagaatacaagcaaggtggatctccgtgatttctttgatttaagcartaagatgataagtctagattttagagtttttattttgtttttaaaaaactgtgatataatatacataacaaaatttacattttagtcatctttaagtgtacaattcattggcattactatattcatattactatgcaaccattactaccatctatctccagaactgttttctcttcccaaattgaaactctgtaccttaaataataactctccatttccccctcccactcctggcamccaccattgtactttccttccctgtgaatttgactactctaggtacctcatattagaggaatcatacaaggacatatttgtccttttgtgactggcttattttacttatttacttacttattttactttacataatgtcttcaagtcttatccatgttgtagcatgtgacaggattttctctgcttatttttttttaactaccaacactcacattttatttaggtgaataattatgacttaggttactggccacttgaaccaaatgaaatctttgtgccagatttttccctagtcagtactgattcttttaagttgaggcataacttacatacaataaagtgcataataagatgcatagtttgatcagttttcataagcgtgtataatcttkycactatcattctgattaagatacagaagatgtctatcctttcatcccagaaagttcccttgtgcccctttscagttaatcctccctcaagcattgcttttatttccttcagcatagatagtttttgtctcttctagagctaccatgtataaatggaatcatacattgcatactcttttttggtctggcttttttgggtcagcataattttgagattcatgtgtgttattgtgtatatcatagacatatgtactttatttatttttttccccttgagtaaatatttagggatcccagtctgggcaacatggcaaaacctgtctctacaaaaaatacaaaaaattagccaagggtggtggtgcacacctgctacttgggaggttgagttggaaggatcacttgagcccaggaggttgaggctacagtaagctatgatcacgccattgtactccagcctgggcaacagagtgagactctgtctcaaaaaagaagaagaaaaaaaaagaataaatatttggagatggaattgttaggtcatagggtggatgtatgttgtacctcactttaaaaatataaatatatttttattgttaaaggctgatttgaaaatttaggagggaaagtcacccataatcctgtttccctaatgcagagcccctgactaacagagcccttggccactgagcccttttcacgtagtgatcrtgatgcccatacctttttcctacagtgaatgttgtcgtgctaaggagaatrctcacagcaagagctgtggtaggtatatatgggaggcaaaatgagccaataagcaaagttgctatttatatacccttttatattactctgtatgatgtagttttgaataaatgaacatattagaaaggaaaaggtgataaacaagtaaaattatttttcctattgtaaaagtaatgttttcaattaagaaaatataaaaaattaagtatgaaaaagaacaaagacctttcataatactractgtagataactaaactatagaccttattttagataacttactaaactgtagaccttatttgaatttcacccatttttcctgtattgttctttttctactccagaatccaatctcacatttcatttatttgttctctcttcttagtctccctcaatctgtgacagttcctactttcctggctttcatgaccttgacacttttgatgaatactggctaattgtctttaggacgtcttttaatttgggtttgtctaattttgtttttcatgattaggttgacgttatgcatttttttaatcactgaagtgatatttctgattgtgtccttctcaatatgtcatatgggggggcatgatgttgagatggtttattactgatgatgttaaccttgatcattttgttaaggtggtgtctgccaggttttcaccttcaaaattactgtttttttttttttaattcatgaatattttgggttagatattttgagactatactactatttctcctcaaactcgcacccaatgattttagcatctattggtgcatcttgcctgtaatagttattgtattggtatttactctatggtgactttatacttccttcacctaacttattagttgaaattattctgtgtgaaagcgctgttctgtctttctcattagttctttattcaatcatttaatggtatggactcatggatgtttattctataggttataattcaatactataattattttgttgctcaaattgttcagctttggttattgaaagctcctttaggtcagctcttgtgtcacttagatacgccttcaacatcttttgggcaatttattttctggccccacaagatgttccaggcttatctggaatgaaccacttctccaaagagccctaggtcttcttgggcactaggtttctgtgagagaagtggttgattccagggtgtccttgctttctaggtcctctcagccatagagccagaaatgcatgtatgaatcctaagccatacacacacacacacatacacacccctataattctgtgtttatctacctttatttgtatgtgaaaaaccatgagttcatactgatatctctgacaccattccaactctaagtttcattcttgtttcccttttccttttttgtaactactttctccaacagtgagaaacctggctctcattagttacaataaattcatttacttgttcagtcctagtgtacccataaaatagttacaggattcctaacccatacccctgtgagaaggacatttactaactagagtacagtacttgcctatagttctttttgtttttagccttatcgtatctagtcaaaacactgttctccaaagctaggttactatagtatagttaatatattttcttcctcaatccatttagtgtggtttcctcattcatttgtaatacagctatgcttatttattagtgcttatatttcattttggattctgcacacatgttgattgattttgattatttattgggagaacgtgaaatattactgattataagagtgaaagctgttatacaaaaaggcattctacttggtttaacaagtccaaaagagaattcctgattttcttccccaaacctgctttttcacctaaccttctttatctcagtaagtaacactctcccaaagcaacatgcagcccattaataagttctgtttgttctattccaaaatgcattcaaagtaggattgcttgttgacatctcagctgctacagctcagctctagtgtaggctgtgattttctggcctagactgctgtagcagcctccttaactggtttctccatgttcctccctatccgtcctttcttcacacaacagtcagagtgatcttttaaacatgtaaatcaggttgcccctgtgggcttggtttgtgaggaagagcctggctcagcctgtcaggaccactgaggcttgtttcttgccatcctttccacctcagttttacacacttctcacctccagctggctgggtgtgggaaagacctgccagagccacattggacaaggtggttcccattgccaagtagatggacaagatggtgcagaagaatacagctggagcattggatttgccaaaggagcttaaaaatattcccatgaccatggaattattacagcccccagaagaatcagaatatcagttaatgctaatggcaagcagcataaagatgaagaagttacatctttaacagtctgtcatgaaatctgggaaaaagttactatcaaccgagaaagaccctgaagaaaagaaaaaagaacctgcagttacattgcagaataactctgaagcgagagaagaaagtagctccggtggcagtgcaagcagcagagagggtgagacaaatgctctagatactcgtgtttcatcttttattcaggaacgaagcacttctgactctctttggttaaagtgttgcgaggtgcttgctgcagctctccaaacaggagatggctacactgctattggagctggtgaggaagaattaggatctcaaattgaggaggctgtatatcaagaaattaaggaatataggtacgaaatgcaaaagtagagtatgaagtaggatatcaaatcttaaagagcaaagaatccaaatttaagggaaaatgtaccatgtgagaatattcctcctgtcttatttgctagaatgatggcagaggaaatggctagtgatgggctcagagagatatggaaaaacttgaccaaagaagtcatcagagagcattaggtggccaaggcaggtggaacccagagtggcttgttcacatgtgcaaatgtagtgctgatggactgataacattcgttgtctgtaatgaatgtggacgtcagtggaagttctgttgagttggaataactaccaaaatatctggactattaagaaattagattttgtatgttcattgcagcactattcacagtagcaaagacatgggatcaaccatgattgttgcccgtcagtagtagactggatgaagaaaatgtggtacatatacaccatggaatactacacagccatagaaaagaacgagaacatgtcctctgcagcaacatggatggagctgtaggccgttatcctaagtgaactaacacaggagcagaaaaccaaataccacatgttctcacttataaatgggagctaaatacggagcacacatggacacaaagcagggaatgacagacactagggcctatttgacagtggcgggagggaggtgggggaggattgaaaaactgcctatggggtactatgcttattacctgggtggcgaaacaatctgtatagcaaactcctgtgacatacaatttacctatatagcaaacctgcacatggatccctgaacctaaaagttttaaaaagttacctatattaaatatattaatgatagaaaaaaaggagaaccaacttggtagttagcaaaacataagttatatccaaaaaaatatgcttttagtagtgtgatgggacagaagcccaatcatagtaaatggatcaaaaagtgaatatcaacaatagagctttagggtttgcgaaccactgttgtaagaaagtgggtcatggaagtggagtcagcagaaacagtgctcatctggcttgtagttaagggagaattgtagccttttcctgtcctgctctcctgtcccccaccatggatattgaaggtgggaggatacataccataaatgtttatgggacaggtgatacctcatttaaaatctgctgtctattatttatcagaaattgcacttgagctttatktctttcatttcatcatcttagcaaccctgtaaagtaggtatcttcacttccatttcacagatagtgttgctggggcttagaaaatgataaccccaaataaaggcctcagaagcaaaatttctccttgaccttctcctgctcccgtctcttgcccctcattctccccctaagcaagccatagaaactataattcctctttctcaaggcaggttatagaaactagaaccttcttcctcaaagccaaccaaaaaccccaaaatattactctaaccttcttttctatgtagacctggctataaagaaattccctgatctaccttgtttgatggtaggtcataagactgccattcccatacctgggaagaaggaatgctgcacaaagaggttaagaagaatctggacagacaggccttgctgagtttccccactcagtctattctcattaagtcgtatacccttttgaagcagtagtggttctacatggctttccattcttcaacaaacccaagtgtaaaaatggatagttttccccgtatctttgcatcttcatttggaaggctcctgtgtcacataaaacttggattaaataaatttgttatgcttttcaaaaaacaaaaaaggatggattttgtaattagatttaaaactggccaagcaactagttttcctacaaattagatttttaaagcaacacacttgggttagtccttgtttttgacctaatgccccttctttaaataccttcttatatcagagaccatatgataattatatggtatctgtttccgttttttttttctttttcttttttgagacagagtctcactctgttgcccaggctggagtgcagtggtgcaatctcagctccctgaaacccctgcctcctgggttcaagctagtctcatgcctcagctgtccgagtagctgggattacaggcatgcgccaccacgcccagctaatttttgtatttttagtagagatggggttttgtcatattggccaggctggtcttgaactcctggcctcaaatgatccacctgccttggccccccaaagtactgggattacaggtgtgagccactgcacccaggttttttcccccccatttttataaatgaatttttttattcattttttgttttcgtttttgttttaagagatgggagtctcaccctctctcccagtctggagtacagtgtcaagatcatagctcactgcggccttgaactcctcggctccaggtatccttttgcctcagcctcccgagtagctggggctatgggtgtgccaccatgcctggctgattaaaacaattttttagagatgagggtctcactatgttgctcaggccaatgttgaactcctgacctcaagtgatccacctgcatcagcctcctgagtagctgggattacaggtatgagccacgtgcttgggtcatttttataaattgatatgaaacttttatcaattaaaattctggtaatttatttttatctcttaagtgaaaatgtaccttgacttttttattttttaacggtttaaaacatgtgcagtagaaattctctgttaatacataaatggaaattacattttttttcatattggcgtgtatctacaaatattaaaggacaagaaaaggtaatataattttaggtttaacaaatatggtgtatattcaaataatacttgaccagcttatctaaattgtacataatatttggactagcatatgaatttgattttaattattatgttcacaagcctgggataattagatgttattttgcatctgtaactgtaatcatttcttgtaatttcttgtgcaggtgtattgtacttaatagattttacttttggaaatatgactgttgaaattagcttagcttttatttactgtttgtagagtattttcgttttggagaagaacactgttttagtttaggacgcttttcaagagtgaaagcttctgatgatttttttccctcataggaagaaatactggaaagaaaatgttagtataatgcagttattgtaacagcttatgacttgattttgatttggaaacctatactgaccagatattaagcttaaggattgtataaatcattaaagctgtggtcttttcatatggaggttgatagataatttttttgtcttgagtcttatttggtgactttctattcatgtaattcatcatgtgtgagtgaggttgttgaacaaactgaacacatgggctacagcaagtagtttttatttttttttattatactcaagttctagggtccatgtgcacaacaggcaggtttgatacataggtatacatgtgccatgttggtttgctgcgcccatcaactcatcatttacattaggtatttctcttaatgttgtccctccccgagccccccacccccctgacaggccccggtatgtgatgttccctgccctgtgtccaagtgatctcattgtttagttcccacctatgagtgagaacatgcagtgtttggttttctgtccttgtgatagtttatagcaagtagttttacagtacagatctttccattacattttattgtttaaacaaaacaaaatttgtttttctgttaggaataagaaaaaaatggtttttacataggttcttacggtacgcttggagtacacttacaggccactgctgcagtctacattttattgtgctgaatctgcattctatcagatacccatggaaagacctcagtatatgctttgcactctgctttgctccccttttccaatttcctattgcaaatcattttgatgtaatacagaaaaaacagcatttaaatatctacatgaagagttgacccactaatgtcagccgacctctactttgtcagctcatagttaaatcttttatcatttcaaaaataaagtgcattttctttttctttttcttctttttttagtgatggagtctaactttgtcacccaggttggagtgcagtagcatgatctcagctcactgcaacctccacctcctaggttcaagtgattctcctgcctcagcctcccaagtagctgggattacaggcacctgccaccacgcccagttagttttttgtatttttagtagttagtttcaccatgttgggcaggctgttcttgaactcctgacctcaagtgatccacctgcctcggcctcccaaagtgctgggattacaggcgtgagccgccgcacctggttgcattttcaaaagaatgaatttaagaataataaaattaaaataggcccacttttaaattgtggtccattttataattcaatttttattgttaacaaaaaaaaagagtataaatcagatagtagcactcttcggctgaaaatccttcaatggcttcccagtagattcagaatagaatgcaaaccctttgtcacctttaagaggctttaygacctggctcctgcctcgtttctgctgcttggctccaacaattcaggccatacatttgggccatattaccttctttctctttcttggttgcactgagcttttcctcatctcagggcccctgctcttggcctcctcactttctgagacactcttcccacagacctagcttgcttgggtgctgtctccgttcaaatcacttcccgggagatgctttccctgaacactgttaactaaagagggcagcttctacccctgggcactctatcccattttccttgtttattttttcttggcaatgttaattctttaagtttttttttgtttatttatttgtttgcttatttattatttgtctttcctcattagcgtacaatttctataagggcagaggcttttcccattttgtttcttgctaaagtctcagtgcctggaacagtgtttggccatagtacatacttattgagcattaaatattcttaagtaaatgaatgaatcaattgaattaaatggacacactatcacttcaatagtatgaatattcaaagagtattcaatagtatgaatatacaatgtactcatactctttgtcattttgattaagccatagttgttaaagagtttaatgctcagtttttttttctttcaactagccatgtacatcttcatgtgatcagccaggattttgattctccttgccttaaaaacaaaaaacattggaattctttcaatacagaatacttcctagaatcacaaggtaaacagtgttccttggttttcacatttgtttcattttctgagctgttcttatatttgatttggttgtttccctgaataacaatctgacctcaaaaacctatgtacaactttgtgttccctataaagcgagccctgtgaaaagaaactggattatttggattgtagtattattgccactttgctgtgagttgtcttcttgggggacctagaaagctattatgtcagggtcagtgttttattgtgacaaaaggggacttaaaggctgccgtgagaattagtggagttcatggataagaaagctgtggacaattctttgtctcttctgccatcagttgggtgggagctttggggctgcctcctgtcaggagtggtgaattagcagggggaaccctgtgtatatgtagaagaaagcattttctggtgtgtgatgctttcttacacaccaggaaagcatttcctggtgtgtaagaacttaagcattgatggggtgttcacaatggcagctggcatttaccaagggccaaccagaggtaaagcactctgatgagctcttgacagagtaacatggattgcctagagtgtgtcctgaaggagtgtattatttcaaaggtgggttgctcatatttataatctgattaagctcattttgcctgagggaagtctaaactaagcttacrgagctgtagaatacctggcctggcatactgattggagtcacgtttttgatttttttttttttttttggtatctcatattggttttccagagtagctgggatttgacttttcttccttgcctgcagctgtgatcgagatggtacaagaggctggtagagtaactgtccgagatgggatgcctgagctcttgaagctgccccttcgttgtcatgagtgccagcagctgctgccttccattcctcagctgaaagaacatctcaggaagcactggacacagtgattctgcagagcctgagctgctgctgtggtgtggcccactggagcaaactgctggcacctattctgggttgcttgtgaacttctactcatttcctaaattaaaacatgcagctttttcacaaatttattctattattgagtggccacaatgtagagtggctcaaagtacttcaggattaggaatttgggtttgtcatagatgtattctctggtgagggtggctgggatatacctgacccaccatcttcagaaggacccatgtcaggtctgaccattgggagcaaagccatgttcacactgacctaatgcagagtatggaagcattgggctggttatacatttctgtttcttagatttatcctccgcctctgtaggcatggacaacctttaatcagagcatctagagtggcctcttgtttatcctgaagatactgatgggtcttgttttctgttagtctgttttgtaatattcttttcccttccttcatggggaggcttagtttgtccagtccttccatgcccttctatcccagattacctaaatgttcccttctcaggaattctgtctcatcagttcttcacagtgagaaaagaggctagatgatggtgtggggggttggagttttcttctaataccgagggttcctggctgtgaggaaacagccacatgttcgtcatgattgagctgtgaagtcttcttggacctgttgtctgaaaataaagttaatttgtttgaggcatctctcttaagtaggtggaaactattgaagttcagctaacaatcacagcataggttctgatgcatggaaaggtggttggtgaatgaaaaagttgcgtagagccactactttctttttccctgagaataaatttggataaaacagttgtattcagttgttttttgggataatattagaactaaaggtgaagggaaaactaaaaagttgggtttgatgaaattgtggatatctttggggatgtgacttttcactcaagttgtgagaaaaaaggaaacacccttaacaaaagcttcttctggagagaaaaagccacagtccatagagacatttgacctcaatgtctttcacaaacaaacaagatgccacagtggttacttagtgaacataggtatagtaataattatataattaatgatcatagcagctcacatttgtctgactcctgtgtgtcctgcattatgctaaacactgtactcaagtgatctcattgaattctcactgtacataactctatgaggttacgtgctattgttatgcccctttagtggatgagcatctaatattctacaatggttcctgggcactatccaaagttggtattgattctgatgcatcaactcattatttttcttatcaattgaacagtataaatgcaagactaacagcagaagccatagaacccaggggccttggacctgtgctgatcaaaagctttccgtggcatttcattgatttccctgagatcagccagttcctttagccctttttgtccatctctcattcccaacatctttcatctcttttctctgctccttctgcactccaggattgtaatccttaggtcattagtccatccatccatagttcttctatctggcttgatgctggacctttgggcctgcttgattgtctgcttcgtctcctgaggtggttgtctacatacactgtggctcctggaggttcttccccaacccagctgcagagggcatgtggcttcatagccttttatttgctgtcatcaggtaccaggcacagaaactcttgaaaattgtctgggcacggtggctcacgcctgtaatctcagcactttgggaggccgaggcrggcagatcacaaggtcaggagatcgagaccatcctggctaacatggtgaaacaccgcctctactaaaaatacaaaaaaaaaattagccgggcatggtggcgggcacctgtagtcccagctacttgtgaggctgaggcaggagaatggtgtgaacccaggaggcggagcttgcagtgagccgagattgtgccactgcactccagcctgggtgacagagtgagaccccatctcaaaaaaaaaaaaaaaaaaaaaaaaaatcatgggcatattagttaaaaacaggctctggattcagacctgggttccagtcctggctctgctactcacagctgagggatcttgggcaagttacttattttctctgaactttggaattcacatatgtaaatgagcataacagagttgagttataaggattaaataatctatgtaaagggtttagcatagtatcttgcatagagaaagactcaataaatggtaactggaagcctctgcttttatctcagtggaggctgggaaagaggaattcaccttatccatgcctctctctgcatctgaagccttactgcccctggaaactttctaaatatgtactccatggactccttagatcagaattactggtttccctttaaaaaaatgtaagcacttgggctttaccaaataattactgaatcacaatcctgagggcctaagaatcttcattttaaaccattcaggatgaacttgattttattgatgtttgagaaccacaatataaatgaacctttggcttcaaagcaccttgcatttctgaagcttatggatttggctgttccctgccaggacacaaatagcattttctggttagctgcctgggcctgtcataggtctgccttccctctgctgtgtcagggttatttcagagtctggggagacctccggcattagctgaaggggagtccctcgttacagggatcagcccttcctttcttcaggagtttggcagagctcctttggccccaggctcttaggagccatgtctggagatgacttcccctcagttgctcccgttccctcttcatgcccagagatcagtccagtggcttggtctgggacctgtaatgaacgctgccagccttaggctcagagcrtaagtatttttccttctctgggcctgtctctgagatacccaggtacaaatggtccttgtagggactagatcatacttgagatggtagttaaggatgtctttagattcagggatattttctagagcctggcatctgatagtcacacagactggacatggctggatatcagagagttaggactcatctgtcagtgttggcctaaatgcttccctctgcttccaacaactccaacttggagggagactttcgcagggctctgaagattctaccatagactaatttttaaaaatgtgatgaaagccgtgaaacctcttcagcataatgaatatttacacattttgtatatgttatcagggaatttatggagccactgacgtgcttccatagggtctgtggaccccagtttaagaatctcaagagaaaagggtcatyaccatgcatctgggatatacaggaggggtctcaggtcactgtggaggactggcgcccaccaccatgcctggctaatttttatatttttaatagagatgaggtttcaccatgttggccaagctggtctcaaactcctgagctcaagtgatcttcccacctcagcctctcaaagtgctgggattacaggcgtgagccactgcgccaggcttttttttttttttttttwaatattttaccaaccaagaagaagcattgtagttctggcagccacaagttgaaagctgacacaacccactgcccccacccccaactagtactgtttgacatttattggaggaaaaaaactatcatttattcacattgaagaattagttactggccaaagaccttttgtagaatcttctccagaaactgtgggaggtcctcctagaatgctagttggagttgccagggtccagaggcacctccatgtcctgggtcaccagaccaccagcctttgcggctctttccccagctgcattctggaggtaggaagctgggcccagggcagagaagggggcatctggggatgtctgaagagccagttgagcagctgaatcacaggcattctctaggttacaaatacattgctcagagactaggactgctttcgagaacccacaaagtggaagatgttcatgacaaagcaagagggtcaataggtcaaatactaaaatgtgttccctccagctggccaggcattaggaaagagacccaagatgtgggagggaggccccaatagrtatctgaatcccccacatccccgcagtagctcaaagcctctatgtcccctttatgtgaatgagaaaaggcatgccctgcaagcagaagcttttagctcacactcacttgagactgagggccacatagggtgcaaccgtacgtacaatcttacggtgtggggtccctgtttctcatgaggttctctaggaaaggtagtttttttggttctccatcatgtacccaacgaaattaaaagaatatggaacaaaacagccttgcaataaaatttcgttgagtgaatgacacctgtgtcaatacacttggaatggatgtagaaaagataactttttctgttacatctgaatttgattggcaagcatgttgtccagtgagtctgcatctttgcccttagaaacagttatttttattttttaatccctttttttcacaggtgttgatctttaattttttttatttaaacattttttcttgccttcttcatttttccttcatatgactttggaaacattctgataaacatcttactgccattgtttatgggaaaaaagtatatcttacaggttagaattagtggaacataagcatgttaatatttttccacagaattttccaaatctttgctaacaaagcaagtgattagggaaactggggttttccgtatcttttctgtgaatggtctattttcggggcttgccatgtttggccaccagatggcagcatttgaacaataaatttttaattgtcttccacaagacaaagctgtttttgaagcccttttataaagtatcttatgtttcagaatcaatgcttcaaaataaaatatttaaggggcttttaaaataagactgatgtgtgtttaacgtatctcctaattaagatagaagtttgagggaaaaccagtgtgtgggtcaaaatacaaaacatacacgattgactgggaggctgtttggctgagaggtgaaatagactctaaagttggctggaagctgggcgcgatggctcacgcctataatcccagcactttgggaggctgaggctggcggatcatttgaggtcaggagttcgagaacagcctagcccctagccaacatggcaaaaccctgtctccaccaaaaatacaaaaattagccaggtgtggtggcacgcgcctgtaatcccagctacttggctggctgaggcacgagaatcgcttcaacccaggaggcagagattgctgtgagctgagatcgtgccattgcactccagcctgggtgacagatcaagactgtgtctcaacaaacaaaccccaaaaaacattctttctattaaaaaaaataataagttggctagagccaaggttgaagcctgattctggcaatcatgaaatgggtcttggggcatgtcaatgcatggtaggcattgaaaatatgctggcaaattttcttaatttgaccccaagttagtgactgttgttcacatcacaagaatacctgggagtagcactggtagcagacacttcttttgggcatattcttcaaaaatggcatcatttttacatcgacaattgctaagtcgctggtggtcaaatattagaggaagcactgtcaaagcaggacggtcaatatacagagaaggtaaagggctgtgtctgcattttccatgggccagcttccccgcaaacctccttttgatagaagaacctagcttcatctgtcttccatctcttccaagccttctgtcttttaagcaggcagaataaaagctccaatgccaaagagtacaagaatattaaaattgaaaaggactttatgtaccaggggtcctgacattttgagggagtcatagatccaaaatttggtgaagatgatagcccctttcccatatgttttgcatgtaatttcaagggaagcaccccaaaaatcaataatccatggattttctagggcaggtcttctcagctggtgtgcgtgtgtgtgtgtgtgtgtgtgtgtgtgtgtgtgtgtgtgtgtatcccctagattctaattattttgaaccaactggcagtgcttttttccaaactacacacagaaagtcactctgctaccactgggcatctaatctctctggtgctttggggcaaagtttaatctcttgcctggagaatctatcagaactctttattctagtagcctctgatgttccattgagggatttgaaacatagaagtgactattataatatcagcaaccaacttatgtcctaattaaacatcaagagtgcttgcattcccaaattcatgctgggagagaatatactaaaacgttaattagcggtcctctcttggtggtaagaatgtggataatttaaattgtgttatattgttgtgcacgcttctaaattagctacagtgaatacatatttgggagtgtgaaaaaagcctcaaattttatttttaaaaagtgataggtcacaaaggaatgtaatcaacattcaattatttatattaatagctgatacaacaaaaagtggctaattttttttttttttttacaaataatgccagttccattcgagtgttctgtggccctccagagacaggcatcctgcaaggccagatttcaagaccaaatttgcttgagtctgagaatgacacacgtgaaggtaattcatttgatctgatggatctgatattcctaacactagatctagaaaaatagtggctttttctctgtttgcccctaacctcaatgtctgcgagacaccaactacattttagttattcaaaattgctgtccatagcaactttctgtttgtacttacaaatgcctttcaccacccattgagatcccatgatttcccttgtaaattatgttgatatgaaatgttacatttggtttccaaatactgaaccaccttgaattctgggggtgaatcctcttggttccctagggcttctctttcagtattgactttgactctgaaacattcgtgatgggatgggtttggggaataagatttatagattgatttatgtatttggcctggtccccagattttaacaaaagtatcaggaaaaggggaagaaaagatggaaaatgagaagaatggttagaattttggcttgttggatcagttcccagaacatcctttgtgttagagaaatcaagtaatgggagaagtggaaagaaaacaaaaaagttagtgaagctaaaccaatctacatagtgaagacagaagggggtgaaggactgaaaaagataggtgaatatttggggcagactttgaggcatctgggaagtgggagctttggagggctctgggagatttggggaaaagaaggggatttgaagaagggttggtctctctgggtataaatgagtcccttttaatatatttttgagagacaaacaaagattatatacttgattaatttttttttctttttttggtagagacagggtctcaccatgttgcccaggctgatcttgaactcctggcctcaagggatcctcccatcagccttccaaagtgttgggattataggcataagccactgcacctggcctttttggccacattttgacttctgttgttcctattccaatttctcatttcttgcattttgtatttcttctttttttcttgataatatttgctagatgtctgcttataaaacgctgttttttagaaaagtaggttttctttataactcttatttttgccttttcttttgctttwaaaaaaaacttttgagtcaaagttcatatactttaatattaagaattttcttttggctgggtatggtgacttacacctgtaatcccagcactttgggaggctgaagcaggcagattgcttgagcccaggagttcgagatcagcctgggcaacatggtgagactccatctctaaaaaaaaaagttaaaaaattagctgggtgtggtggcaaacacctgtagtcccagctgctcaggaggctgaggtgaggattgcttgagtctgggaggtcaagtctgcagtgagccgtggtcatgccactgcactccagcttgggtgacaagctggagtctcttttgggtctcaaaaagaaaaaaaaagaattttatttttatgatgaaataaattttttaaaataatgaaaatatttatggctataaattgaatgttgggttggacctgagatttacagagactgccttggctgttgataagaagaaaatacttactctagtttcaagacctgaaccatcaggttttcttgtttccatcagagaagtcacatgtcaggatgcttaagtgtaggataaggctttgctccttgtatatttcacaaatttttttttcttttttctttttttgagatgggttctaactctgtcacctaggttggagtgcaatggcatgattataactcactgcagccttgaactcctgggttcaagtgatctttccaccttagcccacaaatattgtttcttcctattttcttatacatgagtagccttctacccccgagcacagaaacacaggatctgctattagtcttttatacttcagcatgattttacagatcactattatcttttccagacaggaatttgcatttcaattctttttgtacaacaaaaagctttgtcctcaattgaaggatttttaattttaacgaagtccaatttttacattttatcttttgtaaattgtattttggtgttgtaaagtcattgctaaactcaaggtcacctagatacctagattttctcctatattatcttctaggagttttatacttttatgttttatatttatgtctgtgatccattatgtctatgagttaatttttgtgaaaggggtaagattgttatttagattcatttccgtgaatgtccagttgaagcatttttaagcattatcagatggggaatatttttttttttagtgagaaaagacatttattttcttatgtaaaacatatattgcatataacagtaataatgacataagctgatttataaagaaggcaaaaataaacaatattcagaataaaaagctgatagcagtagaaatttaaaaattgaaaacttttttttttttttttgagacgaagtctcactcttgtccccctggctggagtgtgatggcacaatcttggctaactgcaacctccacttcccaggttcaagcaattctcctgcctcagccccgcgagtagctgggattacaggcatctgccaccatgcctggctaattttcgtgtgtgtatatatatatatatatayacacacacacacatatatgtatatacacacacacatgcatatatatatacacatatatatacacacacatgtatctacacatacatacacatatatatatatatacatttattacactttaagttctagggtacatatgcacaacgtgcaggtttgttacataggtatacatgtgccaagttggtttgctgcacccattaatgtcatttacattaggtatttctcctaatgctatccctcccccagccccctaccccacgacaggccctggtgtgtgatgttccccaccctgtgtccaagtgttcttattgttcaattcccacccatgagtgagaacatgtggtgtttggttttctgtccttgtgatagtttgctgagaatgatggttgccagcttcatccatgtccgtgcaaaggacatgaactcatcgttttttatggctgcatagtactccatggtgtatctgtgccacattttcttaatccagtctatcattgatggacatttgggttggttccaagtctttgctattgtgaatagtcctgcaataaacatatgtgtgcatgtgtctttatagtagcatgatttataatcctttgggtatatacccagtaataggatcactgggtcaaatggtatttctagttctagatccttgaggaatcaccacactgtcttccacaatggttgaactagtttacactcccaccaacagtgtaaaagcattcctatttctccatatcctctccagcatctgttgtttcctgactttttaatgatcrccattctaactggtgtgagatggtatctcattgtggttttgatttgcatttctctgatgaccagtgatgatgagcattttttcatgtgtctattggctgcataaatgttttcttttgagaagtgtctattcatatcctttgcccactttttgatggggttgtttttttcttcaaaatttgtttaagttctttgtagattctggatattagccctttgtcagatgagtagatggcaaaatttttctcccattctgtaggttgcctgttcattctgatggtagtttcttttgctgtgcagaagctgtttagtttaattagatcgcatttgtctattttgacttttgttgccattgcttttggtgttttagtcatgaagtccttgcccatgcctatgtcctgaatgatattgcctaggttttcttctagggtttttatggtttttaggtcttacatttaagtctttaatccatcttgaattaatttttgtataaggtgtaaggaagggatccagtttcagctttctacatacggctagccagttttcccagcaccacttattaaatagggaatcctttccccatttcttgtttttgtcaggtttgtcaaagatcagatggttgtagatgtgtggtgttatttctgaagcctctgttctgttccattggtctatatctctgttttggtaccagtaccatgctgttttggttactgtagccttgtagtatagtttgaagtcaggtagcatgatgcctccagctttgttctctttgcttaggattgtcttggcaatgcaggctcttttttggttccatatgaactttaaagaagtttttcccaattccgtgaagaaagtcattggtagcttgatggggatggcattgaatctataaatttcattgggcagtatggccattttcatgatattgattcttcctaaccatgagcatggaatgttcttccatttgtttgtgtcctcctttatttcattgagcagtggtttgtagttctccttgaagaggtccttcacatcccttgtaagttggattcctaggtattttattctctttgtggcaattgtgaatgggagttcactcatgatttggttctctgtttgtctgttattggtgtgtaggaatgcttgtgatttttgcacattgattttgtatcctgagactttgctgaagttgcttatcagcttaaggagattttgggctgagatgatggggttttctaaatatacaatcatgtcatatgcaaacagggacaatttgacttcttcttttcctaattgaataccctttatttctttcccttgcctgattgccctggccagaacttccaacactatgttgaataggagtggtgagagagggcatccctgtctagtgccagttttcaaagggaatgcttccagtttttgcccattcagtatgatattggctgtgggtttgtcataaatagctcttattattttgagatacattccatcaatacctagtttattgagagtttttagcatgaagggctgttgaattttgtcaaaggacttttctgcatctattgagataatcatgtggtttttgttgttggttctgtttatgtgatggattatgtttattgattttcgtatgttgaaccagccttgcatcccagggatgaagccaacttgatcatggtggataaggtttttgatgtgctgctggattcagtttgccagtattgaggatttttgcatcgatgttcatcagggatattggtctaaaattctctttttttgttgtgtctctgccaggctttggtatcaggatgatgctggcctcataaaatgagttagggaggattccctctttttctgctgattggaatagtttcagaaggaatggtatcagctcctctttgtacttctggtagaatttggttatgaatccgtctgatcctggacttttttggttggtaggctattgattattgcctcaatttcataccctgttattggtctattcagagattccacttcttcctggtttagtcttgggagggtgtacgtgtccaggaatttatccatttcttctagattttctagtttatttgcgtagaggtgtttatagtattctctgatggtagtttgtatttctgtgggatcagtggtgatatcccctttatcattttctrttgtgtctgtttgattcttctctcttttcttctttattagtcttgctagtggtctatcagttttgttgatcttttcaaaaaaccagctcctggattcattgatttttttgaagggttttttgtgtctctatctccttcaattctgcattgatcttagttatttcttgccttctgctagcttttgaatttgtttgctcttgcttctctagttctttgaattgtgatgttagggtgttgattttagatctttcctgctttcccttgtgggcatttagtgctataaatttccctctacacactgctttaaatgtgtcccagagattctggtatgttgtgtctttgtcctcattggtttcaaagaacatctttgtttctgccttcatttcattattttcccagtagtcattcaggagcaggttgttcagtttccatgtagttgtgcagttttgagtgagtttcttaatcctgagttttaatttgattgcactgtggtctgagagacagtttgttgtgatttctgttcttttacctttgctgaggggtgctttacttccaactatgtggtcaattttggaataagtgtgatgtggtgctgagaaaaatgtatattctgttgatttggggtggagagttctgtagatgtctattacgtctgcttggtgcagagctgagttcaattcctggatatccttcttaactttctgtctcgttgatctgtctaatattgacagtggggtgttaaagtctcccattattattgtgtgggagtcttagtctctttgtaggtctctaaggatttgctttatgaatctgggtgctcctgtattgggtgcatatatatttaggatagttagctcttcttgttgaattgatccctttaccattatgtaatggccttctttgtctcttgatctttgttggtttaaagtctgttttatcagagactaggattgcaacccctgctttttttttttttttttttttgctttccatttgcttggtagatcttcctccatgcctttattttgaggctatgtttgtctctgcatgtgagatgggtctcctgaatacagcacactgatggatcttgactcttcatccaatttgccagtctgtatcttttaattggggcatttagcccatttacatttaaggttaatgttgttatgtgtttatttgatcctgtcattatgatgttagctggttattttgcttgttagttgatgcagtttcttcctagcattgatggtctttacaatatggcatgtttttgcagtggctggtaccagtcgttcctttccatgtttagtgcttccttcaggggctcttgcaaggcaggcctggtggtgacaaaatctctcagcatttgcttgtttgtaaaggatattatttctccttcacttatgaagcttagtttggctggatatgacattctgggctgaaaattcttctctttaagaatgtcgaatattggcccccactctcttcagccttgtagagtttctgccgagagatctgctattagtctgatgggcttccctttgtgggtaacctgacctttctggctgcccttagcattttttccttcatttcaaccttggtgaatctgacaattatgtcttggagttgctcttctcaaggagtatctttgtggtgttctctgtatttcctgaatttgaatgtcagcctaccttgctaggttggggaatttctcctggataatatcctgaagagtgttttccaacttggttccactctccctgtcactttcaggtacaccaatcagatgtcgatttggtcttttcacatagtcccatatttcttggaggctttgtttgtttctttttactcttttttctctaaacttctcttctcgcttcatttcattcatttgatcttcartcactgataccctttcttccacttgattgaattggctactgaagcttgtgcatgcgtcacgtagttctcgtgccatggttttcagctccatcaggtcatttaaggtcttctctatgctgtttattctagttagccattcatctaaccttttttcaaggtttttagcttccttgctatgggttcgaacatcctcttttagcttggagaagtttgttattaccgaccttctgaagcctacttttgtcaactcgtgaaagtcattctccgtccagctttgttctgttgctggcgaggagctgtgatgctttggggagtataggcgctttggtttttagaattttcagcttttcttctctggtttctccccatctttgtggttttatctacctttggtctttgatgtcggtgacctacagatggggttttggtgtggatgtccattttgttgatgttgatgctattcctttctgtttgttagttttccttctaacagtcaggtccctcagctgcaggtctgttggaatttgctggaggtccactccagaccctgtttgcctgggtatcaccagcggaggctgcagaacagcaaatattacagaacagcaaatattgatgccttatccttcctctggaagcttcgtcccagaggagcacctgcctgtatgaagtgtcagtcagcccctactgggagatgtctcctagttaggctacacgggggtcagggacccacttgaggaggcagtctgtcctcagagctcaaacgccatgttgggagaacacagctctccagagctgtcagacagggacgtttaagtctgcagaagtttctgctgccttttgttcagctatgccctgcccccagaggtggagtcaacagaggcagcaggccttgctgagctgtggtgggctccacccagttcaagcttccccagctgctttgtttacctactcaagccttagcaatggcggacgcccctgccgctgccaggctgctgcctcacaggtcgatctcagactgctgcgctagcagtgagcaaggctccgtgggcgtgggacccgccaagccaggcgcgggatataatctcctggtgtgccatttgctaagaccattggmaaagtgtagtatttaggcgggagtgtcccatttttccaggcacagtctgtcatggctgcccttggctaggaaagggaaatcccctgaccccttgggcttcctgggtgaggtgatgccctgccctgctttggctcaccctctgtgggctgcacccactgtccaaccagtcccaatgagatgaaccaggtacctcagttggaaatgcggaaatcacccgtcttctgtgtcgatcacgctgggagctgcagactggagctgttcctattcggccatcttggaaccaagcggaaattttttaatataaagtgtttcctcctctcccaatgtcccatgtccctaataatgagaatttgtgattacaataattttaagaggaaagaatacagttgctagcagaaagccatgcaaattagggagactggagtgtgagatctcccccctcctccagctgtttttcttctactgacagctggcagcagggtggggttacaggagcctctgccttctctgggctggatgtgtcaaacctttctaactccaaggaaaccatcagcagaggccccctacttcctgcctgtgtctgtctgccagtatgcagacaccatgagataggagcagtgctcaaaraactatgcatttgctttggtatcttaatcccaaatccacttcaagatttgggggaaaatgagcaacctccagtgttaagtgtgaaaagtcagttctttgtggaaagcatgattgaattttcacaattgaggaacttgtcacagtgtgtgatctgcccagaggcactctccaaaacaccaaaaattctccaggaatgttttcatctttttgaaactccagtttgcatttccaggagccaggctgacctgtgtgcacagtgttctgtaaaggcagtttgttttttcagttaaaggtggtgggaggaacactggagtggtgtccactgttgagaaagagatgggaactcattcctgaaggaaagatgggcgtagagagcattaggctgcccaggcatgtgggcaagcagtgagaacagaagtctttggggacaaaagtcctgtgctagatttgccaagagaaatatcaactgatctctttaaaatgagatccctcccaccccctacwtggggcctggaaaatgtggtctgctaggtatggagacaccaaataaacagtactgaggctccctgtgtgtcagtcaccacccctggcaaatgccaaaatgcctcactttgctcgaggaatttacaactcaaggtgtttgtgtcacaggccaagacgggagtggaggatctgtccatcrgaggacagaatgcttcccctatgccaaggcgcctcctcttgtattcacgcacagcattttcctgaaactggttactgagcctggaatttctgttaacgttcaaaggcaaatgagaattaccaagctgagacgagggctgggggtatgctatcttcctttagtccctttcataaaagcccttgtgctgtccagctgcctttctttccagaaggtggtggtccagttttaattatgttaacagagggagtatagctaaaaaacgacttactccatcaaaatctcttccgctaccaagagcacggagaccagcaggtttggctgtttgaatcctccctgctctgcatggcttttcggaacctcggatccttcgccttaaactcaggggttaaaaccctaagaattaaacgaaataaagtatctaaagtgagcacagggcctggcctagagggttgagtttcctcctcctcccggataagggaagcggtgatgaggccaggtggagcccgagggccttcctcggaggcggtgcgggcagcaggtgagggctgcgcccaggagggtccgggaagggtccctgggtgggggagggggaaaggggctgcggctccggccagcggggagccctggcccgccctctcccttttcggacctccgagggagaccggccgagagctgggccaggtgggctgcaccgaatggggagaagcggctgcgggagccgcggcggaatcctcagctggagggcgccccagaggtctccgggatccttgtctccctggctccttggtaggcgcgggaggcgcccatggggctccagccggggcctaggaggcggtgacagatggctggggatggaggaggctaagccccgggctttctccccggcgcccgcaggggacttccaggcaccctcgacggcggaccgagctagggcgcggggccgatggtgcggggacctccctgggctttggggtcatgaaaggctcccagacgctctggccccgcaggcgctgctcgtcactgggaccgggcttggttcgatctgggcaacagcagttacactgcggccgctgctccgcccaggccagggcagtgtgggggcggggaggaaggggacgcatagtttcctcggggctcctgtgtggccagcctaaaagtggggttttcgtcgcctgtggtgaaatatctgcgcctcttccatcctcagtaaccagtactgattttccttagcgtctcctgttatccaaagcgaccacaacctacatgacagccccactagaagctttgaggtgacattctctggaatmtcgatttagctgtgcaacacttggcaaattgacttcctgttcctcggatttctcacttgtaaaacagacactgtaataccatctactttgtagggtgaatgtcaatattacatgaaatcatgggagtaaagcatttggtagatggtcactcaatgaatgtgatgattatggcaaggagttgtttttcaagggaaacttgcctgtgaaattggtttaatacatttattcatctgcattctttgtttcttttctgtcctaagtaactacacaacaatgagcaggcttaagaaaatatcaactttggtagatgctaaatactgcttaggacgaagtaagacatctttgacaaggcaagtcgcttttaattcaaaagaattttgagaaaaaataatttagccccccttccaaagataagagattacagtggtagtttctatattcattaaaaaacttatgtttttaaaatggaaaaaatgctctgaccggtgacaggtttaggggagttcatttcacaagtgtctggagcaacagttaacttcaaggtcaacgtccagacatttggccaggtaaagaatcatttcccaatcatttgctgtgccagtgtggaatgtaaacatgctgaataattgaaaacagctgttgttactgtaatagtcaccctctgcgtcctttcctgctgttttccacgtgctctatcccccaaatctaaaaggctgtaagccaatatcactaatagcaaaggtggtcatgagggcatttttcctccttctgtgactcatttctttctgtgtgagatgactccgtagacacaacacaattgagtcttgcatgttatctacccctttatttaaaacccaaagaggacttacaaaaagagaagaaatctctttaaaggtgaacaatgcagtcaagttacttgctcacaatcatatttgtaggctagcttaagaggactttgtattataataaaaagtttctgaattgctttttagttcatcatcactgtattcattatatatagctctgtttctggagaaaaacctaatatatatatatatttttaaatggcattatctaattgcacagtcattttcagtcatacaaaagccaacattaaaaatgagcaaagggaaataattacgacttgcaggctgggaagaggtaaataatctgatgtgtagttcttgtgcgtgagggatttaattagacatcaacagaaaaagaattttttttctgaaaaaatatataatttaatccacaatgtgtttagctatagagagttttattgacagaattcctttaatgtttttctgattcatttggtgcttaacaaagggattactttagctcttgtgtcttgattgactattgtatgattctttaatcttttattgactagtgaaataaacaaaataattatagtgagagattttaatatgtgtatatcaaacttggacatctctgttagggaagcaggagcctagaggagccaggatgataccattttaaaatcacctccatcttgaaactagcaaggcacattccttgccagtcatgacccatggtccttagatgtttacagctaaagtagcagcttgttaacgcctgcaaggacacactcctacaataacagaaagtccagatgtcctgatatccataacagtatgtgctttgaatataattgtagttatggtttgaggtactcacacactagaatgtcgaggatagttttatttaaatcagtattacacattttgtcatgctgtctgctcaccctcatgtagactcagcttagyttagtctttatatacataagaccccctacataagaaaaacttaaagcaaagatggtgcgttcctctgcttgccttctgagggtgctgtactctggaagggagtagcttctaaataacttgcttctttcactgcactctgtgactcaccttgaattccttcctgcgtgagacccaagaaccctctcttggggtctggatcaagactccttttccggtaatgaatccaggaggcgaaaaaataaggacatttaggaatcgagcaattcagtaaacatttgtgtgtgtgtgtgcacccacgtgcatacatacacttacgtgtagaggatctagaaagatctttatattctttgaatagagaagatacacatttcccatatgatcatagtacctttaaaatagttgatcccatatttggccacaaagaaattctttttcttttcttcccctggagatagggtctccctctgtcacccaagctggagtgcagtgtcacgatcatagctcactgtaacttcaaactcctggacccaagcaattctcccgcctcagcctcctgagtagctaggactataggtgcatggcaccatgtccagctaatttcaatttttaaattttttgtcgagatgaggtctcactrtgttacccaagctggtctcaaactcctaccctaaagtgattctgatccttccccaccccaccagcctcccaaagtgttgggattacaggtttgagccaccacacctggcctaagcaattcttgatacattaaaaaatagaagaggtataccacaggccatgatatggcttggatctgtgtccccacccaaatctcatgttgaattgtaatccccagtgttggcagtagggcctggtgggaggtggttggacatgggggcagtttctcacgaatggtttagcaccattcctctagtgctgttctgctgatagagttaccatgagatctggttgtttaaaagtgtgtaacacctcccaccctgctcctgctccagctgtgtaaggcgtgcctgtgtcccctttaccttctgacatgattgaaagtttcctgaggcctcccaagaagctgaacaggtgccagcatcatgtttcctttacagcctgcagaactgggagcaagtgaagcctcttctctttataaattacccggtctcatgtagttcttttttttttttttttttggagatggagttttcgttcttgttgcccaggctgtagtgcaatggcacaatctcagctcactgcaacctctgcctcccagattcaagcgattctcctgcctcagcctcccgagtagctgggattacaggggcatgccaccaggctggctaattttatttatttatttattttttgtatttttagtagagacagggtttcacccatgttgaccaggctggtctcgaactcctgacctcaggtgatctgcccacctcggcctcccaaagtgctgggattacaggcatgaaccactgctcccgaccatcaggtagttctttattagcagtgtgagaatggactaatacaggccacagtatttgaacataattaaaattataaattaataatttaaaaagtatctaaaaatcttgaccatttggatgtgaagaattatactgccagataacttttggattattacagaaatcaatgctgaacttgcacgcttagtaatgtaaagtctaacattttatacaagaatctgtaggatatagcaaaagctattttcagaataaagtagattgatttaaatagctttcattgtacagacaagagactgaagataaactcatcttaagaacttagaaaaaatatgtaaaaaataaagagaaatttaaccaagagaaattaggaaaagggaagttacaaaattaaggccaaaattaacaaaatagaaagcaaaaactatgtaccaaaaggtcatataggctgggcgcagtggctcatgctggtaattctagcactttgggaggccaacgcgggcggatcacgaggtcaggaattccagactagcctgaccaacatggtgaaacctcgtctgtactaaaaatacaaaaattagctgggcgtggtggcacgcgcctgtaatcccagctactcgagaggccgaggcaggagaatcgcttgaacccaggaggcggaggttgcagtgagctgagattgcgccactgcactccagcttgggcagagcaagactctgtctcataaaaaaaaaaaaaaagttatttaaattcagaagttggtttttttgaaaagagcaataaagtaaataaactcatcactaaccaggttaaagaaaaaagaaagcacaattatatgatattttgagtaagaaagagacataactgaagggggcctgcccctccacacgtgtgggtatttctcgtcaggtgggacgagagactgtgaaaagaaataggacacagagacaaagcatagagaaagaacagtgggcccaggggaccggcacgctcagcatgcgaggacctgcaccggcactggtctctgagttccctcagtatttattgatcattatttttactgtcttagcaaggcaagtgtagcagggcaacaggtgaaggtcagcagggaaacatgtaagcaaaggaatctgtatcatgaataatttcatggaaaggtactgtgcctggatgtgcacataggccacatttatgtttcactttacacaaacatctcagtgtagcaaagagtaacagagcagtattgctgccagcatatctcgcctccagccacagggtggttttctcctwtctcagaatagaacgaatgggaatggtcggctttaaaccgagacattccattcccaggtatgcgcaggagacagaagccttcctcttatcccaactgcaaagaggcctccctctttcactactcctcctcagcacagacccttcarggatgtcgggctgggggatggtaaggtctttcccacaaggccatatctcaggctgtctcggttgggggaaaccttggacaatacccaggctttcttgggcagaggtccctgcggctttccgcagtgcattgtgtccctggttaatcgagaatggagaatggtgatgaattttaccaagcatactgcctgcaaacatattgttaacaagaaacatcccgcacagccctaaatccgttaaagtttgattcaatacagcacatgtttctgtgagcacagggttggggctaaagttacaggttaacggcatctcaaagcaaaacaatttttcttcgtacagatcaaaatggagtttcttatgtcttccttttctacatagacacagtaacaatctgatctctctttcttttccccacgcataaccacagaaatagaaaaggttaaaaatgatttaaagagaatgttggttgggcatagtggctcacatctgtaatcccaacacttggtgaggctgaggtgggcagattgcttcagcccaggagtttgagaccatcctgggcaacatagggagaacccccatctctataaaaaatttaaaaattagctgggtttagatggcatacacctgtagtcccagctacttgggaggctgaggtgggaggattgcttgagcccagcaggtcaaggctgcagtgagctgtgatcacaccactgcactccagcctgggcaacaaaactgtctcaaaaaaaaaaaaaaaaaagagagagagagagtgttaacttgaactcttaactatttggaaatattgaggatttcctagcaaaatataaatgaataaaagtgacataaagagaagctgaaaacttgaacagactcattaccataagaggttggagaaatgattatagctctatccttaaaaaagagctggtgccaggtgatttcccagctcaatgtgacctgactattttttaaaaagcaggtaatacagtgttatttaaaccagtacatatcaaacatcaataggaatcacctggaaatcttgttaaactgcacactgtgattcaataggtctgaggtggaacctgaaattctgtatttcttaaaagctgtcagacggtgatgctgatgttactggtccatgctctttgcactgcaaggatttaaatgactcaagaccataaaacaggccgggcggtggttcacacctgtaatcccagcactttgggaggctgaggtgggtggatcacttgaggtcaggacttcctaaccagcctggccaacatggtgaaaccctgtctctactaaaaatacaaaaattagcagggcatggtggctgtgcacctgtaatcccagctccttgggaggctaaggcaagagaatcccttgaacctgggaggcggaggtttcagtgagccaagatcacaccattgcactccagcctgggcgacagagcgagactccatctgaaaaaacaaacaaacaaacaaaacaacaacaacaacaacaacaacccataaaacagsatggaaagctcctttaataaagccagcacagctttcatagttcaatcaggtacagaggatgcaaagaaaagggtatcatagactaatttcacttgcacatgcattcagcaaatgtttattgagcacctactaagaatgtctgttactgttctaggggcagggaatatagcagggaacaaaacaggttaagtccctgttctcttgagattacttattgtgatactagcaaaaagctcccttggcatctctggagtagtaagaatatcttttatatgccaatgaggtgactggtggctgggagcccctagagatcttcaggatgagggctggtcactggaaaggccaaggcatgattagagggctccaacttccagccccaccctccagcctctagggagagaagaggggctgaaagttgagttgatcaccaatgggtagtgatgtaatcaggtatgaagccttcataaaaacgaaaagacagggttcagaagagcttctggatagctgaacatatggagtttcctggagggtggcaccccagaagggcatggaatctctgcttcccttcccacatgccttgtggtatgcatctcttccagctggctgttcatctgtatcctttataataaatgggtcaatgtaagtaagtgtttccctgagttctgtaagctgctttagcaaattaattgaatcccaggagggagttgtggaaaccgtgacttagagctggttggtcagaagcacaggccacaatctgtgcttgcaaccagcatctgcagtggtgggggcagtcttgtgggactgagccctcacctgtgggatgcaatctccaggtggatagtgtcagagttaaattgaattggcagccatctagctggtrtccactggagaatcatctgcagaactgtcttggtgtgtggggaaaaacccacacatccggtgtcacaaatgttgagtgactctgcgggagtmgagagtagaaaaaacacttaggttatttatgtaaccttacacttattaatacagatgcaaaaattctaaataaagtattaataaaaatcaagttatataataataatatactgctatagagtattttaattatgccctattctatatatttcaggtgtacaggctggttcactatcaagacatctattaccrttagtaatgaattatgataatactataaaggaaaaaccatatgatcctgtcaatatacactggaggaacattttataaaatttaatagccattcctaataaaaattctaagccaatagggtgtgatgacttttctattaaaaacaagtctaagtaacaatacaaggaaactacttatctaggataaggactgtatctctaaacccaatagcaaayattgttctaaatagcaaaactctgaaatcatttcattgaaatcagaaattagaaaaggatgtccatgtgctattattatgttacattgtcaaagtaaggtaagaaaataattgccataaactttgaagaagacgaaataaaactatttatgtttgtctatgtgacttcattgtttgcctagaaaactcgagggactttagtaataaactatttgaattgtaggtcattttggaaaagtgggcagatgcaagataaatatacaaaaagcaccaacttctctccgtattagcagtaagtactttgaaaggaaattagaaaactattttattttctacagttttatacaagcttaaaatacttaggagtgtaatttaaaaaaatcttttaattgtcattttatagctccccaccgcagctgcccccacccttcccttcgatgacgacgtttgcagggttcagggcgaccagggaacaaagctggggcctggcagacccactatgctgccagctggagaaaacaagtcacaatgacaaattatcacaattagcacctgtacttgggggaaaaaatctgcaaattggggaagccccagctcctcattgtacaggggtctgtttggcagtgaccttgctctggagatgacattccttcagcctgagggaatcgacgttgatgaacccgtggcatcaatcggctcataatccccctgcacgttcatgctcaccagctcctcgttgtagagagacagtggggactcccgaccgaggatatacacctggcccttgaggacagacacctgcactttcccttccactcattcctgggacttggcattacagtggcggacaaattcacactcagggctatgccagaaaccggtatacaccagctcagcaaatttcaagcycaggccttgtttgattttgcgcacttctcggtacatggtgaaggccttgatgtctaaatgagtgtggtgaaggatggtscctgctggggcctmgcagatacctcaggacttcattccaatgaagcggttctccacgatgtcaatacggcccacgccgtgcttgcctgcaacttcattcaggtacacgaaaagctccaaggaggtctggtgggtggtgccatccttgacgttggtcaccttcacggggaccccttttttgaacttgatctcgagaatgtcaggggtgttgagggctttggctgggtcctgggtcttcatgtagagacctggaggcacttggttcttggggttccaggattccagcctcatagctgatgtgcatgaggttctcgtctatgcttcacgggctctggggagtgactggaatgggaacccgatgttgctttgcctatttcatcaggtcattgcagcccttgaaccggttgtagaactcgggcatcctccagggagcggtgacctttatctggggggccagcaaatagcaggtgagctcaaaccggacctgatcatttccttttcccgtggtgccgtggaacacatacttggcctcctcctgcttggcgatttccacttgtttgccggcgatgccgggcctggccagagaggtgcccaggaggtagcggttctcatacagtgcgctggactggatggccggccagatgaactcctccacaaactccctgctggcatcctcaatgaacacctttttggtcccaagcttcagtgccttcttccaggcttcctcgaagtcttccttctggccagtgttggccaggtaggcaatgatgtcatagccttgttccttcagccacacgaggatgcaagaggtgtccgggctgccactgtaggccagaaccactgagcctttgctggacatagcatctgggattggaggctcgagttcctggcatctgccatctgtcttcatggtgcggtgaaccactcgggctcagggagcggtggcaggcgacagagcagggagtataatttcaaaataccaaaccatccacaaaaacccagagaatagtacccataaccagcttcaacaatcgtcaatattctgcccttcttgtttcatcctgcctctccaccttacctactgtagtactactttaaagcaaatttcagaaatcagaatagtttcaccttgacagtaaaattaataagatataagacctatttaaagttataaaagctcaattaaaattataaatgttatctgaacaaatggaaagacatctcatgttctttaatgacttggaatcataaaatctatttaaagatttttaaaaatttatttatttatttattttcagagacagggtcttgctctgttgcccaggctggagtgcagtggcaggagcatagctgtactgcagcctcatactcctgggctcaagggatcctcctgccttagtttcccaagtaataaggaatacaggcacgcaccactatacccagctaattttttttaaagacgaggccttgctatgttgcccaggatggtctcaaactcctggcctcaagagatcctcctgccttggcctcctgaagtgttaggattagaggcatgagccacggtacccaggcctgaatttttaaatataaacccaaaagcacaggcaacaaaagtaataatagacaaatgggattgtatcaaactaaaaagcttctgcacagccaaggaaataatctacacagttaagagacaacctacagaatgggagaaaatatttgcaaaccatacatctgataagggattaatatctaaaataataaggaactgaaacaactcaattgtaagaaaacaaataatgcaattaaaaaatggtcaaaggatttgaatagacatttgtcaaaaaaagacaaacaagtgaccaagcacagttatcttttgggatctgtaggggattaattccagaacaccctgcggatacccaaatctgctgatgctcaagtccctgatataaaatgataacagtatttgcatataacctacacacatcctcccatatacttttatttttttatataaagacggggcttcaccatgttggccaggctggtcttgaactcctagtcccaagtgatcctcccgtctcggcctcccaaaatgcagtgattacaggtgtgagacatcatgcccagccccctcccatatactttaaatcatctctggattacttataatacctaataaaatgtaaatgctatatatgaatactatccagcttcaagaaggaaggaaatcctgccatttgtgacaccctggatgaatccagaggacattatattaagtgaaataagtcagatacagagagacaaatactgcataatctcgtttgtacgtgaattctaaagaagttgaactcatagaagcagagagtggaatagtggttatcaggctgagaattgggcgttggggagatgttggtcaaaggatacaaaatttcagttaggaggaataaattcaggagatctattgtacggtatggtgaatacagttaatatcaatgcattgtgttcttgaaaattgctaaaagattagattttaagtgttcttacctcaaaaaaaataggtatgtgaagtaatacgttaataagctcaatttagctaccccacagtgtatacatatttcaaaacaatatattgtacacaataaattatataatttttgtcaattaaaaatattagaaaaaaatacattgggccaggcatgatggtttatgcttgtaatcccagcactttgagaggcggaggcaagaggaactcttgaggccaggagttcaagtccagcctgggcaacatagacccagtctctacaaaaattaaaaaactaggtgagtgtgatggcatgtgcctatagccccagcttactcaggaggttgaagtgggaggatcacttgaacccaggcgatcaaggctgcagtgagccatgttcatgccactccactttagcctgggcagtacagccagagcctgtctcaaaaaacaaaaacaaaagtaattggttacctcagaggggtaggtttggaagatgtggggtatggacggggctgattaagttttttttttttttaatatatccctgtattgcttcattttgtgcacaatctttaatacttttataatacaaaaaagagaaattttaaaaatgtgtttgctctatctccaatgtctagaacagtgtttggcacatatttggcattcaataaatgttggttgcataaataaacaaatggattttgttaacatttgttgagtacctgcagcgtggtaggcattggacagcaggtactgcctcgtatttgtgtggtctataaaccatttgagttaattggattctggtatatcagagagcaaactacatgccttcaaacataacaaacggagacaaagttacagctactcctctagctaaagacactacccctgctctctgagtgcatcataaggatcctactgatgtttatttcatatctttgatatacaggcacacaccgtccacacttcaggcaatcatttacacactgagtgggagtgtgataagggcatgtggagtaggagaagttttctgatccgaactttactgactgcgctagaaaaccctgatgatatcctttccagtgtttctaagaacaattcttccatttctaagcatgattcttccatttctaagcagcatgttgtctgtttacttatgattattttttacttgttatctgtaaatgttggggtgatcagacccaacaccaggtcgtgggggcaacgaagtcctgctgagtcaaaggaatgagaaaaagacagtttgagagagaaagtcggaccagggggccatcctgagtgtggagcctgtgaaggcccagagctttgggagcccacactatttagtggtgctcaaacaaagaaacaggtggtgaggatgtgggggttgaaaggaaacagtgtatcaagtgaatgaaaaacatatggcggcttgagataatgggagtgctagaagcaaggagccaagcaagtctagcagacatgcaagccctgcctcagcttctctccggacactcagctttttctcccaacagtaaataaggttcttttttatttaaaaataagtaacaatttattttcttttcagaaatttggctcagttgacagggttgagtttctgcagtgattgctgaattattaattaattaatattattatttgagacagagtcactctgtcacctaggctggagtgcagtggtgtgatctcagctcactgcaacatctgcctccccagttcaagtgattctcctgcctcagcctcccaagtagctgggattacagatgtgtgtcaccatgcccagctaatttttgtatttttagtagagacaggggtttcaccatgttggccaggctggtctcgaacttctgacctcaggtgatccacccactgtggcctcccaaagtgctgggattacccacatgagccaccatgcctggcccagcttcttatctggtctttttgtctccctgctgttgccaccttctacccccttcaaatccacactctacagcttctagggattatttttttgaaaacgcaaatctaaccatgtatatcagacacatcttccctacctctgtagattctctcagcttgatcaatttcacagacccttggattattgttctatgcaagcccctgcaattccacttgaggccgaccaaccatactcttggcttctcccctacttctgggtaaagaagtcagggttaaatcctctggggcaactttgacgagcaggagaaaggagtcccttccatggacttgtccggggcatggttttcccacataccctgtccagggacatcttgtgtggccaagcagtgtactttttagcttttgagtaaagctaaaatgggctttgcctctttatggcttgtcataaagcagtaagcagttgcatttgttttcaattcttccttcacttcactgctctgaggctttacttcccaataaaattttagcaccttaatcctacccttaagctctgttttctagggaacttgggctaagatatgaagttattttctgcttgaaaagctttccttggctctttattgcttccagaagtgtttatggggatggggacagccgtttggagattagtaggatttcttttctagtaggtatgggtgtgtctgagcatagtattttatttaattactttgctttttttcctttatattaaagatattgtattattaaaaattaggagtgcagataggttacgtgatccatgattttcacttcaggatagtaaagggcaagctacagaatctttcaatagaaaggggacattggtagagacagggtttcaccatgttggccaggctggtctcaaactcctgatctcaggtgattcacctgccttggcctcccaaagtgctgggattacaggcatgaaccacatccaccatgcccagccttgtctctgctaaaaatacaaaaattagctgggtgtggttgtaggcatctgtaatcccagctacttgggaggccgaggcaggagaatctcttgaacctgggaggcagaggttgcagtgagctgagattgtgccactgcactccagcctgggtgacaagagcgaaactcggtctcaaaaaaaaaaaaaaaaaaaaaatggagacattgggtgtaacaggattgagtgagacttctgattacagggtctggtccgaatcgctcaatttgacatacctggtctccctggtctactgttgccccctctgcagccttgtatcctactgcattcttcttccagccctcaaggtccaagacagaagcatctgccctctgggtagcaggatgaatgaacagatgaagggtgtcaagggctcacacagattatctgttaagaaggttcttggaaattccgcatgactctctccttacttttctgtgggcagaaagcccatgtgactccacatggcctcatgtgactaagctttatgggaggctgtgaaatatgcactttattttgggcaactacatgtccaattaaaatttttattattatggaaggaggacaaaatgaaaattggagatgttgaaaagtctctgccaatgttcctttgcacaagaaaaaaaatcgagttgcctctctttttctttttgacttatttattacttatgttgcaaatatgttacagatttagatgtttcaatcttttaacttcatttgaagatttctctcattatacaaagtttaacaattatgcaactctgtggtccccaacctttttattcctaccaggaaccagttttgtggaagacagtttttccatggactggtggtgatggttggtggggtatggatggtttcagaataaaactgttccacctcagatcatcagatattaggttctcatgaggagcacacaacctagatccctcgcatgcacagttcacaatagggttcacactctcatgagaatctaatgtggctgcttatctgacatcaggcagtaatgctccattgcctcacctcttgctgtgagacccagttcctgataggccacagacccgcagtctgggggttggggaccctgatgtagctaaattaggcattctttcctttttttcttcattgtttctggatgtttgtgttttgcttaaataggcctttcctgtccatatgttcttacatttttttctggtaattttatacttttgtcttttgacttgaagtctttatcatatctggcatttttttttttggatggtatagtgtgaggtagggatgcatctttatttttttcaatttttacctaattgctacaacttatttattaaactaggcttcatttctcattcctttgaaatgccatgtttatggtaagttaaattccaatacatatgagtctgttatggactccctgttctggttccattgagcaattactcaactcatatcacaatttttattactataattttctagaaattattttttttaactttaggtataggatctcactatgttgcccagacttgtcttgaactcctaggctcaatcttcctgcctcagcctctgagtagctgggagtacaggcatgagccaacacgcctgccttgtagaaattctttattctcccttccttttcttctcctcttcctccctacttttgtctttcctacttccgtttaacctagccaagctaatacagtaccccc

SEQ ID NO: 95479 - DNA, 13521 bp, Homo sapiens
gggaggaagaggagaagaaaaggaagggagaataaagaatttctacaaggcaggcgtgttggctcatgcctgtactcccagctactcagaggctgaggcaggaagattgagcctaggagttcaagacaagtctgggcaacatagtgagatcctatacctaaagttaaaaaaaataatttctagaaaattatagtaataaaaattgtgatatgagttgagtaattgctcaatggaaccagaacagggagtccataacagactcatatgtattggaatttaacttaccataaacatggcatttcaaaggaatgagaaatgaagcctagtttaataaataagttgtagcaattaggtaaaaattgaaaaaaataaagatgcatccctacctcacactataccatccaaaaaaaaaaatgccagatatgataaagacttcaagtcaaaagacaaaagtataaaattaccagaaaaaaatgtaagaacatatggacaggaaaggcctatttaagcaaaacacaaacatccagaaacaatgaagaaaaaaaggaaagaatgcctaatttagctacatcagggtccccaacccccagactgcgggtctgtggcctatcaggaactgggtctcacagcaagaggtgaggcaatggagcattactgcctgatgtcagataagcagccacattagattctcatgagagtgtgaaccctattgtgaactgtgcatgcgagggatctaggttgtgtgctcctcatgagaacctaatatctgatgatctgaggtggaacagttttattctgaaaccatccataccccaccaaccatcaccaccagtccatggaaaaactgtcttccacaaaactggttcctggtaggaataaaaaggttggggaccacagagttgcataattgttaaactttgtataatgagagaaatcttcaaatgaagttaaaagattgaaacatctaaatctgtaacatatttgcaacataagtaataaataagtcaaaaagaaaaagagaggcaactcgattttttttcttgtgcaaaggaacattggcagagacttttcaacatctccaattttcattttgtcctccttccataataataaaaattttaattggacatgtagttgcccaaaataaagtgcatatttcacagcctcccataaagcttagtcacatgaggccatgtggagtcacatgggctttctgcccacagaaaagtaaggagagagtcatgcggaatttccaagaaccttcttaacagataatctgtgtgagcccttgacacccttcatctgttcattcatcctgctacccagagggcagatgcttctgtcttggaccttgagggctggaagaagaatgcagtaggatacaaggctgcagagggggcaacagtagaccagggagaccaggtatgtcaaattgagcgattcggaccagaccctgtaatcagaagtctcactcaatcctgttacacccaatgtctccattttttttttttttttttttttgagaccgagtttcgctcttgtcacccaggctggagtgcagtggcacaatctcagctcactgcaacctctgcctcccaggttcaagagattctcctgcctcggcctcccaagtagctgggattacagatgcctacaaccacacccagctaatttttgtatttttagcagagacaaggctgggcatggtggatgtggttcatgcctgtaatcccagcactttgggaggccaaggcaggtgaatcacctgagatcaggagtttgagaccagcctggccaacatggtgaaaccctgtctctaccaatgtcccctttctattgaaagattctgtagcttgccctttactatcctgaagtgaaaatcatggatcacgtaacctatctgcactcctaatttttaataatacaatatctttaatataaaggaaaaaaagcaaagtaattaaataaaatactatgctcagacacacccatacctactagaaaagaaatcctactaatctccaaacggctgtccccatccccataaacacttctggaagcaataaagagccaaggaaagcttttcaagcagaaaataacttcatatcttagcccaagttccctagaaaacagagcttaagggtaggattaaggtgctaaaattttattgggaagtaaagcctcagagcagtgaagtgaaggaagaattgaaaacaaatgcaactgcttactgctttatgacaagccataaagaggcaaagcccattttagctttactcaaaagctaaaaagtacactgcttggccacacaagatgtccctggacagggtatgtgggaaaaccrtgccccggacaagtccatggaagggactcctttctcctgctcgtcaaagttgccccagaggatttaaccctgacttctttacccagaagtaggggagaagccaagagtatggttggtcggcctcaagtggaattgcaggggcttgcatagaacaataatccaagggtctgtgaaattgatcaagctgagagaatctacagaggtagggaagatgtgtctgatatacatggttagatttgcgttttcaaaaaaataatccctagaagctgtagagtgtggatttgaagggggtagaaggtggcaacagcagggagacaaaaagaccagataagaagctgggccaggcatggtggctcatgtgggtaatcccagcactttgggaggccacagtgggtggatcacctgaggtcagaagttcgagaccagcctggccaacatggtgaaacccctgtctctactaaaaatacaaaaattagctgggcatggtgacacacatctgtaatcccagctacttgggaggctgaggcaggagaatcacttgaactggggaggcagatgttgcagtgagctgagatcacaccactgcactccagcctaggtgacagagtgactctgtctcaaataataatattaattaattaataattcagcaatcactgcagaaactcaaccctgtcaactgagccaaatttctgaaaagaaaataaattgttacttatttttaaataaaaaagaaccttatttactgttgggagaaaaagctgagtgtccggagagaagctgaggcagggcttgcatgtctgctagacttgcttggctccttgcttctagcactcccattatctcaagccgccatatgtttttcattcacttgatacactgtttcctttcaacccccacatcctcaccacctgtttctttgtttgagcaccactaaatagtgtgggctcccaaagctctgggccttcacaggctccacactcaggatggccccctggtccgactttctctctcaaactgtctttttctcattcctttgactcagcaggacttcgttgcccccacgacctggtgttgggtctgatcaccccaacatttacagataacaagtaaaaaataatcataagtaaacagacaacatgctgcttagaaatggaagaatcatgcttagaaatggaagaattgttcttagaaacactggaaaggatatcatcagggttttctagcgcagtcagtaaagttcggatcagaaaacttctcctactccacatgcccttatcacactcccactcagtgtgtaaatgattgcctgaagtgtggacggtgtgtgcctgtatatcaaagatatgaaataaacatcagtaggatccttatgatgcactcagagagcaggggtagtgtctttagctagaggagtagctgtaactttgtctccgtttgttatgtttgaaggcatgtagtttgctctctgatataccagaatccaattaactcaaatggtttatagaccacacaaatacgaggcagtacctgctgtccaatgcctaccacgctgcaggtactcaacaaatgttaacaaaatccatttgtttatttatgcaaccaacatttattgaatgccaaatatgtgccaaacactgttctagacattggagatagagcaaacacatttttaaaatttctcttttttgtattataaaagtattaaagattgtgcacaaaatgaagcaatacagggatatattaaaaaaaaaaaaaacttaatcagccccgtccataccccacatcttccaaacctacccctctgaggtaaccaattacttttgtttttgttttttgagacaggctctggctgtactgcccaggctaaagtggagtggcatgaacatggctcactgcagccttgatcgcctgggttcaagtgatcctcccacttcaacctcctgagtaagctggggctataggcacatgccatcacactcacctagttttttaatttttgtagagactgggtctatgttgcccaggctggacttgaactcctggcctcaagagttcctcttgcctccgcctctcaaagtgctgggattacaagcataaaccatcatgcctggcccaatgtatttttttctaatatttttaattgacaaaaattatataatttattgtgtacaatatattgttttgaaatatgtatacactgtggggtagctaaattgagcttattaacgtattacttcacatacctattttttttgaggtaagaacacttaaaatctaatcttttagcaattttcaagaacacaatgcattgatattaactgtattcaccataccgtacaatagatctcctgaatttattcctcctaactgaaattttgtatcctttgaccaacatctccccaacgcccaattctcagcctgataaccactattccactctctgcttctatgagttcaacttctttagaattcacgtacaaacgagattatgcagtatttgtctctctgtatctgacttatttcacttaatataatgtcctctggattcatccagggtgtcacaaatggcaggatttccttccttcttgaagctggatagtattcatatatagcatttacattttattaggtattataagtaatccagagatgatttaaagtatatgggagggggctgggcatgatgtctcacacctgtaatcactgcattttgggaggccgagacgggaggatcacttgggactaggagttcaagaccagcctggccaacatggtgaagccccgtctttatataaaaaaataaaagtatatgggaggatgtgtgtaggttatatgcaaatactgttatcattttatatcagggacttgagcatcagcagatttgggtatccgcagggtgttctggaattaatcccctacagatcccaaaagataactgtgcttggtcacttgtttgtctttttttgacaaatgtctattcaaatcctttgaccattttttaattgcattatttgttttcttacaattgagttgtttcagttccttattattttagatattaatcccttatcagatgtatggtttgcaaatattttctcccattctgtaggttgtctcttaactgtgtagattatttccttggctgtgcagaagctttttagtttgatacaatcccatttgtctattattacttttgttgcctgtgcttttgggtttatatttaaaaattcaggcctgggtaccgtggctcatgcctctaatcctaacacttcaggaggccaaggcaggaggatctcttgaggccaggagtttgagaccatcctgggcaacatagcaaggcctcgtctttaaaaaaaattagctgggtatagtggtgcgtgcctgtattccttattacttgggaaactaaggcaggaggatcccttgagcccaggagtatgaggctgcagtacagctatgctcctgccactgcactccagcctgggcaacagagcaagaccctgtctctgaaaataaataaataaataaatttttaaaaatctttaaatagattttatgattccaagtcattaaagaacatgagatgtctttccatttgttcagataacatttataattttaattgagcttttataactttaaataggtcttatatcttattaattttactgtcaaggtgaaactattctgatttctgaaatttgctttaaagtagtactacagtaggtaaggtggagaggcaggatgaaacaagaagggcagaatattgacgattgttgaagctggttatgggtactattctctgggtttttgtggatggtttggtattttgaaattatactccctgctctgtcgcctgccaccgctccctgagcccgagtggttcaccgcaccatgaagacagatggcagatgccaggaactcgagcctccaatcccagatgctatgtccagcaaaggctcagtggttctggcctacagtggcagcccggacacctcttgcatcctcgtgtggctgaaggaacaaggctatgacatcattgcctacctggccaacactggccagaaggaagacttcgaggaagcctggaagaaggcactgaagcttgggaccaaaaaggtgttcattgaggatgccagcagggagtttgtggaggagttcatctggccggccatccagtccagcgcactgtatgagaaccgctacctcctgggcacctctctggccaggcccggcatcgccggcaaacaagtggaaatcgccaagcaggaggaggccaagtatgtgttccacggcaccacgggaaaaggaaatgatcaggtccggtttgagctcacctgctatttgctggccccccagataaaggtcaccgctccctggaggatgcccgagttctacaaccggttcaagggctgcaatgacctgatgaaataggcaaagcaacatcgggttcccattccagtcactccccagagcccgtgaagcatagacgagaacctcatgcacatcagctatgaggctggaatcctggaaccccaagaaccaagtgcctccaggtctctacatgaagacccaggacccagccaaagccctcaacacccctgacattctcgagatcaagttcaaaaaaggggtccccgtgaaggtgaccaacgtcaaggatggcaccacccaccagacctccttggagcttttcgtgtacctgaatgaagttgcaggcaagcacggcgtgggccgtattgacatcgtggagaaccgcttcattggaatgaagtcctgaggtatctgckaggccccagcaggsaccatccttcaccacactcatttagacatcaaggccttcaccatgtaccgagaagtgcgcaaaatcaaacaaggcctgrgcttgaaatttgctgagctggtgtataccggtttctggcatagccctgagtgtgaatttgtccgccactgtaatgccaagtcccaggaatgagtggaagggaaagtgcaggtgtctgtcctcaagggccaggtgtatatcctcggtcgggagtccccactgtctctctacaacgaggagctggtgagcatgaacgtgcagggggattatgagccgattgatgccacgggttcatcaacgtcgattccctcaggctgaaggaatgtcatctccagagcaaggtcactgccaaacagacccctgtacaatgaggagctggggcttccccaatttgcagattttttcccccaagtacaggtgctaattgtgataatttgtcattgtgacttgttttctccagctggcagcatagtgggtctgccaggccccagctttgttccctggtcgccctgaaccctgcaaacgtcgtcatcgaagggaagggtgggggcagctgcggtggggagctataaaatgacaattaaaagatttttttaaattacactcctaagtattttaagcttgtataaaactgtagaaaataaaatagttttctaatttcctttcaaagtacttactgctaatacggagagaagttggtgctttttgtatatttatcttgcatctgcccacttttccaaaatgacctacaattcaaatagtttattactaaagtccctcgagttttctaggcaaacaatgaagtcacatagacaaacataaatagttttatttcgtcttcttcaaagtttatggcaattattttcttaccttactttgacaatgtaacataataatagcacatggacatccttttctaatttctgatttcaatgaaatgatttcagagttttgctatttagaacaatgtttgctattgggtttagagatacagtccttatcctagataagtagtttccttgtattgttacttagacttgtttttaatagaaaagtcatcacaccctattggcttagaatttttattaggaatggctattaaattttataaaatgttcctccagtgtatattgacaggatcatatggtttttcctttatagtattatcataattcattactaacggtaatagatgtcttgatagtgaaccagcctgtacacctgaaatatatagaatagggcataattaaaatactctatagcagtatattattattatataacttgatttttattaatactttatttagaatttttgcatctgtattaataagtgtaaggttacataaataacctaagtgttttttctactctctactcccgcagagtcactcaacatttgtgacaccggatgtgtgggtttttccccacacaccaagacagttctgcagatgattctccagtggacaccagctagatggctgccaattcaatttaactctgacactatccacctggagattgcatcccacaggtgagggctcagtcccacaagactgcccccaccactgcagatgctggttgcaagcacagattgtggcctgtgcttctgaccaaccagctctaagtcacggtttccacaactccctcctgggattcaattaatttgctaaagcagcttacagaactcagggaaacacttacttacattgacccatttattataaaggatacagatgaacagccagctggaagagatgcataccacaaggcatgtgggaagggaagcagagattccatgcccttctggggtgccaccctccaggaaactccatatgttcagctatccagaagctcttctgaaccctgtcttttcgtttttatgaaggcttcatacctgattacatcactacccattggtgatcaactcaactttcagcccctcttctctccctagaggctggagggtggggctggaagttggagccctctaatcatgccttggcctttccagtgaccagccctcatcctgaagatctctaggggctcccagccaccagtcacctcattggcatataaaagatattcttactactccagagatgccaagggagctttttgctagtatcacaataagtaatctcaagagaacagggacttaacctgttttgttccctgctatattccctgcccctagaacagtaacagacattcttagtaggtgctcaataaacatttgctgaatgcatgtgcaagtgaaattagtctatgatacccttttctttgcatcctctgtacctgattgaactatgaaagctgtgctggctttattaaaggagctttccatcctgttttatgggttgttgttgttgttgttgttgttttgtttgtttgtttgttttttcagatggagtctcgctctgtcgcccaggctggagtgcaatggtgtgatcttggctcactgaaacctccgcctcccaggttcaagggattctcttgccttagcctcccaaggagctgggattacaggtgcacagccaccatgccctgctaatttttgtatttttagtagagacagggtttcaccatgttggccaggctggttaggaagtcctgacctcaagtgatccacccacctcagcctcccaaagtgctgggattacaggtgtgaaccaccgcccggcctgttttatggtcttgagtcatttaaatccttgcagtgcaaagagcatggaccagtaacatcagcatcaccgtctgacagcttttaagaaatacagaatttcaggttccacctcagacctattgaatcacagtgtgcagtttaacaagatttccaggtgattcctattgatgtttgatatgtactggtttaaataacactgtattacctgctttttaaaaaatagtcaggtcacattgagctgggaaatcacctggcaccagctcttttttaaggatagagctataatcatttctccaacctcttatggtaatgagtctgttcaagttttcagcttctctttatgtcacttttattcatttatattttgctaggaaatcctcaatatttccaaatagttaagagttcaagttaacactctctctctctcttttttttttttttttttgagacagttttgttgcccaggctggagtgcagtggtgtgatcacagctcactgcagccttgacctgctgggctcaagcaatcctcccacctcagcctcccaagtagctgggactacaggtgtatgccatctaaacccagctaatttttaaattttttatagagatgggggttctccctatgttgcccaggatggtctcaaactcctgggctgaagcaatctgcccacctcagcctcaccaagtgttgggattacagatgtgagccactatgcccaaccaacattctctttaaatcatttttaaccttttctatttctgtggttatgcgtggggaaaagaaagagagatcagattgttactgtgtctatgtagaaaaggaagacataagaaactccattttgatctgtacgaagaaaaattgttttgctttgagatgccgttaacctgtaactttagccccaaccctgtgctcacagaaacatgtgctgtattgaatcaaactttaacggatttagggctgtgcgggatgtttcttgttaacaatatgtttgcaggcagtatgcttggtaaaattcatcaccattctccattctcgattaaccagggacacaatgcactgcggaaagccgcagggacctctgcccaagaaagcctgggtattgtccaaggtttcccccaaccgagacagcctgagatatggccttgtgggaaagaccttaccatcccccagcccgacatccctgaagggtctgtgctgaggaggagtagtgaaagagggaggcctctttgcagttgggataagaggaaggcttctgtctcctgcgcatacctgggaatggaatgtctcggtttaaagccgaccattcccattcgttctattctgagataggagaaaaccaccctgtggctggaggcgagatatgctggcagcaatactgctctgttactctttgctacactgagatgtttgtgtaaagtgaaacataaatgtggcctatgtgcacatccaggcacagtacctttccatgaaattattcatgatacagattcctttgcttacatgtttccctgctgaccttcacctgttgccctgctacacttgccttgctaagacagtaaaaataatgatcaataaatactgagggaactcagagaccagtgccggtgcaggtcctcgcatgctgagcgtgccggtcccctgggcccactgttctttctctatgctttgtctctgtgtcctatttcttttcacagtctctcgtcccacctgacgagaaatacccacacgtgtggaggggcaggcccccttcagttatgtctctttcttactcaaaatatcatataattgtgctttcttttttctttaacctggttagtgatgagtttatttactttattgctcttttcaaaaaaaccaacttctgaatttaaataactttttttttttttttatgagacagagtcttgctctgcccaagctggagtgcagtggcgcaatctcagctcactgcaacctccgcctcctgggttcaagcgattctcctgcctcggcctctcgagtagctgggattacaggcgcgtgccaccacgcccagctaatttttgtatttttagtacagacgaggtttcaccatgttggtcaggctagtctggaattcctgacctcgtgatccgcccgcgttggcctcccaaagtgctagaattaccagcatgagccactgcgcccagcctatatgaccttttggtacatagtttttgctttctattttgttaattttggccttaattttgtaacttcccttttcctaatttctcttggttaaatttctctttattttttacatattttttctaagttcttaagatgagtttatcttcagtctcttgtctgtacaatgaaagctatttaaatcaatctactttattctgaaaatagcttttgctatatcctacagattcttgtataaaatgttagactttacattactaagcgtgcaagttcagcattgatttctgtaataatccaaaagttatctggcagtataattcttcacatccaaatggtcaagatttttagatactttttaaattattaatttataattttaattatgttcaaatactgtggcctgtattagtccattctcacactgctaataaagaactacctgatggtcgggagcagtggttcatgcctgtaatcccagcactttgggaggccgaggtgggcagatcacctgaggtcaggagttcgagaccagcctggtcaacatgggtgaaaccctgtctctactaaaaatacaaaaaataaataaataaataaaattagccagcctggtggcatgcccctgtaatcccagctactcgggaggctgaggcaggagaatcgcttgaatctgggaggcagaggttgcagtgagctgagattgtgccattgcactacagcctgggcaacaagaacgaaaactccatctccaaaaaaaaaaaaaaaaaagaactacatgagaccgggtaatttataaagagaagaggcttcacttgctcccagttctgcaggctgtaaaggaaacatgatgctggcacctgttcagcttcttgggaggcctcaggaaactttcaatcatgtcagaaggtaaaggggacacaggcacgccttacacagctggagcaggagcagggtgggaggtgttacacacttttaaacaaccagatctcatggtaactctatcagcagaacagcactagaggaatggtgctaaaccattcgtgagaaactgcccccatgtccaaccacctcccaccaggccctactgccaacactggggattacaattcaacatgagatttgggtggggacacagatccaagccatatcatggcctgtggtatacctcttctattttttaatgtatcaagaattgcttaggccaggtgtggtggctcaaacctgtaatcccaacactttgggaggctggtggggtggggaaggatcagaatcactttagggtaggagtttgagaccagcttgggtaacatagtgagacctcatctcgacaaaaaatttaaaaattgaaattagctggacatggtgccatgcacctatagtcctagctactcaggaggctgaggcgggagaattgcttgggtccaggagtttgaagttacagtgagctatgatcgtgacactgcactccagcttgggtgacagagggagaccctat

SEQ ID NO: 95480 - DNA, 25373 bp, Homo sapiens
tcctattgagtctgtctctttggcaaatgctgactaatatagttgggctgaaaactagcatgaccaatcatagcaggcctgcaacattgtctcaccgtatgttttgagacattttcactgctgctgctccctataaatgaacagagtccatggaaacttcaatgaggcattcttttccgatcgtgtgtattcacagaggaactaatggcatttgttccttgtgttttctgaaccttgatgttgtcatgtgatttcgttttccattttgacagtgctgtacttgtggctggatgatctcaccccagcttttcttcttccacgggatggtgatgatggtgtatgttttaaagagttctctcagatttctctctctctctctcgttaaaacttcttttcatagccccaaataaaaatgctcattgcatctttccttctgcctgccccattttggaatgagaacataaagcctttgggtcccctaaatgtaacttacgcattttatgttccaagctttattgaagcatctgaagatggagcattcagccagtcgggagtgtcttgagatcctgagcagccaagaaatcctagggccttctcttgtatcttttccatggtgagtaaccttgtattcagtggagaagagagaaggagacacatcaattatacagaactattctttggaacgcctaagtgtccatttatctttctcccttgggtgggggaaaccacttagtcatcactaataatgttaaataatacaaaatgacaacatgctggtacttttgaatactgacagagacctggaatgtaactttggcacaattttaaagccacaggtcttccagtttatgtcttattggaacaaatcacttcccctcagactcccacaaagcctcaaagatgatgacaaaagacaatgtcatttccttcttgtatggagagaagaaataaagtcagagagccccaagtttcccgaatggaagactagtcaatattatatgagaagagcaaaatccgtctccttaactgggcccctcattcgccatttatggggttctcagggctttggtatcagctgtggtcacagtgtttgatagtaagagagacatacctattcattttgggagagaagatatctcgtggtatttctgatatagcgccttgaattcttgaaggaaaaaaattggtttatgtcaatgccagggcattggtgctattactgaagttctaaatcccagggatgacttagaaaagatttaaagaccaaagtcggtaagtggaggttttttaaaacaccacagatggtttcccctcccctggcctttttaagggtcattcctaaatgaagcaaaccaaccgcatactgactgaatcttatacccttcatccctgtacattcagcctttcttaatgaattaaggggtgagggaagacgctactagattatttttctgaaactgacacataattgttatgttatgaaactgacacataatggctttgctaccaagctgttttagctgtttgtttgatggtttgtgcctgttagctttgtttgctttggatggtttttcttttaacgattgttacatttcatgtgatctgactctagctgttcagggatttttctgagactctctctaggctgaacaccgacaaactctgtgtgtgtctgggagtataacatgagtgcccacgtgcctgccagtctatctcagatgccctgcggtcatagtggggtttgcgatcaacaagcctcttcagaatgccctggttttccatggtgattctcactagctcgcggttccttgtttctctgtttaagctgaaaaacacaaaaccccgaaatgggtgaagaaggaaatgctcatcttgacgagtgggggagatgaagtcatgagatcataaatgccagactgtctaagtgcagggagtaaactgtcctgctgagcccacaggcccctgggacagcctgttggtctgcactgcactccgggaaacatgcaccgcattcgcaggtttatatcagtggtcctcaaccctgttgcccatgagaagattctacttcattgatctgaggtgaaccgtgcacactggcattttcttaaaattccccaaggattataatgtaaaaccaggattgagaacttctggttgggggaaggtctccctgtgaataaatcacaaacggctggcgacaagttttgggtcacctcactcctctcagctttcaacttataccagaatataccaggatatagaatggcatcttgaccatctcctcgcccccagcaaattctttctcttgcatgagcttcttttgtatccctaatcacactgcattgtcattatttccataaatatctcccctacaagaccttgagttctttgaggtaaggaaatatacatctcatttcatctttattattcctggtacctagcacatagtagttgctcaggaaagatttctggaactgattttaagaatgtcacatcatagccccagccatggtgctatggaacagatgcctgtgtcccccaaaattcttatgttcaaatcctaaccatgaaggtgatggtattagggggtgggcctttgagagctgattaggtcaccctaatggaattagtgtccttatgaaagaagcctctttctccttctgcccygtgaggttacagtgaaaagatggttgtctatgaagcaggccctcctcagatgccgaatttactggcaccttgatctttggacttccttgcctctagaactatgagaaatttttgttgtttataagccaccagtttatagcaatttgctatagcgccctataatggactaagacacatggccaccattttataaaagtgcgcagtgcattcttgtgacacactgaataggactctgaaaagtctcttcgatgaaataaaagctctttaatgctagagaaaggtccccatttttaaagttttcattctgtgtaacatggtctgtttggttctccctcaagataacttcccttaagtacttctctgacttgggaaaacctcacactaaaacccaagaggaaagtcaattttgacttttcaaaactgaaatgaagacaaagaacattacctcttggaaaaatattcattccagcaatccaccttggcagggccgcgatgggcatttgcgattttctgacacagttgcttgttttcatactcgattttgttgattttcttttgttcaccctggtaagaaaccacacctcaccatggtgacaccatcagtgcactgccccaacacacaatgacttagtgttcccctcctctgagatcgtgggaaaggggtgcattgagggccacagtggagactggaagcagaacttaaaagactgggcggccgggcacggtggctcacgcctgtaatcccagcactttgggaggccgaggcaggcgggaggtaatgagactaagaccatcctggccaacatggtgaacccctgtctctactaaaaatatgaaaaattagctgggcatggtgccacatgcctgtaatcccagctactctggaggctgaggcgggagaattgcttgaatctgggaggcggaggttgcagtgagccgagattgtgcactccagcctaggcaacagagcgagactccgtatcaggggggaaaaaaacgactgggggtgacgcgtggggaggaggagtattaacaaatctttgagtagatgggtatttagaaggctctgggaaattgaacctctttaggaaacagactggaagtcaataaaatacatctgcacatctgcaagcagcaagaacaaatacctgtagtttgctcaattttaaaatgtgatttgtgtgcgccactggaggtttggtatcaacagtaggcttcgctagagaagggggataaaagggaacaatgttacatcacaggaattccagtagcggcctcagaaaaccagcactagacaatgtccttgactaatgaacaatttcgaattaggaccttaatgcgactcaagaagtttggtttgatttatcaaatgaacatctctggagagttttgagcagaaacaaaagaatagtgaaaataaaatttacagagataaatgtccttctaatccaatgaaagagcttctcttccaatctttttccaatattattagcctgtctattggcttctgaagtcttatcccctttctaacgtacttcggctttaaggagtttaaaggagtatttccatccagtgaactccctggtggaagatacattttgttattggtgctaatgccctcttccccaaactcagcagataaggccatatcatcccaaagctgtgacctggtctggtttmctgttgatctctttatggggtaccattccaaaatccctaatagcagtgtccagcccaaactgcccacatacctatttgtattctattcttgtgagatacgtagtggccaaagtccagtttctttctgaaggttgtgctttgcctgtgattagagacrataacagggtaggccagataatccagggaattgttcatcttctcttcctagtctcacttcagaaatgaggtacccagactcctctgtgaggtgcctagctgtccccatgacaagctgtcatagttacccagttatgacatcagggacaggtcccgggaagggagtaggagcagcagagcatggctggctgcctctgggcttgtgtttttaatgctaacctcggctcaagtcaagatgaaggtcaaggaactcgaaagctttccccgctgcttagaatgcagatgctgccagccaacaccagaaggaaagaagtggtgcaccgggaggggtgggcaggcacggggtggggtgagggatacagaaattccagccttggttacacatcttgggctatcagctaagtagtctccactgcaatagctcccctgaaggtgcaagaccacaagttttggaggaggagaaagttgaccctaatgataatcggatccaattccttttgcaaatgaggaaactgaagaccacagcagcagcaacgttactcaagaaccaagttggtggcagggctgggctcaggatgtggggttcctgaattcaaggccaaatttgcccttttgcaggaaggaaactgccagtttttcatggcagtaggggagggcagctttcctccagtacagagactatcttttgtacttagtgggagttcaggaaatgctgagtggcttatggtgggctggcatctgctccaggaagggctgcaggagtctgatttatctccaccccagcacagggtatagcacccactgggtgctcaacgcatttgttgatgaaggactaacacctattgagtgctcgccatgcagtgctgggtgccttctttgaatgtcacatttaacccttccagcaaccctagaattaggtaccattactatcccgctttttttttttttccctgcaaacaggctcaggttaagtaattcctcagaattccaaacctgactgcttttaagcacgacgatgactctcaatgaatgttgaaagcagatgcgccccagagtagggcttctcagactttgaccgtagggacctcctggggtccgtaaaatgtccactctgatccagcagggctgggctggggcggggattctgtcaagcgcccgggtggtgcctccactgcagggagccgctcacgagccgaacccggcggtccctgtaatcatgaaagactgaagcgacccctaggtgtacctccgccacgaaatgtttattgggccctgcatttaattcagggaaggaagttaccgcgcttgccagtttacaaagatacacaaacggcctggaccgggatggggcgaggacccctgagactccagggcggtggcgtcttccccccgggacgcgcccaggagtggcgcgcggggcccccgcgtcacggcgcccgcgctccgcagctcccggagcccggcgggcccgccccaggggcgggacggggcggctcccggcgcgagcccccgcccagctgatccgccgctctccgcctcgcttgctcctgccgggcgtgcagggccccgccgccgccatgtcgggctcgttcgagctctcggtgcaggatctcaacgacctgctctcggacggcagcggctgctacagcctcccgagccagccctgcaacgaggtcaccccgcggatctacgtgggcaacgcgtgagtccctttcgcgagcccggccccgccgtccctctcgggacgccccgcccacccgaggctggggtcggggtgtcgcgagtcttgggttgggggagcccgggcgcgatggcccctccgggagccacagcgggggcttgggaggggcctggagtcgacgcctacccccgcgcgtggggccaaggaactggaaccctgcctggccgggcgcggcccttccccgtggcggggtgcacggagcccgggtggcgcctgcccgggtcccagccgccacccgcttggggcttggccttgggcggggtcggggctaccatgttcacttaacaggtgaccctcggtcgcccggccggtctcctgcccgcgcgtcatgtgacagctgcctggttctgcagtgaggtcaccgcggaatgtctgccttcgccgccatggcaacgggccgacgtcacaattcgggcatggaattttcccggcccggcagtcccggatcagggaacctaaacaccccaaatgagcgagtccggggagctgggccgggatttccaggcccccaccttccagatgtgatttgatttacaggagattctagaacggtccagtgataacccccctaaggacctgagccaccacctagaaaaggctcttgacctttcacccccaggctctgtcacccaggctggagtgcaatggcgagatctcggctcactgcaacctctgcctcctgggttcaagcaattctcctgcctcagcctcccgagtagctgggattacaggcgcccgccaccacgcctggctactttttgtatttttagtagagacggggtttcaccatattggccaggctggtctcttggccaggctggtctcaaactcctgacctcatgatccgcccacctcggcctccaaaagtgctgggattacaggcgtgagccaccgcacccggacagtaagagattttttttaatttaaattttaaattttttttctagtaagaatgtctaatcagcaggaaagaaccagtgttaacattctgagatgtgaaataggagcctcaagaaagaatatattagcatgcctgtacagccttggaaagcctcaagttggattttcacgatactctgaggacccagttaccaaaatcctaagcttcatggctcagcccaaggatggcatgttgaaaactcaaaactaaccctcctcccattttacagaggaggaaatggtggctcagagtgtgtgagggactacaaggacagggtcaatgtcttgttcatgtatgtatttcctgacctccgctatgacctgctgtttagcctgccaaggactgccacggaaatgggggtcatcatggaactagaaggggtccatcaggccccagcctcatggggacagttctcatccattccatcattcattcaccagtctgagcacctgctttatgtcaggcactgtacaatgttcattcatagtagagatagtaataatgataattgtaaattttttgaatgttgaattattaatagtattagaggcctggcacgatggctcacgcctgtaatcccagcactttgggaggccgaggcgggtgggtcacctgaggtcagcagttcgagaccagcctgaccaacatggtgaaaccctgtctctactaaaaatacaaaaattagctgggcatggtgcctggcgcctgtgatcccagctactccggaggctgaggcaggagaatcgtttgaacacgggaggtggaggttacagtgagccaagatcgtaccgttgcactccaactgggcaacaagagcgaaactccatctcaaaaaaaaaaagtattagagaagggagatgaatgggagtgactcttcaaagtgtttttttctatcagccactgcttcacagtcttgcgcggtgtcctaagcaggaataaacagagtcccacagtgtcagccaaaggcttcaggaattggaaagctctagagacacccttcctcttgcaccaagcagcaagcaggccttgttagcctcaggaatcccgcttgcttgggcaggttggccattcagctgtcatcacttcccaagtggaaaccaaggttgtacacgtctggtgtagccagagtggcaattgctgatggccactgtagaaaatacatcccttgccctstaagcacctctgaccttgacttggccaggggtgtgggggttcctcaacagggaggatcagtgagcaccaagcaccaagaggatttgggctccattcccttaacaaaatcagggccgcagccacgtcctcacaaggcagagccagagcctgtgtgagccacatgtgccaggccttgggggttttgcagcagatgtgggcatgaggggcagagtgaggtggaagatagagcagggctggatgtcgggagaaaggaggtcttctcccagatctgccaccagcagcacacggggcctgtgcccatccctctgctcatcctgttgggcctgagttcaagctctgttaagcagggatattgccatccttgttcctcacagggctgctcgcagtgggcaagcaagatcacacaggaggtggcattttataaagtataaactgctatttggactgggatgttttgtgagatgaaataaaggggccttttcaccattcagaccaattattatttttattttattttattttatttttcgagacggagtctcactctgtcacccaggctagagtgcaatagcacaatctcagcacactgcaacctccacctcccgggttcaagtgattctcctgtctcagcctctgtaatcccagagtagctgggattacaggcatgtaccaccacacccggctcacttttgtatttttagtagagacggggtttcaccatgttggccaggctggtcccgaactcctgacaggtgatccacctgcctcrgcttcccagagtgctgggattacaggtgtgagccactgcacccgaccttagataaattattttgtaacctcccatagttctgttggggccacttactccccaagtactaaatcacccaaaagagctttggaaacgtagccagtggaatgtggcaggtaggatccctctgggggcagggagggggctgcctggtacgtgacaaatttattcttttgcactcattcaccgcttatttattcagcacctactatgtagcaggtactatagcagatggtggggaaacagacttaaagcagacatggttcctctctcaaggagctcacagtctggatgtctaaacacagaagcacaatcaagcattagaatcatagtgctcactaccgtgtccagctctgtcaatggaatagcccatttaatactcataacaacctcaaggagaaggcactgttatccccattttacagagagggaaactgaggcacagaaaggttaaatggcttgcttaaggttgcctggctagtacctgggcwggatgcagacccagttagtctggttccagagcccatctgtaaccagttggctatgtacacccccaccacagcttagggagcatggggccaaatggaatggaggggagacaaacactgcggagggtgtgaaagatgagagggcgcatttctccagagaaggtgggaaagagcattccagacagaggggacagcatggctatgaaaccaccagtctatttggggaagctgctggcaattcgatatggccagagtgagggaagaggtcataagatgaggcaggagaagctggcaggggccagagcatggagggtttccttgctttgctaagaggcttaaatccttctccatcttcctccccctggggctgccatttggttggttaatcatccccaccactgtctcctgtccaggtctgtggctcaggacatccccaagctgcagaaactaggcatcacccatgtgctgaacgcggctgagggcaggtccttcatgcacgtcaacaccaatgccaacttctacaaggactccggcatcacatacctgggcatcaaggccaacgacacacaggagttcaacctcagcgcttactttgaaagggctgccgacttcattgaccaggctttggctcaaaagaatggtaagggacctcccaccaggaaaagatgggaggcagctytgactggactgtccctctggaaaacaggcccacaacaggtctcttcttrgaaactcccttgtttcccatcttctggggtgaacgacagagctgtaggtctctctctgctcacctggctggctgtcaagtggccccrtgtgtcacaggatgtgcaactcattcacaccatggcagccccagggtcctcgcgtttgactgcactttggctggaggttggtttccagttgcttacacgtcccccattcaaacagctgtaacgatgaggaagatgtgttaatgtgttaatgtgcatggcaagaagtcctgaggtgaaggagcatgggggctggttgattaaggggctgcttgattcagcagctccatggtggcctctggaccaggccctttccctttctctcttctgccacctcagtgttgggtgctcccgtcatggtcccaagatgggatccagtcaccacatccaagcaggacaaagtacagcagatgaggccctgcagccatctcttcccactcttttttttcctcttctctctctccttttttttttttttttttttttttagatggagtttcactcttgttgcccaggctgaagagcaatggcgcgatcttggctcaccgcaacctccacctcccaggttcaagcgattctcctgcctcagcctcccgcctcagcctcccaagtagctgggattacaggcatgcgcccccacgcctggctaattttgtatttttagtagagatggggtttcaccatgttggtcaggctggtctccaactcctgacctcaggtgatccgcctccctctgcctcccaaagtgctgggattacaggcatgagccaccgcgcctggccactctctctctcttttttaaagagacagggtcttgctatgttgtctagactggtctccaactcctgggctcaagcagtcctctcacctcagcctcctgagtagctgggactacaagcacgtgccaccatgcccagtctctctctttaagaacaagtaaaacatttcccagaaatacccctcacatctcattggctagagattcacgtgattgcctggcaaggagaaaaggggtagctgcggtcagcttaggttggcagtcagcaaaccacagcccccctggccaaatcttccagccacttacgaaacacttcctgcagcccccaaatataagataagactgaaggagaactaccaaggcgctggcagtcaccaaggcattccagcaagaaaccctagaaggccacaaagcagacatcagctgagcaggctgggccacttgccctttctccctttctgcttttagctgtttctctcagctcctccctttacctcttcstctctccccaccccaaaccctcccagcggaggggacccccatgaggtgtgaacagccttggctgtactacactgatgactcttgggcccagcaggctcactgtctgaatgatttccagtaaacagaattttctagaccactggacagtgaacgctcagggctcagagagaagctttactgyggagtatctgcagactttgctgacaggcccctcatggtccttcctggtcactgtcaccccccaaccctgctcacctcctccactccagctgtactgagttcctcaccctgtgtaaacataggctgggcgaaggggaaggattttgttgttctcgtataatagcaattggttattcattcagggaatttcaagctctctgactttgtttcctctttccaaacaactaggaacacgccctttttttgacctgtctcagtccaggtgtgctgggtctttagtctgaaaagttctctctgcctctccctaccccttcctctggcaaactccaccttgtccttggcatggtgtcctctcttccatgaagcctgccctcaggctgggtctactttgttccttgtctgtctccttagcacctgatgtagcatcaggcacatagtaggtacactgcaaatgatgaatgagcaagtgatgaagaattccatgggctctaatgccaagtataaatgcttctaagaatgagtggcgaagtgagtcaacagaaacatgctggcctccaacagtgtgtggggcccagggacccatcactgagagctgggtgggatggctgagggtactcaagagggagcagtcacttctagctgggaaaacagcttcatggaggaggtggcatctgggctgagcctagaggaatgggaggttgaactggcccctttcccagtaggctctgtgtgcactgggcatgcagagtatgttctagatggtaaggtggctgctctgcagagggtctcattcctagggtggggcaggggaagccccactctgaatatttcgggcatacaggccggagggtgaatgggcaagaaagtggaggactcctgcttcctgatttggaaggcattgggaaaatagagtggtgttttgggggtagggtgataggagcagaagagactctgttggactctgggctagcagattccttgccaaacaatggccttatagaggtgttagtaggtaataattcactcagctagtcagcaaatatttattgagcacatagtgtatgctagagattgtaacgcatccaaaaatcaatgccccacatttcttgcctttttttttttttttttttgagacggagtctcgctcttgtcacccaggctggagtacagtggctcaatctcagctcactgcaccctccacctcccaggttcaagtgattctcctgcctcagctttctgagtagctgggattacaggcatgtgccaccatgcccagctaattttttgtatttttagtagaaacggggtttcgccatgttggccaggatggtctcgaactcctgacttcaggggatccgcccacctcgacctcccaaagtgttgggattataggtgtgagccaccgtgtccggccatttcttgctcttaaagaattcgtcctctgggagagaaaagtcaatctgcgcatgtctggcaatgacacaggaccagggctgctgtagttgagggtgtactaggtgctaccagaggatgcccagtattgggtaacatttattgagtgcacatggatgccaggtgctaacctagaggattcatgtgtcctctcctttaatctaaccaccttgtgcaatgggtactattggccagataagaaaactgaggcaccttgaggttaggtggatcatgagttaataaccagtgtattggtcaggattctctagaaaaaacagaaccaatagaatatacagtcggtcctccatatccgtgggttccacatctgtggattcaactaacctcagtctgaaaaatattaaaaacaacataaaaagatgttatgtctgtactgaacatgtacagattttttttcttgtcattattctctagatgatataatctaataaatgtttacattgtcttgggtatcataagtcatctggagatgatttaaagtataggggaggatgtgctgtgcagaggttatttgcatatatgatgtcattttataatcagggacttgagcatctgtggatttgggtatcggcaggaggtcctggagccaatctgccctgtggatattgagagatggtgtctatttatatatatatatatacacacacatacacacacacacacacacacacacatatatatacacgcacacacacactatattaaaataaccccatctctactaaaagatacaaaaaaattagctgggcatggtggcatgcgcctgtagtcccagctactcaggaggctgaggcaggagaattgcttgaacccgggaggcggaggctgaagtgagccgagatcgcgccactgcactccagcctgggcaacaagaaggaaactccatctcaaaaaaaaagaaacaaaacactaccagcaccctggaaagcacccccagtctctatgctccaccacccccatccccagctcccagggcctctgccacgcgggcttctttttttttttgagacagagtctcgctctgtcacccaggctggagcacaatctcagcacaatctcacctcaccgcaacctctgcctcctgggttcaagcaattctctggcctcagcctcctgagtagctgggattataggctcgcgccaccacacccagctatttttttgtatctttagtaaagacgggatttcactatgttggccagtctggtctcgaactcctgaccttgtgatccagttgccttggcctcccaaagtgctgggattacaggcgtgagccactgtgcccagccccttgcaggcttctgacagcacagatggttttgcccgctttcctactctgtgggctcatccacctcatatgtgtgtgctgcctccgtgttgcttctgctaagtggcagtctggtcattctttgtatttgtcctttctactgtggatgggcctttgggggtttctaactgtgggccatgatgtgcagtgttgcctgtgaacattctggcccatgttcgtgaatgtgaatgcgtatctctattggacctgggcctgggagtgggattgctgggccagaggggatgcacgtgttcagcttgaggagataccgccgtgccgcacagctttccaaagtggttgtgccaattcacgcctcacctcccccagccacgcagaagagttccagttgccccatatcttcaccagcactttgggttttccatccttttcattttagccattctgacaggcacacagtggcgtgacattgtgcttttaagtggcacttcacggaagagtcttgaccaacgccatggtgtgatgggacgcccccagctcaccacgtctcccctgtttcttacaggccgggtgctcgtccactgccgggaaggttatagccgctccccaacgctagttatcgcctacctcatgatgcggcagaagatggacgtcaagtctgccctgagcatcgtgaggcagaaccgtgagatcggccccaacgatggcttcctggcccagctctgccagctcaatgacagactagccaaggaggggaagttgaaaccctagggcacccccaccrcctctgctcgagaggtccgtgggggaggccgtgggcaaaggtgtcccgagctgccatgtttaggaaacacactgtaccctgctcccagcatcacaaggcacttgtctacaagtgtgtcccaacacagtcctgggccactttccccaccctggggagcacataaagaagcttgccaaggggggcgtccttgctccccagttgtcctgtttctgtaacttatgatgtcttttccctgagatgggggctcagagggggaaggcctgtggcctgcatgcttcccgatggcccacggcaggaggtgtgtggaagtgtaaggcctaagatgctcacagaggtccctcatgacctcmcttccccaactcccgaatcctctcttgagtgtggacctcaacaccttgagccctagtaaaggaactatgcaaatgcaggccactctccccaccacgtctgtgcccygcactgtccccacagccttccacaccctgtgcataggcagccctctcacgtcttgaggtccgaagctggggtgggggtgtccgtcagttattagtggatggagattcccacagcaaggctgcatttgaatgatttccttaggatgaatggtccctacacaaagaggccttgtgggcaaacctggagaaccctcctaaatccatagagttttcaaaatgtgaatctttggaagccttgagttcagaatctgctgctctggaatatttcccttcgatcttatctcagtcacttcgtttttgagaagagtgatgccttgggcatgcttttttttttttcttttttagaaaacagggagttgaagtccaacctatttaaaaaccccaccatttggagaattacaagggttttgtcctgaattgtagtgttggcaagcccaagccactcgtgctaactgctttttgtctcggttgctattccaagaacagaaggaggaagttggccaattacagcgtgtgtgcatggatgtgtgtggggggcgtgcctctcagaaacgcggccagaagacaagcagggaagtgaaaggtcccaggcacacaccctgcccattgcaggtggctcttacagctctctggtgccagcacgggatccctgaagtgactcagccaggcagacatgagacatggyggagtgtccaaatggatcctttattggtggtagagcaaaaaaacccaaacacgataaacctttcaaaagactttctaaggatgatattggaatgcaccagccctcacatgtgtatgcacatttgccagaatataagagttttgttttaaatacagtcttgttaggattttacgttattgttattatggaaagtgattgtgatgctatttatcttcagggtcactctgggcaaagagaaggtcctcagccatgcccccagcaccttgcacataggtgtctgataaaagtttaagaaaktaaacactttttgagcaccaaatatatatagggcattgttctggtgggtgtgtcacgctcccagaagactgaattyatggtaggatcactcgcaaggccttgtgaaggagtcttacctaaaacraaagaaatatcagggacttttgttgactatttacaactcagttttacatttaaattcaggcagtgttaatatgccaaggtagggaatgtgcctttttcagagttggccaggagctcctggctgggacacggagaggcaggtgtggcgtaaggcctcactcccggctgkgaaggtctctgatcacacagaagcagccctgcccagcctggtcatttgctgtccgcttttctctgtgaccacagcagccctgaacaaccagtatgtgtcttcttctccagatagtgaaaaaggtgtccagataaacccacctaagtgaaatggccatcctctaaactgggtacctcactgcacagcttctaggtagccttccaacttaatctaacttgagcctcacagtaaccctgtaaagttagtagagcttgttcttgtattgtgaccttttttaaaaaaaaggaactgaggttcagaatgattaagggcctggcccccagggttgtccagctccataaggtggagctgggcaagattttgggtttgctgctccctgaagctggattctttcatacgatactctttctcaagaagggggctccctgggatctccaggtgtactgcacttaccctcaatccagccccggagaagcaagtgaaaagggtgggtccctcataggctagaatgtgcagctctttctccaggtgggatgtagcaccccraagtagagctttctgctctgctcctggaaaaggctagggagctggggctggggctcccctcccatgaccaggcagtggtcaccccatgggacaggcacagctacttacgcgaacacagcaggttggtgtggctggctaactaggacctctcgaaagtctctgtgggggcatgagggagaaaaggccattgggagaattactgcctttactttgggactacttttatgctgataacttgggatttcttgatagtccttcacccctgaaaccccgtatttacttaacaagatttagctcttagttcttcaagtaaaattaaagtctcttgtgtaagagccaacacatgcccagctgcggatgggagctgttcctggacagccttctactgcctgggaagtgatggaacaggaactcagggtgcccttacccsctccccagacctgttccctttctttgactgacagagcaccatccaggcaaaattagagcgccaaatggttttcttctcaatcttaaagcagtatacctttccacaggctcgtctgtgtccctgccactctgagttatccagaaaccaccacctacaaatgaggggactcatctagaagacctctaaggtccccttttggctctgaggggtctctaataatccccacttggaattcagcaccgcaaggaaattatgggtatgtgagccataatatgatggscagcaggtggcgctgccttccacccatggtgatggatggtttggaaagggaatgttggtgccttttgtgccacaagttaagatgctactgttttaaaggaaaaaaaaaaaaaaaagtactgatcttcaatatgaagacatgagcttttctcgcaggaaattttctttttcacagaactggtgtcaggaatcactgaagggctaaccgtgatagtccttgcaagtaagtcaaggttttatcctgattggaaatagaagacatttccggttgagagaacagattcgttggaagcttaacttttgttgcctcttaacgccaccaaattttagggtaatttgattatgaaagagtgaatttttctggacagaaaagggagagctaccaaattgtttttttctttttaaaaggaagtttaatgtccgttgtatcacaaatcagtgttaaaacaccagaactttagccaaaataaatgtcttacattacaaaggtattgtttttttgtccttcttatcacagttggtattcttttacgtttttatgcttagctttttttgtttgggcttagcttttatatttgcgatttctaactttttaaaaataatcatctaaaacatagccgttctgagctagttataggttccatgatggcactgtttatgcagtagatattgatgaacacctttccagtaccagaaatgttctggtaggaatattcttaggtagaatggccataatggtcctgaatgaaggaggtaaggtttgtgcttctaagaaagcaggggactagggtgttcatctcaaggtagcctcacgtgatgactgggtgacattttgagatttgagtgatcctgcaaatgaacagtccctaaacatatccccttcccccagatgccttaaattccactattggtgctatgttcctttgaataaaaaaccttagagaaagtagktgccttttcctcccagacagaagtctgggcagagaaagcctctcgaggttcccattccctctatcacatgaagcaattggactcgcttcctatttgtcaagactctgacaatgtaatctttatggttctacacaaaatcttaaggcagagcactaaaatataaaacaggtaaaagtttttaagtataatttttaaaaaatttttcattaaaaataatactatatgtacatagtaatacacttaaacaatgcaaaaggcttatacggaaaagtgagtcacttgctccttcaatctatctccccataagcatcatatccttaaaggaaaatgtcaagcatatataagcacacatatgtgcatacgtgtgtatatacagagatatctctgctttgttgtttgttttgcttagcttatattatggttattgtttttattgctctacccccttcatcttaacagctacatagcattccattgtgtatggatgtgtaaataaagacaaggtgatttggacatccctcaatgcagggtactgcctaaaagcagaagtttgccctcctaatccagatatttcctttttaccacctacaagtgggagcaaaatctgttttaaaatgcagccaataaggagaatcctcagtttccattaattagagataggggcctcctccagaaccaagtagagaatgaaaccggatgacctttgagagtccttccagatcaaagattctatgatcccaaggagtcaaaggagcataatatactttccaaatttggcctgtcattcaaagtctggtccaaatgccacatcttaccataaggatcccagatcctccccaggggaaagagattgttctctcctttgaaggcccataagaaaattgtccttttgaaaaaatgcatctggtgaggatgtggaacaacaggaactctttgtttcagtggggaatgcaaaatggtacagccactttggaggacagtttgcagtttagtttcttgcaaaactacacatacttttattgcacaatccagcagtcatgctccttggtatttattcaaatgatttgaaaacttaacgttcgtataaaaacctgcacacagctgggcatggtggctcatgcctgtaatcccagcactttgggaggctgaggtgggcagatcacttgaggttaggagtttgagaccatactggccaacatggggaaaccccttctctactaaaaatacaaaaattagccaggtgtggtggtgctcacctgtaatcccacctactcgggaggctgagccaggagaatcacttgaacccaggaggcggaggttgcagtgagctgagatcacggcactgcaccccagcctgggagacagagtaagactccgtcttaagacaaaacaaaacaaaaaacctgtacaaaatgtttataccacctctattaataattgccagagcttgaaagcaaccaagatgtccttcagtagatgacagtaggtgactagataaaccgtgatacatcaagacgatggagtattactcagtgctaaaaaaaaaaataagctgttcatgccatgaaaagacatggaggaaccccaaatgaatattactaactgaaagaagccaatctgaaaagactatgtatgggtatattccaactctatatgacatcctggaaaaggcaaaaataaaggtacagtaaaaagatcagtggttgccaggggttggggaaagtcggggagggatgaataggcagagcagatagtttttttggacaatgaaaatactgcccatctgtatgatactataatggtagatgtatgtcattatacatttgtccaaagccataggatgtacaacactagtgctgtgatgtaaaccatggacttcaggtgataatgatgtgtcatgtaggctcatcaatcatagcaaatgcaccactctggtggcgggatgttgataacgggggcagctgtacatgtgtgggcacaggacataaatgagaaatctctgtaccatccactcagttttgctgtgaacctaaaagtgctccagaaaaaaaataaagttttttttagaaaaaagcatctgaacctttttttcagtggcattgatcaccttccatctggtagtggagttgtttggatgcggaaattatttcttccatggtatgcgagctcctggagagggagtgcgtgtcccccttgctttattaaacgtttggcgagtgaacatcagaagaagcaactcgacagaaacaaaagctggtaaataatcacatggaaaagcagcttttctggaaattaagtttcaactgttaaattcaatgtttaaaaaaatcggctgggtgcggtggctcccgcctgcaatcccagcactttatgggattgtgggaacacctgatgtcaggagttcaagaccagcctggccgacatggcgaaaccccatctctacaaaacaaacaaaaaaaaatgcaaaaattagctgggtgtggtggcgggagtctgtagtcctagctactcgggaggctgaggcaggagaactgcttgaacccaggaggtggaggttatatgagccaagatcacaccactgcactcccgcctgggtgacagagcgagactctgtctcaaaaaaaaaaaaaaaaaaaaaaaaaaatcaacatcccaaacccagtgttgacagtcttatttatgggttgaactgcattcctcccaaatgcatatattgaagtcctaagtcacagtacctgagaatgtgaccttatttggaaatagggctattacagatgtaactcgttaagatgaggtcattaggctgggcctaatctaatatgcctgacctccttagaaaaaagggaaaattcgaacacagagagaacaccatgtgaagatgaaggcagggattgggggtgacacttctgcaagccagtgaatgccacagcttgtcagcagccagcagaaggcaggtaaaaggccttcctcactgtcctcgaaggaaccaactctgccaatgtcttgaacttgcactcctaacctccagctctgtgagacgacttctgttgtttatgccacccaatttgtggtacttagttacggcagcctcatcaaagtaccacctatgggagcctctattttgcaggtgagggcggggactgggctgagttttctggaaaacagccctgcaataccctcatcagaccaccaaactcttcacactccctcagacacagcattcacttccagaaataactctaaagttttgttttgtttttttaaactttgtggaatactactcagccaaaaaaaaaaaaaaagaaaagaaaaaggaacatgttactgatatgtacaacttggataatggaaataatgctgagtgaaaaaaaaatccccaaaggctacatactaattgattccatttatataaccttttttttttttttttgagacagtctcactctgtcacccaggctggagcacagtggcgcgatctcagctcactgcaacttccgcctcctgagttcaagcgattctcttgccttagcttcccaagtagctgggattacaggtgcgtgccaccatgcccagctaatttttgtatttttagtagagacagggtttcgccatgttggccaggctggtctcgaactcctgacctcaagtgatctgcctgccttggcttcccaaagtgctgggattacatgagtgagccaccgcacctggycgcatttatgtaacaattttgaagtgaaaaaaaaaatgacagaaatggagattagatgagtagttgccaggggttagttgtgggagggagggaaaaggagggaaggaggtgggcaacaggagaaagacttgtggtcacagagctgtgctttatcttgactgtggtggatccccaaatttacccgtgacaagattgcatagaactaagtatacacacacgtgaatgcgtgtgcacgcacacagtagaggttaagccacgggagatgtgggtaagattggtaaattgtgtcaatatcaatatcctagttgtgatattgtcctatagtttcgcaaggtgttattgttgtgggaaactggataaaggatacacggagtctgcattttcttttttttatttttattttttgagacggggtctcactctgtcawccaggctggagtgcagtggcccaagtatggctcactgcagcctcgacctcaacctcaagtgaacctcccacctcagcctcccaagtagctaagaccacaggcgtgcgaccccatgcccagctaatttttaaattttttgtagagactaggcctcaccatgttgcccaggcttttatttcttataagtatatttaaatttataattatatccacattttaaaattttaatttaaaaaattactctgaggccgggcattgtggctcatgcctctaatccccagcaccttgggaggccgagttgggcagatcacccgaggtcagaagttcgagaccagcctgagtaacatggagaaacccccgtctctactaaaaatacaaaattggccgggcgtggtggtgcattcctgtaatcccagctactcgggaggctgaggcaggagaattgcttgaacccaggaggtggaggttgcagtgagccaagattgtgccactgcactgcagcctgggccacagagagaatctgccaaaaaaagaaaaaaaaaaaaatttcagccgtacaaggatgttcatagcaaccctgctggaaataggaaaaaaaattggaaataacctaaactactcacaataggaatcagctaaaaccctgggggtttaattccagggartactgtgaacaatgacaagtttgtggactgagtaaaaataaacagctgtcaatgacttaacattaaatgaaacagcagaagatgtcacagcaggttctcgctgagccattcagaggggtgtggatcatttagaggttcaagtccactggattcttctttttccttttaatattacttcacttccaaataaggaaaggaaaggaaaggaaatcacgtccagtcctgagacttgccatcctgcagtcacccctccttttgtctccagcaggtggcagacgcgttccagggatgaatcccactgcctctgtttaatgcagacggtccagccgctcccaacagcaggtggggctataagcatccatcctacctgctcaaggaacccaggcatcagaactgctctctcccaagtccattgcaagaaggcagtcgtctggtcatgagagggttaacagtccacattccagagcaagggaaaaggaggctggagggtcatagacaaggggaggtggtgcggagggccagcttctcacaacactaccggctctgctgggagagatagatcacccccracaatggccacagctgttttcatctgccctgaaggaaactgacttaggaagcaggtatcagagagggcccttcctgagggggcttctgtctggcttgtaaaactgtcagagcagctgcattcatgtgtcggatgatggatgatggaaaggacagtcggctgcagatggacacagcgacttgcaagttgaggcaggtggcaaaggacttgcagaggctctgcaggtggggcatgctgattcattgcccagttaaaataccagaggatctgggcagcctcttcacaggagctgcttgtcctcaaacaatctgtcttcaatgaaagattcctctggccttcctttctcttcttgcacctcaggtgtgaatccttctcccccacgcctctacctgcscccccgccccccgccccggccctgtgtggctcattatatgcagggccaaggcagcattttctcttagcttctttgtgaccacttggtcctgggatggcttcatggaacacatcctgtggtgtgcaccaatgaagctttccatacaggactcaaaactgtttttgaaaaatgtaaccagctggaagacaagaaaataaaatgtcagcactaaaaacgctggctgtggcttttgctaaggaaaggaatttggtgttgtcttctcacacacaca

SEQ ID NO: 95481 - DNA, 44386 bp, Homo sapiens
cctgtggggcgtgggggaggctggacctgggcagttggtgccaagcagggctggggacagagtcgctgggtggtcaaggcaggggaggggcagagaatagctctgggatggactgtcctgcattcctaggaagggatatggccagggcacggcctgggtgcccagggctcccccatcatggctcacagcgcatttttatcaggccacgcagtggtcgcagagcctgcgaggtggatattatcctgcccgtttaacagcagggaaagcccaggacaaatggcttgcctgaggccacccagtgttctccacagccctggccccctcttctgtctgggctccaatctactctgtaagcactgcgttggtccaggacaagcggggagggaagcagcataggatgtgtgcatacatgagtgtatgtgtgagtatgtgtatgtgagagtgtgtctatgagtgtgtgtatgagggtgtgtgtatgagtgtctgtgtttgagtgtatgtgtatgtgtgtgtccaagagtgtgtatccaagagtgtctgtgagtgtatgtgtatgtgtatgtcagtgtatgcatgtatgtatgtgtgtacatataagtgtgtatgtatctgtgtgtgagtgtgtgtactcaaatgggtaaatgtgtgtatgagtgttatatatgtgtgtatttgagtgtgtgtgtctgagtgtgtctgtgtgtatgtgagtgtgtaggtgtatgtgtgtgtttatgtgtgtatgtgagtgtatatgtatgtgtgtctgagtgtgtgtgtagtgtatgtatatgtgagtgtgtgagtgtgtgtatgtgtgtatttgagtgcctgtgtctgtgcgtgtatgtgagtgtgtgtagggatatgtgtgtgtgtatatgtgagtgtgtgagagtggtgtatgtgtatgagtgtgtctgagtgtgtgtgtgtagggtgagtgtgtatatgtgagtgtgtgtgtgtgtctgtatatgtgagtgtgtgcacgcatgcatggtgtatgtatatgtacagctctcctccaggtcactagttcaagcggggacactcctctgatctgtctccaaagagcaactcaagtgcctcatgcggtccccagggcatctaactgcgtctactttctgctttgatcccctcttcaactcctactgttcagaagcttcctgcactccctcacccactccctcatcaatctctgccctgtccagggtctacagggacacttcaaattatggttggcttgtaggggggctccagcaatagacactgggtcattggggtggttagcaggactccccccactcccagggtttgcactgacttttaaaaattattattattactactattactattatgagagattggggtatcactatgttgcccaggctggtcttgaactcctgagcttaaggggtcctcctgcctcagcctcctgagtagctgggactacaggcatgcaccccacaccccgatgcaccgacttttgcaagctcttccccactttggcgatgggccacctgttactggcccctcacgtgatgcccatatcaaagcccttggcacttcagtggaggtgctggagggagaggaggaaaagagaagtgggtggcacagatggatgtgggcaaggtgccagtaaagagtgtgtgggcagcgagaagaggacatgctatctgtaacagatacctggggctccagaagccctggggtggatcctgccttccgcaggagaacctgaagtcagccaggacacagcagacagccagagataaggactaaccacccacggcccgctggcacctagctagaacctgcctagacctactcccagaagggaactgcgtttatagaacaccttctgtgtgcctggcacatggcagccactctacctctgtcctctcccaaagttgttatccctattgtacagatgaggaaattgaggcttggcaaggttatttaactggcctaagacacacacatgaagtggctgagccaggatttcaacacaaaattgtctggttccagaacttcccaccccaatagggaggtgggcagactaaaatcaggaggcaagggaaagtgcaattgttgggccaggtggaggaacagatgctgcttacaagagaggttttggggctctgccctctagaaaggcaatctgacatgaacgcaggccaggctggtggtaatggtagtggtagtggcggaggaggcttcaatttctgtcttgaggttgtgggatgagcaagaggccaggaaacttggtccttcacggaggccttggtttagtcctggtgggaaggcaaagctgtctggatccattcctgtctggatgccctgttgaggcggggactagggaggacggcatagcttttcctttagaacagtggtttccaaagtgggtgtgcacctaggggtgtgcaagatgatccttttgggtatgggaagacaaaattggaatttctatttatagttaaaaaattaatcctggcctggtgcagtgactcacacctgtaatctcagcacgttaggaggctgaggcaagtggatcacttgagcccaggagtttaaggccagcctgggcaacatggcaagactctatctctacaaaaaattaaaaaaaaaattctccaggtgtggtggcatgcaggtgtggtcccagctactctggaggctgaggcaggaggatggcttgagcctgggaggtccagcctgcagtgagctatgatcatgctactgcattccagcctgggcaacagagtaagaccctgtctcaaaatatgtttatttatttataaataaaatgaaaataaaaattcatccctatgtgtgtgatttctaatatgcatactaattagttgaataacacaaatatagtttataggcaaatatttatataattttatatagtccattgaaggctctaatttttttttttttaaatacggagtctcactctgtcgcccaggctggagtgcagtggcgcaatcatggctcactgcaacctctgcctcccggcttcaagcgattctcctgcctcagcctcccaagtagctgggattacaggcgcccggaaccactcccagctaatttttgtatttttagtagagacagggtttcatcatattggccaggctggtcttgaactcccgacctcacatgatctgcccacctcggccttccaaagtgttgggattacaggtgtgagccatggcacctcgcccaagttttttttttttttttttttttttaaagtatagtccataaataaggtttccagaactaggcactggccagtcgcaggtgtggaggcgaagcacctcagaggctgggtgtagataaactgggaatagctgttggtggcccctgctggtcattataggaagtgcaccatcactcagtgcaaagccttacctgctggaaatttgtaacacttttgagttttatttttctctgtgccttgactcccaaaactctgggctgaacaccaccataggaataccttgattttgggggaaggagatatactacctgcacctttatgacctctgaggctgaggcagggaggaaggcagagctaattacaaacctcagagaaggaggactcattcccctcttgaggtagggggcagcccttaactactaggggatgcattgccgaccttcaaacctgcttcccttcccagctactccattgccaaccattagcagctctattcctttggggaacagcttaggacacactgcacctttattatggcattcagctgtgctaccaagaagcgctttttgtatctatgtaacacactcctttccgacttcaaccccagactgtgaactctaggaggttagggcccttatctatctcagtatcacagtaagtggtaccttgcctggcacagaagaggagcatcctattctgcatcaataaatgtttcttctcattctgtaactgcacaaggctgttgtgagaatgaaacaatttgtcaattgtaaggtcctgaacagatgtgagaggctggcattctgcaaggcctttattagagagatacttgttgaccgacgaatgcagtggggcagccgctaagaataatgagttgggctccacctccccaggtgggccagaatctgagatcccagactgtcctgaggatcctaaatggaatggaagatttgatgtgggtcgctatggaggtaataattgcttgattaagaagtaattaatatcttgtagagattcaagatccttcctcttccaaaatacaaatagctgagtgatttccagcccagaggtggacaggtgacagtggagggtagcctttataatggaaaggggaactcttcctgaattcaattataaggattttctaggccgggtgcagtggctcatgcctgcaatcccagcactttgggaggctgaggtgggcagatcacctgaggtcaggagttcgagaccagcctgaccaacatggagaaaccctgtctctactaaaaatacaaaattagccaggcatggtggcgcatacctgtaatcccagctactcgggaagctgaggcaggagaattgcttgaacccgggaggcagaggttgcgacgagccgagatcatgccattgcaccccagcctgggcaacaagagcgaaactccgtctcaaaaaataaaaataaaaaagaagaagaagaagaaggattttctagcttgcagatagaggaaagagctgcaagcaatgcgctccaagaaccctctttgtttagagaccaaagcctgcaattcctgtcaaagctatctgggttcgatggctttcttctctcagtaaaagcctgggtcacctaaacaatgtggttttcagcagttcggccgcctctgtggctttttcctatatccaaacttatacccttggaactcaggggagagctgagtcttggaacccagggaccagtcccctgctttcgggatagattcccatttctgagatttccaagcaagtttccagaatgtaatccatttcttttctttttgtttcttttgagacagggtctcactctgttgcccaggctggagtgcggtgttgcaatctcggctcactgcagcctcagcttcccaagtagctgggactacaggcgcgcgctaccacgcccagctaattttgtttattttattttttgtagcgatggggtttcactatgttgcttgggctagtctcgaactcctaggctcaaccgatgctcccgcctccgactcccaaagtgttgggattaygggagtgagccaccgcgcccggccaaagatgcagtccatttatgatcttaggaatccagttagcaaggaaaagggatgactctcacattttgttcagggcaactggacggggtggctgaacgccgaggtcggagaagtagcgtagctggccccaaatgctagtcgcactgcacagagcctcccgtatttggaggcccagcatcttttactagcagatgtggggtggagccggaggctgggcgaaggcgggccagtgggtttaaccctttatttactttttgggctgggactctgaggaaggctagccagttacttctttattccataggcaggaaaatggaccaggcctccctcacctagacctaaaagaggctctcgaatcctttcaggaagacatttcctcttttttgcaaaatttctggaaagtctggaatccggatatccaccctctgagtccttaaaaagctgcccctgatcccgaggccttctggggctggtatcctgcttcctgggagtctctctgaagtcctcctattctttttctcaatatggaagcaggataacgaggaaaagtgaggcacgcctggaactagaacgccggtctaagccaagatgggtgggcggagtaatcaagccggtctcattaggcacttttaccatcgcccctttaagggatccttgggagccgaggggcaccagcgggtactggtaccagtcctgcctccctaacccttcccagtgggactccagcagggcgtcgtggtctgtgcggtgtctcccaaaccactacctggctgcccccgtaccagctgctgggaaagactacttcctccgagttgtgccggcctccgcgttctcctcacctcccctctcctccggacctccgccccctcgcggagaggccttgccgctttaagagccgggctagcgattgacaagcaataaacgctgagcgcccggctgcgctggagccgcccggagctaggggcttcccgsggcgcaggtaggcgtcccccggcccccgggccagctcctatcccaagacctccgccttcttttcgtcctgacacggcacttaggaccctattcactgggtttaaactccacaggcccctttcacccaggcccgttccctccctgtccacccgcccccgcccctgggccctctttctggggtgctggttgggagaaccaagccccgctgcccattgacactggtccccgcccctgcggtaggggctccaaagtggcttcaggcaccaaggtggtgagctgtgaggggccccggtatctgcgcggcctccccgggggctgtgcgggttgggggkactkagaagcccggcattacgtaagaaccgtgctgttagcgcttccgggggttggggagcgagacagaggttgcgctgggtcccggtggccccctggtccccctaggcagctaacaccacaatcttccctgggagggggtccgcagaagggcgcgcgctgcttctcccgcttcccaagctgtagcggggcgggtcgggagccagggttagggtctggagacttgggaggggaccggtgccagaagcgaagagctagggttagaaagttaggtcaattaaggggggggcggtgcggataaagacggggtgggggttggccggggcagtcatttagtgacctcatccctggtctccggcgggcgcgcacgtagagagccttctttgatggctcacaacacgcccccctcccccaggtcctagcgcccagggtgttagggctgggtccgttggggcaggggtgatctgatggtccaagcatgcacgtccgcctggcctttcgaccccatcctctggccctcagttctgtccagacctccccgcgacctctcgctctccaaagcgcctttgtcagacctttcttctccgcacctctttgtatgtgtatggatggagggatgggtgggaggttggaagaaacctctccctttcactgctggtccgctcgcctgcggacactatggstgatgtggatatctcggaggcagagctgagagggcatctgggcccaggcttttggaagccgaggtgcaggttcccagatgtctgggtgcaggaccttggcacggagccaggctagcttgcctggcactgccgttytcctgtggacacagccaggccccgccytctcagaggcttggacgggcgtgggggagcaaagccagcckatgctstgggaaccgaytccccgggagaaaacccaggcaggctgggcaagacttccgagcgcagggatttcatacaggatcctccctgccttttcccgccctccacgctctagggaaggaggacttctggagtcycttctctgamcctgtgagggagagcagcgccagccaggagaaggctccaggtcatcaaggcctgggagggggagggaagggayccctcctccctgctctctaggagtagagattggcaccaggggcacgggccagcacagtggatcctgggcatttcttccagcctgggtgtagcctgaataggggtgcccttcctctccctgaaagcacctttattccatgtcctcagcggcagagctgggaggaaagggaaccatccccctcacttttgtaatttctgtcacctgagctcaggtgaccagctcaggcctgagaagggaatgggagcagagagggttttattgaaatcaggtactagtcctctgggaagaatcctcttttggggggaggtggagttgcygtggttcccccacccccaggactcagcaggcattcagtcctaaagtgggcactgccagatgcttccccccactccccacccctgctgtgagccactgcctcctgttgtcatggcaactgggaattagggttttatccagcagcacatgcccaggaaggcaaagggaagaagggtggggggtaaccccctgccctctcctgggagaacgagggagccactcctagcctggggaggccctggaatggaaactggggctgtagactccatgcttggttctgcccagagcacttggtctccttgtgccagctctgagctaagaaagggagagaggagagagagccagccagaggggccgtggagaggtagatatcactctgtcagccccccagataaatgtggaacatcggcgctttggtaggcctaggttccagaagcaaataaaatcaatgtggttctgactctcagggaacctgcagtctaggagtactcatgttttctactttggctcaaattctggactcttttattatttttwaaatgacttttttttttttaagacaggttcttgctctgttgcccaggctggagtgcagtggcgcaatcatggcttaccgtagcctcgacctcctgggctcaagagatccccctgcctcagccccacaagtagctgggatcataggcatgcaccaccacacctggataatttttaatttttttgtagagatgggggtctcgccatgttgcccaggtggstctcaaactcctgggctcaggtgattctcctgcctcagcctcctaaagtgctgggattataggcgtgagccaccttgctcagccaaattataktcttaccctctaaaaattctacttgtttcctcttcaaaaaacaaacaaacaaaaaatacaacaggaagaaacactttatttatatacttatttttgagtcataaaacctggattttcattttagctctccttattagctttgtgaacttgggcaaatcagttaacctcccttatcctccctggtctcctcctcctcagagaaataggcgagtaatacctgctcttcctgcttcccaggacygttggaatcattgttgttctccaacccccactttctgggcagcaccttctcccctacctttctggctcgtcctgaaggggaggctcttcctattcccttccccattgctttgcccttgtatctgctcatcctcctctctcccctctccaggagagacgtttcagagcccttgcctccttcaccatgccggttgccgccaccaactctgaaactggtaagaagggggtgaggrtgttagcttatttcagtggttcagagggtgccaggcgaggacttaggggtgggcacttgcacagctccagataagaaccaactggctccactgctgtccaccctaccactcagccattccttctggcagctgctgtggccatctcctctgtgtgggttcctgtgctggaacggagaagagaaagaataagacccatacctgctccagtgtagggctggagcacaactcacctccgtggagggcaggggatgcrtgctccagaggtgacccgtactattgctggagggcagtggcataggaccaggccttcaggaggtggccccggagctgggccttggagaatggcttgggggtggagggattacagcagcacagyctggggctgagaagtccataatcgctgcccactaggccagcatgtgccagaggtggacagggggtactggggaccaggaagctgtgagtgaaggaacaagaatrccaggttaggatacctggacgtggctctgtaggaggcattaggacaagggagygggccactcagacaaactagcaaagcctcagtggcaaactgcttaacctcttggagctcgcatttcttcttctgtaaagaggctgctgtgagacgcaaaggctgtaatgggagagcacattacttttaggaatagtcataattattatgctgctgttgctgccgctgccaccaagttgttgttgttgtttttgagacaagttstggctctttagcctaggctggagtgcagtggcgcaagcttggctcactgcaacctctgcctaccagcctcaagtcattctcccacctcagcctcccaagtagctgggactacaggtgtgcaccaccatgcccagctaatttttgtatttttcgtaaagacaaaaatgttgcccatgctggtctcaaactcctgagctcaagtactccacccgcctcgacctcccaaactactgggattacaggtgtgaaccactgtgcctggcctgagttgttattttggcattaaccctgtgtccttgaaacagtcacctccttttgaagacctgagatttccctaagatgagatgatgggacaagatcagtgttcttaacttttttctttttcttttttttttttttgagatggagtctccctctgttgcccaggctggagggcagtggtgggatctcggctcactgcaaccttcacctcccaggttcaagtgattctcctgcctcagcctcccaagtagctgggattacaggcacctgctatcatgcccagctaatttttgtatttttgtagagactgggtttcaccatgttggccaggctgtcctgacctcaggtgatccacctgccttggcctcccaaagtgctgggattacaggcatgagccaccacacctggcctgttcttaattttattggtcctgagtcacttagaatctggtgacagcagtgagccctcatcgtagacatatrcatccatgcacaaaaggtatattctactctaggggatcatggattcccgtagygcacgcaggaccccagaaggttaagttccctgtgctagaggccctctgaggcccgggcagctgggarctgctatggttctgctctgagttgtctgaacttccccctgcctggatgcctccctcccatgcagctccttcccttgctctaggycccactactgcctctgccagaggttccagggctgccactttgggtagaatgattcctctgtgcctcctctccgagaaagtgaagggagtgagccagggcctaaactgtggtacacttgtccaggaaaggcctcttctccttgcagtggagggatggcaccaatgtccccagcttctgcagcatcagagggctcagtcccccatctcctgtccagcctgctgggctccctggggtctccctgcctctttcagcctgcctaggccccactgtaagctgcttaggcattaattaaacccacccctgagcctgtgcttaatggcctctccagcygggactgcccagtaaacccaccaatagtgcctgactggggcgtaggaggaggagcaagcccagcaatttggcttcgttgttgcagaccacttgatgggggcgtggtgggggaggatgggggacagggagtggagmcttggggtgtggcggtgggttctgcttcctcaaaggactcctggggctcctgctccccttcatgttgttcgaggggctgctcctggcttctcatattcaaaggaagaagtacaaagtgtttttcttccttcaggcagcctctgtcctatcctgagctacattagctcccagcttcaaaaatctaatggtggattctgccccttattatctggtggtcattatacttcccacaggatagagagacagctgtgtccctgcctctgagttcaggctccccttccctcctcctcccctgggagatccctgccttggactctgcaaagggcaaagctaataagatcctttttccgcccttccccatgggtcagtatggttgaagggagggaaagggtatgggtgtattcctcttgcagggagaccccatatctactttgggtagagtcaggggcccttttcctgagacttgggagataaatggacagtggcactgggctgagaacttagagatcctgaacctggcatctcctgacctgcagccttgctccctcttcccctgtcaccagattccctcccttttttggatcaaggctgggatatgtggctgctttcaggtggagctgtccctttaaatctctcctccatccctgggttactgtcctggtgtgtaattctactgtcatggcaaccaggggtgcaatgcgacctggtgccactcctcagggaatgtctgagtggaggctgcagtaccctgatggtggcctcttgggcacaagatctcagaggaatggggtcaccggagcggagctgagtccttcccttctgcccacacttttccctgtgtgcaaatgtgccctcatttttcctttctggggaamtgagttccaagatgcctgacttgcttcctgggcatcatccccttcattaagaggaagaactcatgggagatgggggaggggaagaagctgctgtgaggcgaggggtaagcagggctggggcaccatccctacccacagcgatgccacctcccccacgtaccctgcctcccagtggctgaccaagggtgggtagggggaggcgtctgaggcttgaggtatttgccccatgcccaagtgaggctgcctcccggtggagggctgagtcgttcttggggacttccttagactgagggactattgtaaaggaaacagggcctggagaggggactgagagcagaggtcagagggcatagggaggaggtggcatggggtgtattagaggaggggcttctagaaaagagggtacagggacaagatgggccaagacttttctccctcgggtctcctgaagctggctgtgaggggagggtctcggagtaccgcgccagtcttgaaggggcagcatgcctaccccctcctcaaaacttcctgttagccgcctcctccccatccccaccgacactgacatgctggggatcgggcaatctgtgggactagggctccctcccaccactcttctcccacccgggttaccgcctgctctgcaccgcgcagcgccagtcagggctttagccaatcagcaaggcggtcacggcggctgagccttcccattggctggttcctcagagggcgctcctcgactcccgccttccccagcccggccaggctttggctggggaggcggtagacggcggcgtgtaggacgctccgggagtccccgggtctgggggccgccatggcaggcagcccaggcagcggggtctccttggagggtatatccctggagtcttctgaggaagcggagctccagagggaaggtagggaagggcgggccagatgggggcggggcagctggccccttagcctaccttcctccagcagagtcggggcatctggggagggtggcctgggagaggtcatctgagggcaccttcaggagagctgtcctgggcagagggcaccaactcccttggctcagtcctcccctagataacggagggaatctggcataccctggcaggaagggaagggtccctgccctggcctctttcagagcccactgagggcctcgcaggtctctgaccaatgccaagccccggcctgggcaagaggggtctgaagggcaagcttgcacttttttttctggagaaggcagggagcaggaggaggaaggagatgggagtccaggagtccctgaaccatctctgccagctccagttccagtgccccctcctccccactcctgttccttcctggaggaggggggcactgacaagagcattgagaggcgccaggggtgcatcctccgccgtcctccgtggcttgggtactgttatgcagatgtaggcatgggcggcatggtggcagagtaatgatacccttcgcccatctctgcccccagctgggcacattctgcttctcgcttcctttccccggaacttgccacagcctggaactcccacctctgtcagtgagtgaaggcagccctcacctcaggtctcgggggcattgttgcggcccagctgcaggtgttatcgtgtcctccattatgtcccatttcgggctgagagtttgcttatccctgtgatgacttggtgtgacctcagcctttgggtcacaccaaggcctccagtgcctgtttccctagctcctgccagsgttccaggcctcagctttgacttcctatcatccatgttaatttctcagtgattatagatcattgtcactsagagctgaaggcctgtaaacatcatctagcccaatccatccattttacaggcaggaaagactgaggccagtgagggacagtgacttgtacaatgtcacactgaattagtggtgcttagactggaggctgcaggccctggctcctgtgtggctgcctgcttgactctgggcctgtactcasggacttgytccragtactgtctgtctcatccttgagcctgccaggtacaggtggctgagccctgggcttcagcccatctagaggttgagtgaggagcttgtggttttcttttctttttcttttttttttttttgagacggagtcttgctctgtcgcccaggmtggagggcaatggcaggatctcagcttactgcaacctccgcctcctgggttcaagcgattttcctgcctcagcctcccgagtagctgggattacaggcgcctgccactacgcccagctaattttttgtatttttagtagagacagggtttccctgtgttggccaggctggtcttgaactcttgacctcaggcaatccacccgcttcggcctcccaaagtgctgggattacaggcgtgagccaccgcgcccggccagagacagtcttgctctgccacccaggctggagtgcagtggcgtgatctcagctcactgcaatctctgcctcacaggttcaagcagttctcctgcctcagcctcctgagtagctagaattacagacctacaccactatgcctggctaattttggtatttttagtagagatggggttttgccttgttgcccaggctggtcttgaactcctggcctcaagtgatccacccaacagcttgtggttttctggtgcagggcaggatctgcaacctgacacctgcttccctttctcccttctctccacctcagagtctcttccagctgcctggagcctcccacctgctcaggctggcattacctagggtggagagaacaggccaaggaaaytgtccccttcctccaggatccctgtcccaggcattcaagggcctggggtgcctgtgctgggcagggaggggaatgttgctggggaggggaatgttgccggggaggggctgccttctgtgggacatgggggtggggaagtggcaagtattgtggtgtgttttggtcttctgtacccagctggtacctgtgtatctcactgcccgtaccttcccccagccatgcagcaagtcctggacaacttgggatccctccccagtgccacgggggctgcagagctggacctgatcttccttcgaggcattatggaaagtcccatagtaagatccctggccaaggtacagtgctccagggaggtgggcacaagggcactgtgcttggggaggcacagtaggggatggggtattagctacagagggctttgggaatgggacatgtggcacaagaggcccccctgaaggggattgtagaagaaaatcatgcccaggtgatgacctgagtggctgcaggtagagggggctgcccccacacctgtctggtgagtgcgtgggtggatgtttgttgactgccagcttgtggagtgtgtgattggtgcgggctagcatgcacatgttggagaatctctagaattcatcttgcctgtccttctgcctttgggcgttttgtgtgtatgtctttctaaggtcacctgccatgtatcaggttggggagagattsactaaaagagaaaattataggacaatttggtaatgacagtgatagaggtggatacactatgcattttgggagcataaaggacaggtgtctaacccagcctggggtgggtgaggagggcttcctggaggaaggaccacttgagctgagtggaagaatgaggaagagggggagggcattctgggccacagaagagcttgagcagaagcacagaggtaagaaagagtcaggagtgtgcaggggattggaagggctggtgtgaggctgagcctcaagtgtaagacaatgcgagctgtgcaaaggttggcaggtctggagggcactgggggctgtatgtgggtgcttgggcatccttctgtatcagggaggctttatggttttttttgttttgttttgttttgagaaggagttttgctcttgttgcccaggctggagtgcaatggcgtgatcttggctcactgcaacctccacctcctgagttcaagtgattcttctgcctcagtctcccgagtagctgggattacaggcatgtgccaccacgcccagctaattttgtagttttagtagagatggggtttctccatgttggtcaggctggtctccaattcctgacctcaggtgatctgcctgcctcagccttccaaagtgctgggattacaggcatgagccactgtgcctggcaggctttacattatttaagcagggatatgatggccaaatgtgggtgttttggcagccatgtggaggactgttggggggttatatctgaagttggagaggccagttagtggctcttcagtggattgagtataagatgctgagagcctgaaatggagctgtggtcccagaccttagggtaaactggtggaacttggtgtttggcagtaagggctagggtacagtaaggcacctgggatcctgccccagggagtgtggaaggatgccccctctcctgagggggggaggtggggatggtgcccatggctgcgttggaggcaaggctgggagctgtgggaaatcagacctaattgctcagatttcttggtgaaggtggagcagtcctctcctgggaattagggatcagagatggagcaggaagattcagaagggaaggtttgactggtcactgaaagggagaaggaattaaatggatggggacctcgactgtccatgtcaggtgcccgatttcccagggtgggggtgactccatccagagaggaagagaaaggagcgggggctttggtccagggcacgtgctggcctggggctgtggaagtcggatgcagggaattgtgaagggagctggtgagagaggctcagagaaaagaggcccaggctggaaagaggcagaacagggagaaaatggaggtgaaggctcggtggctctctgaggtcacagagtatttgaggggtgatggtagggatatagatggaagagaaaaagaccaaggtcagaggaagggaggtaggaggtgaaagttttccaaggaggacagttctrgggatgccatgataatgtagggtggggctgcagtggacaggtaggtcatcagtgttgaagacacccagaaatggaaggctcaggagtgggatgggcttgtccacacacctattggcatgtagggctatggcaggcgtcagggtggggagaagactgaggcagtccccagggttttcagtgcatggtggtggaggtgaccaggaagtcggcaatgacagcaagggtagggagaaagaaggtayagccaggtggtgggttttctgtagagcggggactctgtcacaggctggctatggctggccctggcatgggatgtggaggaccacgtcccactggagtggggattgctgctgcaggggacaccatgtccttggrttgtagcctattcacattatctgtggaatggttgaagacttgggaagattgttaacagcgaaagatgaaaagttgcagaggtttaatagtgggaagttctggggaagagaaaactgagcagattggaggagattggagaaaggcagggtgcttttcattcagcaatcgaagatcctactcatttactaaagataaagacaagaagctgggagtaggggcatgcacctgtagtcccagctactctggaggctgaggtgagagcattgcttgaggccaagaagctcaagtgcagttcatgtaacatagtgagagctcgtcttcaataaataagtaaataaataataacaattatacacatttcaaacatagagacttccatgaaggcaggaatgtttgtctttttgattcactgcagtatccccagagcctacaaaatgcctgacacatagtaggtgctcactgaatatttgttgaatgaataaatacaaaagagcataaaaaaataacaaactcctgagtacccatctccaaaatgttaataatgtttgttttgactcttgccatttcttcttaagaaataaaaagtatgaggcacacggcacggtgtggcttacagctttagtcccagcactttgggagaccaaggtgggtggatcatttgagctcaggatttcaagaccagcctgatcaacatggtgaaatcctgtctctataaaaaaatagaattagctaagcatggtggcattcacctgtagtcccaactactcaagaggctgaggcaggagagttgcttgagctgggtaggtcgaggctacaatgagccatgatcatgccactacagtccagcctgggtgaccgagtgagacactgtctcaaaaaaaaaaawaaataaataaataaaaagtttggcacagttaatgcctctccccttcctcattttcactgcattcccttcccacaggtaaccactgcctagagattgatgtcatttcattgaatgttggcttatcttgcctacatatgtgtttagctgtaaacaatatacctttgtgggatttttttttagacagrgtcttattccatctcccaggttggagtacagtggaacaattatagctcactgcagcctggaactcctgggctcaaatgatcctcctgccctcctgccttagcctcctgagtaactggggctacaaatatgtaccaccatgcctggctaatctttaaatttttttgtagaggcagggtcttgctacattgtccaggctagtctcaaactcctggcctcaagtaatcctctcagcctcccaaagcactgggattataggcatgagccaccatgactggctctacctttgttatgtgtgctttttttttttttttttttttcctctggagtctcactctgttgcccaggctagagtgcagtggcgcaatctcggctcactgcaacctccacctcccaagttgaagcgattcttctgcctcagcctcccgagtagctgggactacaggcatgcaccaccatgcccggctaatttttgtgtgtgtgtgtgtgtrtatatatatatatatatatatatatattttgagatggaatctcactctgtcactgggctggagtgcagtggcacaatctcagctcactgcaacctccgcctcctgggttcaagcgattctcctgccttagcctcccaagtagctaggactacaggcatgcgctaccatgcccagctaatttttgtatttttagtagagatggggtttcaccatgttggccaggatggtctcgatctcttgacctcgcaatccgcctgccttggcctcccaaagtgatgggattataggtgtgagccaccgcacctggccatttttgtatttttttttttttttttagtagagacagggtttcaccatattggccaggctggtctygaactcctgacctcatgattcgcctgcctcagcctcccaaagtgctgggattacaggcgtgagccaccatgcctggccattacgtgtgcttttaaattttatataaatgaaatgatagtgtaaggtgcttctgtttttgagatttctatttcatacaagtagtacagctatcgacctaagtatagatatagatagagatagggagattcatttgaactgcggtgtggtgttctgatacagcagtccccaacctttttggcaccagggaccagttttgtggaagacaatttttccacggatcagggtgaggggggtggttttggtatgcaactgttccactcagatcatcaggcatttgttagacttctcataaggagcacacaacctagatccctggcacgtgcagttcacggtagggttggtgcccctgtgagaatctaatgccaccactgatctgacaggaggtggagctcaggcagtaatgcttgctcacctcctgctgttcacctacttcytaacaggccacggatcastactggtccatggcttgggggttggggacccctgttctaatatatgaatagagctgtttgtttattggttcccttcctgagagatgtgtatgtcactgctgattttgctgtcttaaaaacagtgctgcagtgaacatcctcatatccatctgcttctgcatgcatatgagggtttctctagaatggacacttggcaatgaaattgatgaatatgtgcagttttgaacctcaacatctgtaactttccaaaattgatttcagagttgggtttatgagcccacatcacctctgggtactttagctattgtctccacagtgagacagtgagactctgctttgtgatggcagagtctcagaatgagacagccctcttgccaatacccttcaaagcagggtcccccttgatagcattcctctctggtccagtccactcgacagtccactcgacagctctctaatgatgggtttgctggctggctggctatgtcattcactcatttgtccatccatccatccatccatccatccatccatccatccatcaaatacctattttgcactcgccacataccaggcacagtgctggggttatggcagtgaactgcmagatagtttgttttcctgawgaagcccaagtctgtcttcctttcactggacaccacaatgccccagtcctgggacctcacagtaaagcctaattgaraatgaaccaatgtgctgtgtcacattgtaagtaaactcccttctctggaaacgtttttggcgagaagctggtcaggattttttccaagaaattcctggtatggttccggatttgtagagcacaatagaagagagtatggacgtttcttcccctctgagacccccagtatgaggctaatgggctaaggcaatccagtaacttctttctccctgtggttgtgaaacaaacaggaagtgaatctccataaaggagcctacctgagcccactggaaaaaaaaaagccattcatttcttctgtccttgtatgggtgagcctttgcaatgtaaatttgccactcctctcatcaaagacagtgtctctcagagctccctgcattggacaatgggacctacttcctccttctcaccaattttaatcattatgtgtacacagacaaatttctaacctaatagacaaagcactgtgatcaaagatccagctgcaaaaacttcgtgaagtggcccagaaacccacaggaatgaaatcagattggagccacatgtggtagctgttggcctccctcccttacgctgtggagctgggcttgactctgtctggggatgtggcagacagtgtaggaggggccaggctgggtagatctgggaccagggagggacagggcctgaggatacaaacccagagggttaaaggccctaagggaagtcaagtctggcagagagatcagaagtccaggcggttggctgcacacagcaagtggcggccctggcaggtggctggcatctgggacggctgacatggatccagtagcaggtgttccagctacagacaaggccaaggtgaggaatccaaggcaggggacattcagaaattcagaaaaattgttactaakggggacagctgagaggcatgtgaaggctgttgtgaactaattcacatgagatgaagaagaaagaacacagggcttggagtcagaagattccactgaccagctttgtgagtttggtatatctgtcaacctctctgaacttcagttatttcttatggaggaatttttaaaaaattaatatttctttatgtatttattttaaaagaaaggtgaggtctcaccgtgttgcccaggctggtcttgaactcctgagctcaagtgatcctcccaccytggcttcctaaagtgctaggattacaggtgtgagccaccatgcccagcccagttatttcttttgagaagtggggagaatgatacctatccctcagagtcgtggtggggctaggtggaggttatggaagtgtaagttttttttttttttgagacggagtcttgctttgttgcccaggctggagtgtaatggtgcaatctcggctcactgcaacctctgcctcccaggttcaagcgattctcctgcctcagcctcccgagtagctgggattacaggcccaccatccccggctaatttgtgtatttttagtagagatggggtttcaccatgttggccaggctggccttgaactcctgacctcaggtgatccacccacctcggcctcctcccaaagtgcaggaattacaggcatgagccaccccggccagaagtgatttttgaatcaggaagagttgttataatcttagcttcagactagagttcacagggaggcctcttgttctgtggggaggctagggtggaagacctgggaaagcaagacagggccctagaagaataaaggtctagggaggtcactaagataggggctctgacaaggggacatgacaagcagagggtgtagtggtgaggccagtgtatcagttcacttttgctgtgtaacaaaccatcgtgctgtgtcgtggcttaaaacaactgtgatttaattcccctgattttgtgggttggttgggtggttcttctggcctgggcttgcttagctggggctgggtggtccgggatggcctcactcacatgtctggtgtcttagctgggaaaactgcaatgtctgggatggccagacccctttccatgtggtctctcatcctctaggagggtctctcatcctcagccaccttcacatggtagtctcacaagcaaggaaggacaagcctccagtcacaagcactttctaagcctctgctcacatttgataatggcccattggctaaagcaagtcacatctgtcaaacccagattaaagagttcctttactttctgacacactactctctgggacatcttttaatttaactatttaattatgaaccagggcttcaaataggaattccctgtcttttgccatgatcggggggttggagtggagggcagagggaaaacttttcagtgaaatgactgtgtagtgtttgcatttgcagcctgctacagctctggattgggagcaaacagaacagagtgcaggctggtgccactataaactagctgtgtctcccacttaagcttctggtctaccatgagcttgagcccctgctttgctgaggataattttcagagcagaatgaaatgaatggctaccacagaaattcaaatcactcttctagttctgggccatgtgtcacttaacatgaaaaagaagaataagtcttagcaaaataatagtgagtaaaaaagyagtaagggaaataattgttcacttaatgttaagtgaaaaaaaatcagaccccagggatggataaaatcatgattcccccctttttttatgtcatagaaaatacggccgggtgcggtggctcacgcctgtaatcccagcactttgggaggccgaggtgggtggatcaccagttcaggagatcgagaccatcctggctaacatggtgaaaccccgtctctactaaaattacaaaaaatwagccaggcgtggtggtgcatgcctgtagtcccagctactcgggaggctgagrcaggagaatggtgtgaayccgggagacggaggttgcagtgagccgagattgcgccactgcactccagcctgggcaacagagtgagactctgtctcaaaaaaaaaaaaaaaaaaaaaaaaacgcatttggacagacacaattccctttttattaactatattcatttcagaatttcagaagtatgtagaatacatacagacacattacaactctttaactgggaagccagggaatgacaaacacactaaatcaagatggtgctttyagctgggcatggtggctcatgcctgtaatcccagcactttgggaggctgagccgggcggatcacctgaggtctggagttcaaggccagcctcaccaacatggagaaaccccgtctctactaaaaatacaaaattagccgggtgtgttggtgcatgctgtaatcccagctactcgagaggctaaggcaggagaatcacttgaacccgggaggtgtaggttgcagtgagccgagattgtgccattgcactccaggctgggcgatagagcgagactctgtctcaaaaaaaaaaaaaaaaaaaagatggtgatttctgcaagtgggaagggtgagtggggcatgtggttagatgtaggatattgacaagagctttgttttttagtttgggtggtgggttctcttagatccttgttatatcatttaaaaaatctaatttaggccaggtgtggtggctcacgcctgtaattccagcactttgggaggccgaggcaggcagatcacctgagctcaggagtttgtgactagcctgggcaacatggtgaaacctcatctcaactgaartataaaaaattagccaggggtggtggcgcgtgcctgtagtcccagctgttcgggaggttgaagcacaagaatttttgagcccaggaagtggaggttgcagtgagccaagattgtgccactgcactccaatttggrctacagagtgagactccgtctaaaaaaaaaaaaaattatttgttcagcctactgaattgttggttttgtatttgaatgattaaatgtttaaagtttcctctgggctatgaggttgagcttggagagctgtgctttcatatctgtgggtataaaacgtccaggggtggccacaggaggaggaatggattagcccatggtgggaatgtcattaagtcaaagataggaggtaagcagcttaggaggcaccctggcttcccccttgatcacacacgtctcctcggaaaacttgtcctccatccgtggaccagatagtgctaaagtcaaaatgagtgacttctctaatgctcacatcaggacacctgtgccagagctggctcctgttaacccaaaagagccatgcaagggttgccatggtgagattgttgctgcctgagtgccattgtttattcttgacactcagttatttgggctttgattccaacattgtcctaggcacagggtaayagagccagagctgggacgcctccctcactctggggctccataggctgggccaagctaaatgactgaaagtcacataggggtctgtggaagaccagccctctggggcttgttcctttccccaaatgctactcctctgccccatcagttgtctgtttccccagtaggttgtggatgtcagtctaaaatgctgcccacccggcagaggatggtatgggaggctgtggggccatgtggggtgctgttccctggcctgtttgggaaaagagaaggcagaaagcatctaacctttattgagcacctgctgtctgccaggcactatgtccatctcaccaaatcctcacagcagtcttatgaagtattactcaaatctcaccatctcatggctaaacaaattttctattatgaaaaaatttaagaatatatcctgaacctccatcacctagcaccccacttcaacattcaacaagtcatgcataatcttgtttcatccacacctttaccagcttccctctctcctccattgttttggagtacatctcagccataatagattgtatctgcaagtgtttcattgtgtatataaactcctgggctcaactgaaaaggattctttaaagctacactactattstcacacctaaaaaaaaatcaaacaatagttttcttttgaatttttttaattaaaaaaattttaaaaaatagagatggggtcttgctgtcttgaactcctgggctcaagtgatcctcctgccttggcctcccaaagtgctgggattacaggtgtgagccattgtgccctgccatgaatttttaataaatggtattggaacatctggatagtcattttgaaagatatcaaagtgtatttattcctcacatcatatatcagaataaactccaagcggatcagagatctctatgtgaaaatataaatcatacacgtcctagaagaaaacaaggctctgtatatgggaaaagccctcccttaaaaaaaaaacaaaaaaacaaaaaactatgcctcaaaattcagatgcatgaaagattattaaattcacccacattaaaaaatttgttttttgagccagggtcttgctctgtcactcaggctggagtgcagtagtgcaaacagtgctcactgcagcctcaatctcctgggttcaagtgatccttccacctcagcctcccaagtaagagtagcagggacatcaggtgcatgccaccatgcattaaaatgaggattaaaaatgctcaggtgaatttttaaaatattttgtagcaacaggggcttcccatcttacccaggctggtcttgarctcctgggctcaagcagtccttcctccttgacctcccaaagtgttgggattgcaggtgtgaaccactgcacctgacctaaattttttttttttttttgcatgcaaaaacaccacaagcagagtcaaaagacaagtgacaaactgggggaaatcatttacaagaaatatcacaaagggctaattttcccaatagagagaaaacattttttaaaatagggaaaagaataaaaaccaagacctgacagaaaaattgggaaagacatgagtagacagttcacagaaaaagatatacagatggtccttaatcatatggagagatgtttgactttactcataataagcaaaatgcaaagtaagccccaatgagagatcatttctcctccatgtgattggcagacatgcaaatgtttgatcaacactctggtggtgagcytcaagaaaatccctcatacagtgctagcaggagagcaaactggccaaagtcccatggaggggaatttgtcaatatctaagaaaattacgtatgtatttgctgcttgacccagcaagacttctaggaatttacatggaagatcttctccacagatatagaatactatgccggagtcatttactgcaacattatttgcaatagcaaagtattagaaacaacctaaatacccatggagactggttgaataaattacaggaatccagtcatgcaatggagtcaaatgcagtaattaaaataataagatgggcatggtggttcatgcctgtaatcccaaccygggaggcagaggttgcagtgagctgagatcgcgccactgcactccatcctgggtgacagagcaagactctgtctcaaacaaactaacaataataattaataaaggaagatctccatgcagtttcatggagtgatttctatgacatatttttaaataaaaagccagaaaaccaaaccagttaaataaaagccctagggtatcaaagggtatatacagtgttctgtgttttatgtaagaaagggcaatatatttatttaatttttttttttggaaacagagtcttgctctgttgcccaggctggagggcagtggcgcgatctcagctccttgcaacctctscctcccgggtccaagtgattctcatgactcagcctcctgagtagctgggattacaggcatgtgccacatgcccggctaattttgtatttttggtagagatggtgtttcaccatgttggtcaggctcgtctcaaactcctgacctcaggtgatcctcctgccttggcttcccaaagtgcgggattacaggcatgagccactgygcctggcctttagtggtgatttctgagattttgatgcacccatcacccaagcagtatacactgtacccagtgtgtagtcttttatcccttacgcccctactacccttcccggctgatttttactaatagatttgtgataggtagtagcagttgtatagcaattttgaaactgctttgaatattgaaggacagaacaaataagtaaatatactgatgttattgggaaataagttctcactgaaggagaagggagacacaaatatggaatgggggaagatgagaaaaatcctttaattttatttggagccattagtatctactaatgactgccaaagaaatgatgcccagaaacaatgggtattgagtgtccacatcttggtttctaaatactatctcctgctaaaaggaatcagggttccttggagaaattgctgattccagacctggggtagggaatgcatcagatgagcctgtgccagaagggaagaagatgctcaaggactgatgggaacatgtcaacaggacagaggtgtgaatggggctcccactggacaaatttgggataaactgggtcaacgaagatagtgatcgtaatggattagaacacatggaataaaaaaaattcatagtgatatcatgagagagagaaggagagaaagaggagtaaggtggtagggagaaaagaagagctcattcttttttttttttttttttgagctggagttttgctcttgttgcccaggctggagtgcaatggcatgatctcggctcattgcaacctccacctcccaggttcaagcggttctcctgcctcagcctcctgagtagctgggattacaggcgcccaccactatgctaggctaattttttatatctgtagtagaaacggggtttcaccatgttggccaggctgttttgcaaactcctgacctcaggtaatccacctgccttggcctcccaaagtgcagggattacaggcgtgagccactgtgcctggctgaaaagctcattcttatagcagaatgccaataaatgtagaaggaatgatgggaattaggtaatcactattttgcaacctccagtataataactcatttaggcaagggtcataaattgacactaaatccattggtgaaggattttggggkaacagaatagtcacatagtctcaaagtatgggaaagacacaaagacacaagatcacctacgtagaactcttgtcaaaaggattaacgtaagtctaatcatgaggaaacaatcaactaaatctagtggtagagcatcctaaaaactactggcctggagtctaaaaatgtctaggctgggtgcagtggctcatgcctgtaatctcaggctttgggagcctgaagcaggaggatcacttgaagccaagagtttgagactagcctaggcaacrtagtgagaccctgtccctacaaaacaaaaacagaaacaaaaaaaacaaaacaacaaatgttctgaaagtctaaaagttattgggatctgttctagattagaggagaataaaaagatatgtcaaccaactacaacatatgatcatcaattagatcctgaatcagaaaaaataaaattataaaggatacttttgggacaagagtgaacatttgaatgtggactgtcttacataatgtattaatgaatcgatgttaaatttcttgcaggtgataatggtattgtggtttatgcagcagaatgtctttgttcctatgaaatacatgctgaaatactttgggrtaaagtggcttgtgttgtctgcaatgatctttcaaagattcagaggggaaaaatggtctycatatatattattgaaatggaattcttttcttcctgacccatctaacctaacactccccactgggctggtcactggcgaaggattccttttctgttttcagcgctccttggtatggagcccggagccagcagagcaacaaataggtgcagggcctgctcctggcaccgtgttctgatttcctgtcccctcattcgctgggaacactgagttgagggcctggagacgcaagttcaagtcccattgaccctgggaaagttattctacctccctaatttcctcatcctgggcttcagggtcttcaaggccccacccaaccatgatgtctggtggaagaagccrtctttgaacgccaatgcatatagggtcctgggagctggggacaatttggtaacttctaatgaccctctgtggcaaggggatggaaaggaaggtttgtcctttggtttcttccttccctaaactaggtcctagtaattttggggaagaaaggagacagcaaggaatgcatgtgcacgtgtgggtatgattgtcagtgagtgaggagctgaagctgggggctggggggtgggatggggaaaatgcctgggggctgagggaggaccctgcttggtgtcccagggctcctggggaagctcctagccccacctgttctgcttccacccccaggcccatgagaggctggaggagacgaagctggaggccgtgagagacaacaacctggagctggtgcaggagatcctgcgggacctggcgcasstggctgagcagagcagcacagccgccgagctggcccacatcctccaggagccccacttccaggttcctggctgctagggctggggtgagggagcaggaggtgggtggactggggcatgctgctgttggatgggccagcaggaagttggatctgggatgggaagagacccgggacactgccccattgtcccttctcttcccaccaccccccagtccctcctggagacgcacgactctgtggcctcaaagacctatgagacaccaccccccagccctggcctggaccctacrttcagcaaccagcctgtacctcccgatgctgtgcgcatggtgggcatccgcaagacagccggagaacatctggtgaggactgggcagggccagaggtggtgctggtgagggtggggggattgagaataaccaatgaacggacaaaaaaggccaagtgtggtctgaagatgaagatggggccagctttgtgcagggaaggatygatgcagcaaagggtcgggggaagacccaggagaccatagacactgcacacacacctgtgtccgcacctctccagtctgcccacctctcccctcattagtacctgctgtaagtgaagaatttaggcagaaggatggaggaggactttgtragggtgggggtgggtgggtagggacaggaatggaggagctattaggagactatttgaagattctgacttggagcaattggggcctcatcttacactccctctgacctccagggtgtaacgttccgcgtrgagggcggcgagctggtgatcgcgcgcattctgcatgggggcatggtggctcarcaaggcctgctgcatgtgggtgacatcatcaaggaggtgaacgggcagccagtgggcagtgacccccgcgcactgcaggagctcctgcgcaatgccagtggcagtgtcatcctcaagatcctgcccagctaccaggagccccatctgccccgccaggtgggcccctcacccagcacaaggcccaagggatggctgagcctcctggctgtcaaggttgcaggtctcrcggaggccctcctctcctactggtttcctccagggaagatgggggtgggacctgcagcccagggcagctgaccgcagccgccgacaggcctctgccgctgctgcacctgcacatgctcccacattggctggtattatgcacgcagccacagcctggggtacaagtgtatgagagagcgcctgcattatggtcagcgttcttcacgtttgtgcgcgtgcgcagggtggggttgtcatatgtcctggatagctgtctcctggttggtcaattctgggggtgtggctgctctgtctccctatcctattgggtctctcgccctccaccagagcccttctccaaggggagagggtgagtggagggagggatccaggattaggtgccagggtcctgtgccctacttggtggtcccgcatccttggtcctgagatctgaatcctgtagtactagatgcaaagggaggttggcaccagggaggagcatgggcaggcctggaggcatcactcctgcagggggacagttccattgccccttagtctctgtgaaaagagggggcatggggtagacctccacctgcagccttctgctgacccttcccccgaccctttgctgattcctgggcccaggtatttgtgaaatgtcactttgactatgacccggcccgagacagcctcatcccctgcaaggaagcaggcctgcgcttcaacgccggggacttgctccagatcgtaaaccaggatgatgccaactggtggcaggtgagctgcrggcaccyccgcatctctccaggtatggtgcatgggagggcgagggcacagggaggggwcctcttgctcaggcagatcttggtctcatgtccgttttaggcatgccatgtcgaagggggcagtgctgggctcattcccagccagctgctggaggagaagcggaaagcatttgtcaagagggacctggagctgacaccaaactcaggtaggaggtcccccctaccccacacctccaatctgggatccaacagggccctgtctgcctcactcacccatctccctatggccagggaccctatgcggcagcctttcaggaaagaaaaagaagcgaatgatgtatttgaccaccaagaatgcaggtgggtatcagagcgccccctcccttaccctcctctaacatggcatgcctttccctgtccccacccatcacctgtgacgacgtgtgcctggctcagatgctgccagccgtgtccctaggccctgcccgactcccccctgctcccctgttccaagccctcttgccctcagcctccctgagagctccgcccctccctcaccgtgcagcctggtgagcagcgccatctccctgtgtccagagtttgaccgtcatgagctgctcatttatgaggaggtggcccgcatgcccccgttccgccggaaaaccctggtactgattggggctcagggcgtgggacggcgcagcctgaagaacaagctcatcatgtgggatccagatcgctatggcaccacggtgccctgtgagtgggagctgggccctgctgagttggggacaaggagcagggctcccctggggccagggctgggcccaccgaatgggcatcttcatgggcaccaggccaggtggtacctttgggtacacgggttggggtgcacgccctctgtgggtggttaggggaacttcaggctcaggaagggtgagggaggtgtccagccaacaggtggcctagcgggctgggctggcgtccactttccttctcttgtttcacttgctaaaagccatgaagaaagtgagtgcccagctgtgcacccgggtgaaacaggctacgagctgcatgtgtgtagccttgtggaagacagggcttcttagtggcagaaacagcgggggtggtggaagctcctggctgccagaggcaggactaagagcactgccctggtctgcttggctcttgctgtgtggctttgggctgtacattgccctttctggacctcagcctctcttctgtgggctctgggctggaccatgattaccagctcatgtctctgtgtgtgccaatggggagagtggggggcaggtgtgtgcaaaggcagcagtgctggcaagatggggagcagactgcacctccaaggctgggaaacgggggcctgggtaggggtgcatatatgtgtctgaggcactgtaacctgcccctgcccatttggtccaacctacccccatccccctagacacctcccggcggccgaaagactcagagcgggaaggtcagggttacagctttgtgtcccgtggggagatggaggctgacgtccgtgctgggcgctacctggagcatggcgaatacgagggcaacctgtatggcacacgtattgactccatccggggcgtggtcgctgctgggaaggtgtgcgtgctggatgtcaacccccaggtaccgccactctgctccttcccagcctgcccaatgtcctctctgctgcctcattgctcccccatatagttccagacacctgtcacctgaacacgcccatgtaccccctttgccctcaactactgctagaaacccagcccacctggaacctttctcagccttccagrgtccccactcctcctctagtctcctccagtcaccccagccacctgccagctgtttgtcatttgtcccaggactcatgtcccagacccccgggcacccttttctcatccactcccaagtgctcaccccaaccccagttaccctcacagcctttctctggttcctaggacagacatggggatatactccctaccytgccttctccttctgcaggcggtgaaggtgctacgaacggccgagtttgtcccttacgtggtgttcatcgaggccccagacttcgagaccctgcgggccatgaacagggctgcgctggagagtggaatatccaccaagcagctcacggtgagggctctgaggtgtgggggaggggtctgatagctgcctagggtggtgggggacaggcctgagctgacagagagaaggaggtggtgttggggagggacaggggcctgctccagttatcagtgaggcaggacgtggtcccccctgcatagatgtggaaggggaggtctgagagaggaagtccaaagtctcagagtgagccaggcacacacctagcctgggatacatgtgcttctgactcaaggcccccggctcagcccactctgcagagacagagtgctggccagagagagttcccgagggcaactgggagaggtgggctggaggtgggccaggtgagcttgggttgcttacagctgggggaaagctgaagggtaggagaaagccagaggcgggaaggctggctggagggctgagtcagcgtcagggagcaggcagcgcctggaggagaggcttcaaggcctcattgcagaactccagccccatcctccttcctatgtcttgctgcgccttcccaggaggtggagggtttgcggcgctctgagcgcaggggtccctctgctggccatgcctggtgctgcagcattccggccccaggtcagagcgtgcctggggcccaggagaggctgtctaggctggcmcccttctgccaatgacccccttaaggagctctggacctttgcctgatccccattctgggcacctcctccttggcaacaggtgtggccaactggagctgttgggatgcagctagcttcagcttatttaagtcagttgtcaagtacccttcctcacccctgcccatccagcttccactgggtcgagggtggggttgccctgggtacttgtggattgccctggtaccagcctgtctagctgcataggtaaggcagcctagtcagacttgagggagcactggcttgagagtcaggcagaccctgtttagccactgactggctatgtgacctttttataccttcattttctctgctataaatgggaaagaattaatcctatcttgcagagctgtagtgaagattatgtggcatgcaaagcatttaggggtgtgatyggcagttattaaagcttatttcctccctttcactcaccatctgtggttgatggtgagccactttgaggcacgcagagaggggcccctgcctccctagccagggagtccacaccagggttgggctttggggagggggagtgggggcagctgtagctccttctgacagtgggggtgagttgtgggcactgactgtagggaggtccccttgtgcctgggcaggaggcggacctgagayggacagtggaggagagcagccgcatccagcggggctacgggcactactttgacctctgcctggtcaatagcaacctggagaggaccttccgcgagctccagacagccatggagaagctacggacagagccccagtgggtgcctgtcagctgggtgtactgagcctgttcacctggtcyttggctcactctgtgttgaaacccagaacctgaayccatccccctcctgacctgtgaccccctgccacaatccttagcccccatatctggctgtccttgggtaacagctcccagcaggccctaagtctggcttcagcacagaggcgtgcactgccagggaggtgggcattcatggggtaccttgtgcccaggtgctgcccactcctgatgcccattggtcaccagatatctctgagggccaagctatgcccaggaatgtgtcagagtcacctccataatggtcagtacagagaagagaaaagctgctttgggaccacatggtcagtaggcacactgccccctgccacccctccccagtcaccagttctcctctggactggccacacccaccccattcctggactcctcccacctctcacccctgtgtcggaggaacaggccttgggctgtttccgtgtgaccaggggaatgtgtggcccgctggcagccaggcaggcccgggtggtggtgccagcctggtgccatcttgaaggctggaggagtcagagtgagagcyagtggccacagctgcagagcactgcagctcccagctcctttggaaagggacagggtcgcagggcagatgctgctcggtccttccctcatccacagcttctcactgccgaagtttctccagatttctccaatgtgtcctgacaggtcagccctgctccccacagggccaggctggcaggggccagtgggctcagcccaggtaggggcaggatggagggctgagccctgtgacaacctgctgytaccaactgaagagccccaagctctccatggcccacagcaggcacaggtctgagctctatgtccttgaccttggtccatttggttttctgtctagccaggtccaggtagcccacttgcatcagggctgctgggttggaggggctaaggaggagtgcagaggggaccttgggagcctgggcttgaaggacagttgccctccaggaggttcctcacacacaactccagaggcgccatttacactgtagtctgtacaacctgtggttccacgtgcatgttcggcacctgtctgtgcctctggcaccaggttgtgtgtgtgtgcgtgtgcacgtgcgtgtgtgtgtgtgtgtgtcaggtttartttggggaggaagcaaagggttttgttttggaggtcactctttggggcccctttctgggggttccccatcagccctcatttcttataataccctgatcccagactccaaagccctggtcctttcctgatgtctcctcccttgtcttattgtccccctaccctaaatgcccccctgccataacttggggagggcagttttgtaaaataggagactccctttaagaaagaatgctgtcctagatgtacttgggcatctcatccttcattattctctgcattccttccggggggagcctgtcctcagaggggacaacctgtgacaccctgagtccaaacccttgtgcctcccagttcttccaagtgtctaactagtcttcgctgcagcgtcasscaaagctggcccctgaaccactgtgtgcccatttcctagggaaggggaaggagaataaacagaatatttattacaaatgttagaatatatttcttatactaggaatctcatttgcatttgcatagactatacacatggggtggaaaggccaggcctgcccccatctcgttggtgtggctctgcgtatactacacactcattctcctgctcctcttttcccttagtcagtgtcctttcatcctgattcagctctgccttgcatcaccctcagcctaagggagtgggaaggaaatggggtgttttcttgctgacctgaggctatagggtcacttgccatttcctaccttctctgggggatttgagggtagaggcaggggaagatctgttgttgcagytgcttctgcccccttgatccaaatgaccatcatctctgatggagatgggttgggtacctggccttcatggcaccttcactgctagggatgctcaaggggcaggcctggggcccttccctcctgtctcttctcggtctttcctctctgagcagcctcctacctcccctgcctgagccctcactccacagccctcccaggtacctagcagaggctgtcagtccttggctcacctggaacagggctggggctgggttggaacaggtgtgtgcccccaccacagctctatgactctgttctccctccctgccattgtggactcttgtatttgagggacctcaagagagtgaggaccctaccatccactgtccatattcagtcccagccccagtgcgcttcctctgttcyctccctcagccatccaattcttgagttttctcactgattggttttctttctttttccttggattaaatgtgaaagcaaaggcttctggctctgcttttctttggttggggttggatggatggctttgggagagagtgagagctggggagcacagcacagatgactactagaatggaagtcagagcaacatgtcttgttttctgcgatgtcttcctttcctctgtcttgcccctgcacactcccccatccccagaagatgctccttctaagtgcttgtacccaaggacatgaacagacatttctcaaaagaagacatacaagtgacaatgtatgaaaaagtgctttacgtcactaatcatcagagaaatgcaaaccaaaactaccatgagttaccatctcacaccagtcagaatggctattaaaaggtcaaaaaataagagatgctggtgaagttgcagacaagagggagtgcttatacactattggtgggaacgtacattagttcagcccccgtggaaagctgtttggggagttctcatagaactaccattcattccagcaatcccatcactgggcatctacccaaaggagaagaaatcgttccaccaaaaagatacctgcacttgtgtgactgtcactatgggactgaatgaaggaggatgtacgccacttgtgacagttactacaggaccgaacaaaagaggacaaatgcagaaatgaaaacaagacaaaagaatctgctttaaagaaggggtccttgcttttgcttctagtgagcaagggccctgagcttccacagccctccatatttattgggtagaaagagcagggaggagcaggtaacctttggtcagctgcttgatttatcacaggttcacataattgctgacaggcttcatgtgtgcctgtagataatcacaaacactgcgcctgaggtgtgactgccctcagcattccttctgggtggcagacgcagtttgtcagtttgccagcattctgcattatgagaacagtttgctcatacagcctccagtggtatactgagttgatcatgaccctcattctttcggcctccaacatctccccctttttgtttttacattaattgaacaaaatctgtcctcatgttatgggggttgatgtcagtgtgactctggtcagtcctcactctgtctttgcactcagattcaactggctcatggctcataccaggggaaccaggcccatggttgggatccatgggtccctccagtctcctgttccatggttgcacacaccttgagggcacccacatggtttgtccatctcctataaaaacataagcataccctcgtccccacgttagtaaatctataggcagtgggaaacatattctgaggttccttaatgcttttcctacaaaatgctgacatgacgtaggactgctgagcatgccttggggtaaaactttccattgataatgagaaacaggctttctccaatcaacagaaggcacagaaaacaaatcgaggcttatccttctcatgtaagggtatagtaaaaaaaaaaaatctccaagatccattactgccagaggccggtctcttgctcccgtatccataagcccacaaaacttttaatttgcactgcacaagtgggtctactagatgctattggttgtgatagataaatgtccctccgagttgtacttccaaatccttgattcccttgtttcttctttcgtggagaagggtgtaatttgcaggagataagcaacagttgagcaatatattctcccagttcaaaacccaaagatcttgtaacattaccactacttgaatttctccttcataatccaaattaacaactcctgggactacagtaatgccctgtaagttaagacagcttttgcctaaaattaatcccatgtatcctgttggcaaaggtccacaaatcccagtgggaatcttcgtggatttgtctcctccaactaaagtaacacattctttgactgggatacccaatcctgtgcttccaggtgttcctggggagagggaatcaatgtgcctccggaaacccacccttgaaacggagttgtgggctggactggggatgccctcattgtttgaggtgcccacatccaggcccccttctcatttccccacaggggggtgctgttttgatgaaattttgaatggcattgattagcccaatcatttcctttattgcaaaggagggcaaagtcctggtgtttttttctattgtgcgggagggaactgtattataagatcccttctttccagagatctgacggcattcttttttgaaatgtccaatttttccacaattataacactttcccactttagggtttgacccttggctccttttaggtttatcaactactaaactagccattgcttgagccaacattgtagagcgatgaagctcaattcccacatcttgacaagctctgagaaaatttcctaagcttcttgtacatctcacaggtgccagtgcatgcttacaatccacgtttgcattctcaaagccaaagttaaagttagtatttctgcagccacaaaagaagacggtacaggccaatcttcaccctccctctcctattcaccgcccttgataggtgctgtgggtggggcaaaaaattctttcaaattttgaaataatgacaaaaggacagtacagaccaaaccccaaacagaaaaaacagaaagaatggacaaattctgccccatgttaccctgattcagaaacttcccgctcccagtacctctttagggacctgaccttatatcccagtacttttttagggcactgaccttatatccactgccagcagactcgttctggggtttctcgttcgtctggccagtttcactttctctgctccagcggaccctcctcgttcgtgtccctgtctgtccctgtctgtctctgctagtctctacgagtccctgcaagtccctgcttgtctctatctgtccctgtctgtccctatccctgttcatccctgtttgggcaccacttgtgacagttactatgggactgaacaaaagaggatgaacgcagaaatgaaaacttaagacaaaagaatctgttttaaagaaggggttgggggcttcttgcttctagtgagcaagggccctaagcttccacagccctccatatttattgggtagaaagagtagggaagagcaggtaaccattggtcagctgcttgatttatcacaggttcacataattgctaacaggcttcaggtgtgcctgtagataatcacaaacactgcgcctggggcgtgactgccctcagcattccttctgggtggcagacgcagtttgtcagtttgccaacattctgcattatgagaacagtttgctgtttgctcatatagcctccagtggtatactgggttgatcacgaccctcattcttttggcctccaacacacttgtatgcttatcgtagcactattcaccatagcaaagacatggaatcaacttaggtgtccatcagtggtgggttggataaagaaaatatggtacatatacaccatgggatataatgcagccataaaaatagtgaaattggctgggcgtggtggctcactcctgtactcccagcactttgggaggcaaaggcgggtggatcacctgaggtcaggagttggagaccaggctggccaacatagtgaaaccctgtgtctagcaaaaatacaaaaattagccaggcatggtggtgcgtgcctgtagtcccagctactcaggaggctgaggcaggagaattgcttgtattgcaacctgggaggcagaggttacagtgagccaagatcacgccactgcactccagcctgggcgacagagtgagactctgtctcaaaaaaaaaaacaaaaaaaaaaaacatgtcctttgcagtaacatgaatacagctggaggccattatcttaagcaaattaacatagaaacagaaaattgaataccatatgtactcacttataagcgggagccaaacattgggtacacatggacataaagatggcaacaatagacactgaggatgataagaggagggagggagggaaggaaggagggagataagggttgaaaaatgacatattggccgggcacagtggctcatgcctataatcccagcactttgtgaggccgaggcgggcagatcacctgaggtcaggagttcaagaccagcctggccaacatggtgaaaccccgtctctactaaaaatacaaaaattagccaggtgtggtggcatgcacctgtaatcccagctacttgggaggctgaggcaggacaatcacttgaacccgggaggtggagattgcagtgagccaagatcgtgccattacactccagcctgggggacagagcaagactccgtctcaaaaaaaaagaaaagaaaagaaaagataaactacatattgatgacatattgggttctctgtacactatttgggtgacaggttcaatagaaacccaaacctcagcatcacacaatatgcctatgtaacaaacctgcatgtgtaccccctaaaaatctaaaattaaaaaaaaaaatgcctgcacccaggtgtctgcgagcattcatggggctcgaggactcagacatgctgtggctaattcactcagctccacctggaacttgtgtggcccccaacaggtccctctacctctctgggcttcagatttatcttctgtaaaagtgtcatggaccctcccagtggtaacactaggattgcttccaggtactcagaaacaggggccataggtgacatcaaaagagcacccaagggcgatgtttggcaaatccttcagggttaagggatcagctttcttcctaaatgagttattcagcggagctgcgtgccactccttcgggatcactgaggattctcaggagctttggcggttcccttctccctgcaatggccagatgagcaaccacccttattttgatttccccaaagcatccatgggggttcatatcacctcatagttctgatgggaatttggcattgattattaaacacctctattccaaagagcctctgaccattcctagcacaaagaatgtctttctggtcaacttctcttttggtcccttgcctccaccatgttgctgggtcctctctgtcctctctttttttcctctcatttctggacaactttcttcccatttcctggggcattcctggaaactcagtatttctctactaagcaactctgcacttgtatttctgtcccaatccagtggttctcaattctggctgcccgttaggatcacctggggggttaaaaaaacaattgcctaggcccttctccagatcaattagatcagaaggtcaggaggggccaacccttgtaacaaccaccacatctcagcaacttaataactttgttactcatttcttgttcacatgacatctcatgtatgttgagtggtgctactagcattgattcagggatctagcctctttccatcttacgacttcatcttctttttttttttttttttttttgagatggagtctcgctctgttgcccaggctggagtgcagtggcacaatcttagctcactgcaacctccacctgccgggttcaagcaattctgctgcctcagcctccctagtagctgggactataggcgtgcaccaccatgcctgactaattttttgtatttttagtagagatggggtttcactatgccggccaggctggtctcaaactcctgacctcgtgatctgcctgcctcagcctcccaaagtactcaaagtgctgagattgcaagcgtgagccaccgtgcccagccaacactttatctttaatgagtggactccataggtgtcattgaagaggaagatagttgttttttttttttttttttgagatagagtctttgctctgtcacccaggctggagtgcagtggtgcaatcatggctcactgcagcctcaacctccctggctcaagcaaacctcctggctcagccacttgagtagttgggactacaggtacatgccaccgtgcctggctaatttttttattttttgcagagatggggtcttctttgcttc

SEQ ID NO: 95482 - DNA, 17624 bp, Homo sapiens
agcgagactccgtctcaaaaaaaaaaaaaaaaaagtaattcctagttacaagacccttccaactaaaccactaatgtaaaaggtcttatttcttccaggtgtaacctcttatttttttaaaaaagcaactattcttaggccgcgcggtggctcacgctggtaatcccagcactctgggaggccgaggcgggtggatcacgaggtcaggagatcgagaccatcttggctaacacggtgaaaccccgtctctactaaaaatacaaaaaattagccgggcacggtggcgtatgcctgcaatcccagctactcgggaggctgaggcagaagaatcgcttgaatccgggagacggaagttgcagtaagccgaaatcacgccattgcactccagcctgggcaataagagtgaaactccgtctcaaaaaacacaacaaaaaaaaaagccgggcggtggctcaggcctgtaatcccagcactttgggaggctgaagccagcggatcacgaggtcagaagttcgagaccatcctggccaacatggtgataccccatctctgttaaaaaaaaacatatacaaaaattagctgggcgtggtggcgcgtgcccgtaatcccagctactccggaggctgaggcaggagaatcgctcgaaccagggagtcggaggttgcagtgagccgagattgcgccaccgcactccatcctagcgacagagcgagactccatcttaaaaaaaaaaaaaaaaaaaagatgccataaaaaattactcctccaaaaaaaaattccaataaacccacctgtggctcacataaaaagggaagccgtggcacatttatcccaacaaggaagtgtttcatttccaagactgagtttcctggagtaattcagaagtcacttccaccccaaagaagcaggccaccttttccaatcagtttaacattgctactttcaaaagggaggctgctactacgtaaaaggactccatgtgctggactgatcaaggcagcatgagaacttcactctttcacctgtaactcacacatccccaaaccacataagcccctggcaagccctctctggaacaggtttccagtgcaaacatcccctaaacagcaacttccaaatgaccgagaagcctaaaaatcagcacagcccccccaccacacatacacacgcatcagcgaaacaagccactatccctagctcagatacaaactctgccctgaacttactctcccccaaaacaggcaaggaccaatttggtcaccatcccaccgcccttccttggacgaaatcccatcagtgcacatgccctcctaaattccatacctttgccctaccagcagttccttaccctaaacacccctccccataatatttcacccgcccctcctttccatccgggctccaatccatcagccccctcccaccaccaccccctctcctaattactgtgtcccctctcataacgttccccccaaaaagccatccccgtgtcaagccctcctccacccactgatcctcggtaaagccccagctcccgcaaagagagagagacaggatccccaaagctgaccgaagggcccgcgggagggggaggggagctcagggccgtgcgcatgcgccccgggcgccgcggtagccggtcgcccctaggcccggagagagccccagccgccgccgtcgtcccccaccccccgaccaccgcacctacacgccggcccggactcgggcttcacgcagggaaggatacttaaagccagcattttggattggtagtcaaaggctaccacctcgccctgcagccgctgctcctggcacgtccggcacgacacctggctcccaacgctgaagtactcgcccggaggagccgccatcttgggagtgcagccgcggccggcggcggcggcggcagcagcgggcgaaagccgggcccccagtgagcgccgcgacgcgacggcgcgcacggagcgtgcttgcgtcacacgccggggcgtggcctggcgctggttggggcgggatcctaggtggagtgggaaagaagaggaaataaaggggaatctgaaaagtatttgtatagctgcgtccgctcggttaagtgcttgtagagtccattttagaagttaaggataaatgacctacgtggaatgaaaaggggaaagaggagggagctgcagtctccattatatgcacaccttccacacaagagtttaatgaatgaattttataaaatatgttaaccccattttgcatatgaggaatcagagcctcagaggacttaacgatacttggacaagatgattataaggctgggagcggtggctcacgcctgtaatcccagcactttgggaggccgaggcgggtggatcacctgaggtcaggggttcgagaccagcctggccaacatggtgaaaccccgtctctactaaaaatacaaaaattagccgggtacggtggcgcgtgcctgtaatcccagctactagggggactgaggctggaggatctcttgaacctggaaggcggaggttgcactgagccaagattgtgccactgcactctagcctgggcaacagagcgagactctgtctcaaaacaaacaaacaaacaaaaaaagatgattataactactgagtgatagtggaaagaacattggctgtggagttagataagctggaaccagaatccgaggtcagcctcttactaaatcacctgaccttgagcaagcaaattacctgatcctgtttcttcataggcatttgtattgtcacttcttgagcatctaacagccctttgaggtaggaatcaatgtcctccttttacataaactaagttttagactaaacttgtccacggttccacaactagcaaaaacagtctgcctatttccaaggacggtgctatttactgctatactctgttacataataatacctacctcatagttaggaggtttaaatgcggtaacgggtataagtgcatggcatgtactaggtctttaataaatggtagttcccccttagtcacccatcactcttagaagtcaagacacttccccttctccctttttgccctctctcccagaaagccaggcaaaaggcaggaatgaggagcagcggatagtgacaaaaaggggcttggaggaggggttttgcgcccctgcccttgaatgtccgtctgatgtacaaaacagtcgttttcttaatcttatgcaaaggactatgagcgtgcattttcaagccctactaccaccaatggctgtcgctaacccacccaccgctcactatagaaattttggatcctcgcttcatgtataagaaacaggttgacctttctctagtccagagggaagcaaagggccagtcttggcgcggcytaacctgaacaaagttcaaaagtatttccttgccctccaagaaacataaacttcctggtgttggaagtattgatacactcattataataggaataaaaattctgctccttcatagtgtgctttttcagagaactttttttttttttttttgagatagagcctcgctctgtcacccagactggagtgcagtggcgccatcttggctcactgcaacccgcacctcccaggttcaagcgattctcctgcctcagcttccggagtagctggaattacaggcacgagccaccatgcccggctaatttttgtacttttagtacagatggggtttcaccatgttggccaggctggtctcaaactcctgggctcaagcaatcttcccgcctcggctggcctctcaaagtgctgggattacgggcgtgagccatgtggccggcctcagagaactttcatgcctctcatccttgttctggcccccataataaatcatacataattgccattccagttttccactttttatatggaatcgtgattataggttttcatataagacttctaggagccattaggaaaggccttcttggaggaagtgaaaaatctctactgagacctgaaggattggcaaggaaaaagagtggccatgttccaggcagagggaactgcacgggccaggacccctaagaggagagaacttggtgatttcaaggaatgtataggtcagaaatattacaaagcggagtgtgggagtaggctgcttaaggttgagggcaaacctcaaagactcggtaaacaatgtaggctttctcttcggcaattaaaaacttcctggtattgtccgggcacagtggctcacgcctgtaatcccagcactttgggagaccgaggcgggcggatcacgaggtcatgagatcaagaccatcctggctaacatggtgaaaccccgtctctactaaaaatactaaaaattagccaggtgtggtggtgggtgcctgtagtgccagctacttgggaggctgaggcaggagaatggcgtgaacccaggaggcagaggttgcagtgagctgagatcgcgccactgcactccatcctgggggacagagcgagactccgtctcaaaaaaaaaaaaacttcctggtgttggaggtattggtataatcattgtaataggaataaaaattctgttcactacaaaggcaataaacgaagatttatatccagcttccctcctttacacctttttttttttttggagacggaatttctgtcttgttgcccaagctggaatgcaatggcacaatcttggctcaccacagcctccacgtcctgggctcaagcgattcacctctctcagcctcctgagtagctgggattacaggcatgtgccaccacacccagctaattttgtgtttttagtagagacacggtttggtttctccacgttggtcagactagtctccaactcctgacctcaggtgatccacccaccctggccttccaaagtgctgggattacaggggtgagccactgtgcccagcaccttttttattttttatttttttttattttttgagatagagtctcgccctgtcgcccaggctggagtgcagtggtcccatctcggctcaccgcaacctccgcctcccgggttcaagcgattctcctgcttcagcctccctagtagctgagactacaggcgcgtgcccccacgcccagctaatttttgtatttttagtagagatggggtttaactatgttggccaggctggtctggaactcctgaccttgtgatccgaccgcctcggcctcccaaagtgctgggattacaggtgtgagtcgccgcgcccggcaaaaaaaaaaaaaaaaaaaacttttcaagaacaaagttgattgaggtaggaagaaactaaggagacactgttcaacagtattctaggcaggacctcgcctagaatagctgagatttctattttctatgtgagttcccccagatgactgtttcaaactctgtcgcgggtgtgtgccaatcctcttcccataccaacactgttactatctcttggtttcatctgcctaagcagggttttggatggcaggaggatgggggtgggggaagcaagggaagaactggaaggaagtgtgactttgcgctatatgtgagaattcgcctttttagggaagacccctcaaaatcaagagacttatctgtcagcctccagattaatagcaggcgaattagaaagggggagtcttgaggctggggaggaaggagtgaactgattaggggtgtatgcaaatttaggatcccgcttcagctcccaggaggaggggctgtctgcagccttttctccaaaggatctcagatttatttatttttttgctgtttgttttttttttttttttttttggtgggtattggtgctggagaagagaggtccggtggggaaagaatcccggccctggagattatatatccgccttcgcatcagcggagcagggacgctgggagcgcgcgcggcccgccggctagtcagtcccctgacccggaaccgcactggtgccgccgctagccggctgcccacgtgcctgcaacagtggccacgtggggccctgaggaaacgcctttacaaaggtttgtcccctgcgctgcccagtagggaggaaaaccggaggagagcgcaggaggaaacagtaccggctggaggccggtcttgcaggagcgggggactgctgggggcggggcttggtggtgacygctggcggggcggggcctggggctcagaggggtgggctttggagatcagagggtcgacgctgcttcgttgcctggactctggtttccgccctggagcaagccggggcctggtcggcagctgggccgccatggagtccacgctgggcgcgggcatcgtgatagccgaggcgctacagaaccagctagcctggctggagaacgtgtggctctggatcacctttctgggcgatcccaagatcctctttctgttctacttccccgcggcctactacgcctcccgccgtgtgggcatcgcggtgctctggatcagcctcmtcaccgagtggctcaacctcatcttcaagtggtgagacagagaagccctccggcatcctggtccccacccccgagggccctgagtcatgtgtaagccctggtctctttcagcaactgtctcaagggccttcccacccctactctgtagtccctgattttttttccccttgagcatctttgtgcagcttggactcaaacctcagagtccaaccatcctactcattagaccagtgttcttcaaactggtctgatggaaaaatcacctaaggggcgtgtctaaaatgtaaatatcccatcctcatctcacacttactaatttagaaactccaaggggttgggaatttattttttattttttatttttggtttatgggaattcatattttaacaaatatggtgatttaagtagtggagagtcctacctctcaactcactttttcattcatgtattcattcatttgctataatttttcagaagcatgctttgtgctgggcatcacggtagctgctaaggacagagacaccttgcagattaaggtgtggtccctggaccatgcccaacggcataggcagcacttgaaaactggctaaaaacgcagactctcaggccccgrgccagagctactgaatcaaaatctgcattttaacaaggttcccaggtgattccctgtgcgtatgcagtaaagtttgggctaaagcaytgctttccagggaacactttctcttctttctctttcattcaccagtagactcttcacactgagacttagaagccaggaatcccasggacatgggtggaggccctgtggcccctggggctgggcatgcagccacacctcccttcacctcagmctctgttgccagatcctcagcctgggggaargaagggaggctcatakgaggtatttcaatgagctggaatgacttgctgaaaaacaacatagagttcccctcccttccactcttttccacgagggcctcatccttatgtaaagggaaccacagtgatctgttcacttctttcttgcctaattgccctttgctttgtgctctcctctctcaaagtctgtataagcctccccctctattccttgtcccccaaagatcacaatctccttcagacactattaatgtcccccaagtggcaaagtccctattcattttcattttctctttttttttttttttttttttgagacggagtctcgctcagttgcccaggctggagtgcagtggygcaatcttggctcactgcaaactccgtctcccggcttcatgccattctcctgcctcagcctcccaagtagctgggatcacaggcgtgtgccaccacactcggctaatttttgtatttttagtagagaaggggtttcgccttgttggccaggctggtctcaaactcctgacctcaggtgatccgcccgcttcagcctcccaaagtgctgggattataggcgtgagcaacctggcattctttttttttttttttttattctttttgagatggagtcttgctctgttgcccaggctggcgtgcaatggcatgatcttggctcactgaaacctctttgtctctcaggttcaagagattcttctgcctcagcctccccagtagctgtgattatcggcacccaccaccacgcccggctaattttttatttctagtagagacagggtttcaccttgttggtcaggctggtctcaaactcctggcctcaagtgatccaccctcctctgcctcccaaagtgctgggattacaggcgtgagccaccgcgcctggcaccgccgttcattttctgtgtgagcacttgttgtatatatactaggctcagttttcagaggggagaggcaagtgccttctgtatatccctccccagcacgtggcttcctgccagcatctcttttgctatcccatcttttctctttctggccacagcagcctcttcattgtgtggttcccagggcccagccaagcacttgctagaccagaggattttgacatttttttgtcctccttattctttctcagccttctctgtccatttcccacccccattttcagacctgagaggctcacctaaataatttaggtgtggataattcaggctgtaactggggacatggaggcaggggtagcaggagggttagtgagggcctggaggagagagctgggtcctggactctctgtggatgataagagctggccttgcagtgagagggggtagagtgggacggctgagtatctcagagcacacacacggcttaccacaatctcttgcctctgtatcagttttattttttattttattcactttttctttttttgagacaggatctcactccatcaccaggctggagtacaatggcacaatcacagctcactgcagcctcaacctcctgggctcaagtgatccttcccacttcagcctctggagtagcagggactacaggcacaccccaagatgcctggctaatttttgtattttttgtagagatggggttttgtcatgttgcccaggctattctcgaactcctgggctcaagtgatctgcccgcccagcctcccaagtagctgagactataggtgtgcaccaccacttccagctaattttttgtttttgttgaatctgggtcttgctatgttgcccaggctggtcatgaactcctggcttcaagtgatcctccagctaaggcctcccaaagtactgggattacagtcatgagccactgtacctggccccagactagtttttaaaaatagtgtttccacaggctgagggttaggaaaaaaaaaagaaaagaaatagtgtgctttctttctcctgttctaaggtagaaaaccatggcaaggtatccatggataccttgagagcagtggacagaatcgtagtccctttttgacttcacccctcaggccctccagagtactctgtgtcctgcccgccttgtacccscsctggctgtgtgtgcatgtggaaagtcatcttgcatctgttctcttccaggtttctttttggagacaggcccttttggtgggtccatgagtctggttactacagccaggctccagcccaggttcaccagttcccctcttcttgtgagactggtccaggtgggaagcctcaaacattctccctttcccaatgtggttagggttcgggtgaacatttcagagtacttttcagcctgggtggcccaaccaaaggaccagcctctcaattactggcgcagagaacaaaagaaccccagggagaccaagctgagttatgggaggagggcactcatgctatgtaccagctgcccaccttgtatagaggacagccaagagacacagatcaggacagaaacctgagcacagtgacctcaagtggcagtaaaaaggcctcagagcagagcgagttatgaatcagtgctggggaaaagctcttctcagccaggaaaggcagctgtattattgaggcatcaccaggggccccggggttctgcctccatcttctcaccacgagcttctggatttgctggcaggcagcccttctggacactgcatgatcacaggagcagccctctggcccataatgacrgccctgtcttcgcaggtggccactcgggcccgcaggtatrcccttggcattgcccaccattgggagcaggggtgatggcaccctgtacctaatagacacagcagyatggcagcctgggagctggagttttggggaccctaggttgtgtggttcaaccatggagtacctgggtgctgcaggaggccaagctgtgtatggacacgctctgagctccttgcctctcttctttctagccgctgggtaagggtgatgcctagcctggcttattgcaccttccttttggcggttggcttgtcgcgaatcttcatcttagcacatttccctcaccaggtgctggctggcctaataactggtgagcaactggggcaacggggtggactgagaggatgcctttggcagtgggaggawcagtctaggatcttcccatcgctcccagcttctgtagagcccaccccagaggccccccgttatgtctcagtttattctcttgccaagctgcactgcagctgggggtcggggtggggagggtcatatccccagactccttgaagctgttgtcactccactctcctaggcgctgtcctgggctggctgatgactccccgagtgcctatggagcgggagctaagcttctatgggttgactgcactggccctcatgctaggcaccagcctcatctattggaycctctttacactgggcctggatctttcttggtaagtctcgctttgaagcctgggcaggctgggccctgtcctatctcgcctgcacctagcctggtgtgtctstggttcattatagctaaaaaaggacacattacctattcacatagaccctcacaggcacaaaacagaacatgggagtgggccccaagggcagatggccaagagccagtggccttctatgttccagcctctcctggcaagaactcttcttccccacaggtccatcagcctagccttcaagtggtgtgagcggcctgagtggatacacgtggatagccggccctttgcctccctgagccgtgactcaggggctgccctgggcctgggcattgccttgcactctccctgctatgcccrggtgcgtcgggcacagctgggaaatggccagaagatagcctgccttgtgctggccatggggctgctgggccccctggactggctgggccacccccctcagatcagcctcttctacattttcaatttcctcaagtacaccctctggccatgcctagtcctggccctcgtgccctgggcagtgcacatgttcagtgcccaggaagcaccgcccatccactcttcctgacttcttgtgtgcctccctttcctttccctcccacaaagccaacactctgtgaccaccacactccaggaggcagccccatccccttccagcccctaagtaggccctcccctccctaaatctgcttccgcaccacctggkcttagccccaaasatgggccttctctctcccagataagttggtcctccctctgcctttcctctcaagcccccaaagagcaaaggcaacagcaagaccagcgggttcttgcaacactgtgaggggcagccagggcggccccaataaagcccttgaatactttgagattcctttcttgcctatgcgcacatctccatgggccttgcctgtgtgtgcacaagtggaacctttgccaggctgctccagtagtctctgtgccatctccagccctgtttccaggggcagagaggcaggaaaggagagggctgtaaactcaggtgagacctctcagccctgggtcccctgcctcatcactgcctaggccacatgagaggtcccatgagatgctgtgactatattcggtataaccctgtcttttcacttacaggacagatcttgcgccccaacctccagtttcctaaatcggcttctagtccaggggctggagaaaagagtagtgtgtttggctaggaaggaggatgagaacctctactccatttgggagcccagagaatagagacattggccccagaaggcactgccagaaacaagtttatttacacaaggacacacagtgtaacgggttacaaaatacttaactgaaatccatatccagggagacaaagcaaggagtgggtttacatgagaaccagaccagccacagggagagagtgggtaaggggccgggagcctggggctcagcacagagaggcctagtacactgagcctggccccatccccatcycccaggaggatctaaaacaaacacacaagcacactatgaaccgatggtgctgggactcctgcccctcccctggctccctcaatcctgctcaggcccccataggataataaatatgtaaacagattggtggggccctggagatagaaggagagaaagtatatgtggtactggggaggaggaggaaggaagagtcagccccmtaggagccacttcccatctttggtttcctacaggctggatggcatcccctggaagccttgtaggcccacagcccctggcagggctcctgggaaagagaagggacagcgcccagccccctcctggtcttagctcccttgggctggtggtcagcaaagggagcccagaaggtatggaagctccagctgagagccgactcctggatccctgggttctggccttaccccttctagaacctccattctcaccatccccaggatccaaaacaaaaggccccaggagggaggtgagcctctgccccttctccccgcagcatgctggatggctgggaaaatctggtcctgacagcaggggggctctcaccagcctggagcccctctgcagggaccaccttctccccttgcccaggctgtgccagcagaggggcagggaggccatccgagtaaggtggggagcagacctggttctgttactcctcctggcccctgagaacccaggaaaccagtcctctccttccccacacactttcaccctctcagccccggggaaggggaagtaggctgtgaggagtgtgaggcaagacagccctcctcacagactgcaggccwcagcttgggcaccagcctcccatcagtgctgagaccaagaggaaggaggaggagaggggtctgcagagatggtgaggacgaaagaaggggaaagggtggagaatcgcagggtgggtgcccacctcccctccactctgcatcttaaagacagtagtggatcctccagatcctcccctgaggctggagaagggaggagagtgaaattaaggcatttccccccaaatcagctgaaaccaaggcaccgacttcccgttccctcctcactcggggggccccagaactggagagtactgtctgggcccccgtgcccaccttgagctggcccaggctccaaggaggaaaaggacagacagaatgcaggaaaatgggtggagggacacatgggacagggctgggaagacaccaccaccccctgcagagggagcaggcttctagagctgaggtggaagccacagggctgggggcctgaggcagcgtagaggagcaggaggggcaaggctgagagacccacacggcacaccttgttgaatgtgtgactttttgtttttaatagaaaaaataaacaaaatcacaatggtgaagcccagagggatgggggccggggygtcacagggcaggctcctgctccatgggctcctctgccggcctgtggggcaagcacaggggagggtattgagtggggcgcaccagcaggggtgagggcagagaggtggtgcgggttgctgcttacctggggctgtgttcccgggctgccgcagcctgggcctgctcggcccccaccgacagcaaggccatggcgctcacagtctcggcctcctcggtctcacctgcttgggcctctcgcagggaccggcccagaccagcggcgaacttctgcacacagctccagtgtttgcctgtggacgagagacaggcaaggggtcrgggagggcagaggacacccacatgaacagtcccagtcctggtgctcccacaagctccgtgcccccttggcagcctgagcccctctacgtgtcctcacgcactctggatctcgatgactttctctagcgtggccactgcgttgatgttgggcttttgctgcaagactgcctcatccaagggctgcagctggcaggggaaagaagagaaggcttagggtggggagtagggttgccatgcatacccctctaactgccccactcagccccagatatccctcacaacaggggcaaacatggcctttttggacaaacgcatactcagaaagcctggccattagctgttccttaggaccaaggaaaagcttcctaaggggctcccagtgctggctgaccccttgctggcccctcagccctctggcctgccacctcccagctccttcccaccccttacctctacactgagcagagccgagacacaagcctcagaggcatcacagatggcggtcaagtcatggcctccctccagggccagcaccacccggccccctgccagggtcatcagctgcctggtcaagtggccaaaacctttgaggatgggtgaagggaggaagaagaaatggcgaaaggtaatcaatcaattcaagagccagtaagaggagagaaaaaaggccaggcgcggtggctcacgcctgtaatcccagcactttgggaggccaaggcgggcagatcacaaggtcaggagttcgagaccagcctgaccaacatggtgaaaccccgtctctactaaaaatacaataattagccggccatggtggcacgcgcctgtaatcccagctacttgggaggctgaggcaggaggatggcatgaacccaggaggcggaggttgcagtgagccgagatcacgccattgcactccagcctgggtgacagagtgagactccacctcaaaaaaaaaaaaaaaaaaaaagaaagaaaaggagagaaaaagaaacacaagaggtgggacaaatagcacaaaatgtgatgggagatataaacccaaatatatccataataaaatacagcatcagtgaactaaatgccctatcacagtcaaaacattaacagactggctgaagactccaatccaatgacaaggagcatcactgaaacaccagggaccaacaagcccatctctacagctccggcaggatacatcctctatcctctgctaccccactgccacctcctatcccctcaaggccggggttggcagaggacaagttgggggagttaccaagatgattccaagtctaggccctgccccctgctttccccgtctgctgcaatatcagtctgttccctgccccatgcctcactggactcgatatcctcactgtttcacttcctccctcaatcccccagcaggcttacatctggcggtgacagagtagccacccagaggagacagatgtccttcaacagcatcaaacccggcggagactaggaccacatcaggtgagaactcgtgggcaatgggcatcaccactgtcctgcaaagggatggctcaagctgagcccggcagatgaccaggccaggcctcgccccactgttatcctcccagagacaaccccctctacccacactgaactgagtgccttctgcccctcccactgcagggcccagaggggctcccattgactaccatggcccttttcagtccctacctgaaggctgtaaggtactccacgtctccaatgggggggtccacacctcctgtccatgccacgttcacattgtaccccacgcctggtcctccaccaacctggcaccagagttggggagagggctattctcaccacctgggagtcccaaacattgcccctgccctcacccctgcctccagatctcactccactgacctctgctctgcctggaggggcagtcagatcagtgtggtcctcccactaggagcccagactccccaggtaccaacaccaccatgggcctccgtggctccccgccaggtcccattgtgccayctcccagaggggccaggagggtctgcatttacgcccaggagctgtacctcttcaggagccccagagcctggaaagaagttcccgttgtcatagcgatgcagagagatgtagagcacagaggggtcattrtagaacgcctgctgggtgccattgccatggtgaatgtcctrtgaggggaggtagaagcatcgggaaaatggcccgcgctctgacccaatggtcaaattccacctgtcagctgagcactgtagctcatgcctgtaatcctagcattttgggaggctgagggctgggaggatcgcttgagcccaggactccacccttggccacagggcatccatattctgttcacaatggtattgcacaccccacacttctctaactaggtctgagcctctgtggggtggcactgtgtaggtgatattcaaaaccatgggataaatgtggcatatctccctacagaacccattccacctcacagttttggggaaaacattaaggctagtagggaatttaaaacaggcagatgagattctttcttttttttttttgagaccaagtttcactcttgttgcccaggctagagtgcagtggcacgatctgggctcactgcaacctccacctcccgggttcaagcgattctcctgcctcagcctcccgagtagctgggattacaggcgcccaccactatgcccggccaattttttttgtatttttagtagagatggggtttcaccatgttggccaggctggtctcaaactcctgacctcaggtgatccacccacctcggcctctcaaagtgctgggattacaggcatgagtcactgtacccggccttttttgttttcctttttcttttctttcttttttttttttttttgagacagaatctcactctgtcatcgaggctggagtgcagtggcatgatcttgactcactgcaacctccacttcccaggttcaaggaattctcctgcctcagcctccccaataggtgggattacaggctcccgccaccacacctaactaatttttttgaattttcagtggagacagggtttcaccatgttggccatcctggtctcgaactcctgaccccaagtgattcacccaccttggcctcccaaaatgctgggattacaggctttgagccattgtgcccaaccacaagcacgtaagattctgaaggaggatccaacatttacatgaatttttaagccagaattgggcttccaagagattttgtccttcctgaggcttggtcctggctacttccccagctcacagagagtggtgtgtgcctctgcctccaccattaggagcagggtttgggaagcacccatggtagcaagagcagagtgctggggccaaaagccttggtctgaaacccagtgccgacatccccagctgagtggccttgggtaagtcacgcaacaacacctttgttcacagaaatggacatcctcgttcttactactcgaggtggccataaagtactcattgtgttcctggtatacagtctgctcctaattgtagggggtgggaggaaatatcggctactagcaatggcggcagcgtcactaccgttcaaggtaggaaatccccttcgttgcttgaaactgcaacgt

SEQ ID NO: 95483 - DNA, 28244 bp, Homo sapiens
tatttgaccagaggtgcagcctagctgccattcttcctcaccctgtggaagacattaaagggagaatgaaagtagctgtagaattacctttgggggaagaagccacttggtgaacttggcaaacacccgtgtttgaggggtcacccagggtgtcatgagctgggccggaggggatggattgattacttgtcttgtttgcttgtttctgttgtaagtcagggcccctcagcagaaggcagaacagaaccgagttcctttagaatgctggtttttgtgtggagtgaggaaggaccgtgagtgtggtcagtttccaacctgacaggacctgctcccgttggccaggactgcagcttgttactttgaccctgggaagaaggtaagtgttcccaagaaaagggacgtcccaaagcggcgccatcccgatggcacgtgtgctgctcgactccctgccgggtaggtccatcctgacggcgcatgtgcccctcagctcccccgactgggtaggtccatcccgacagcacctgtgctgctcgactccccccactgggtgggtccatcccgacagcacctgtgccgctcgactccccccactgggtaggtccatcctgacagcacctgtgctgctcgactccccccactgggtaggtccatcccgacagcacctgtgctgctcagactacccgccgggtaggtccatcccgacagcacctgtgcccctcacctccctgccagacggtgcgtgtgccgcttggctccccaccaggtaggtccatcccgacagcacctgtgccgctcacctccccaccgggtaggtccatcccgacaacacctgtgccgctcacctccctgccgggtaggtccatcccgacggcgcgtgtgccgcttggctcaaggccctgacatcgttccactcagcacagcatcaggtgcccgggaccctggacatcatcgttctgtgtcagcacatcaggtgcccggggcccggacatcatcgttccactcagcacagcatcaggtgcctgggaccctggacatcatcgttccactcagcacagcatcaggtgcctgggaccctggacatcatcgttctgctcagcacagcatcaggtgcccgggaccctggacgtcattctgcatcagcacaacatcaccagtgacgagagcctccccaagtggttgacgggaaggatggttcggtcctccagaggcggtggccttctcttcctcgatgacattgccgggctgcaccttgtgagaggccgtcgctgagagtgcagccaaatggaaccatcaggaggggtgtctcgggggtgtcgaaatggtaaacagtagtgggtagttttcagattttgcaatgctgcggtatgtgtcagctttttattttttattttcttttttatttaattttaatttttcttagacagtctcactctgtcacccaggctggagtgcagtgacatgatctcggctcactgcagtctccgcctcccaggttcaagggattctcctgcctcagactccccagtagctgagattacaggcacctgccaccatacctggctaatttttatatttttagtagaaatggggtttcaccatgttgatcaggctggtctcgaactcctgacctcaagtgatccgcccacctcggcctcccaaagttctgggattacaggtgtgagccgccgcgtctggccccgtgtcagcattttaaatttgtaagttgatgcaatgcttattctaaaatatctaattttgtattattataatatatgcatgttatatatttttatatatacacactttttcataaagggctatcaaaatcctataggcttcaggcacaatagatgcccttgcatctactcagagttgattcttctggattattctgtccatgagagaccatatgcatgtcatcagaggatgaacttctcatccaaagctgtgctgttttctgggctggctcagctggaagagatgggggaggggataggttctgatttggaggcatagttttttgttttttgtttttgaggtggagtctcactctatcgcccaggacatctgggagtgcagtggtgacatcttggctcactgcaacctccaccctccgagttcaagcgattctcctgcctcagcctcccaactgggattacaggcacctgccaccgtgcccagctaattttgttttgtatttttagtagagatggggttttaccatcttgggcagtctggtcttgaactcctgatctcgtgatccacccacctcagcctcccaaagtgctgggattacaggcgtgagccaccacgcccggcctggagacatggttttaagggacagctgtgtgctatgtccttgcaggctgctgtgttgacatctgaaagcacagagggactgggctctggacacagctccgagactcctcggtcaagggaacagctggaagaggtttgttctctttgggcagccgtgaacatcgctaggacctccggggaggaagtccagggaaatggtggttgccctgagctcccatccaggactctcagttctcatctttgggatcttgggggcaatgtggctccactttttatttcttactgtaagtgggattatatcaaaacacctaatctaacacagtcagagcgtcagcttttccacagaagtgaatctttagatacctgaagacaagccttctgtcccaaagcgttttacttttcatccttttaatgaaagtgcgcctaaagcggccaggcgcagtggctcacgcctgtcatcctagcactctgggaggccgaggtgggcggatcacctgaggtcaggagttcgagaccagcctggcaaacatggcaaaaccctgtctctaccataaatatgaaaattaactgggcgtggtaacgtgcgcctgcaatctcagctactcgggaggctgaggcaggagaattgcttgaactcgggaggcggaggttgcagtgagccgagatcgtgtcactgcactccaacttggagacagggcaagactccatctcggggtggggaagacctgtatcttggaaagatgatgtaggggtgcactgtaaggggtatattggagggggaattccaggcagcagggagagggctggcgggggctttcctgtgagtgggtaagcaggactgtgagaagggcaaaggcccaggagccatggaggggccaggacagggtggtgagagagagggagcagtgccaccggcttgtccacgtatttcactgaagcctgtgccacgtctgcacatcccacctccacccatccacgcctctgcctgaaccactccattaaccagctggcctctgcttggggtggcccaggggagccgagaggagatggggagggtgggtgaggttaggatatcattctcagacttccttcatcaagcccacaccccaggcctgggtggcgccagctctgtagccaggctcagctctgtcctgtggtctccccacaccctgcccatgtctgtgccaggcccctttcttgggtcctccttgattcctccagcttgaggtccacatcccacctttactccgtccacgcctctcctctgggctgatggtaggatcacaagcatgggtggccccgacacctgaccagcaccgcagaccaggccctgtactaagacatccaggcagatggggaaaaagatgggtggtaccactcccagaacgggaaaccggacagagggcaggttctgttttgtttgtgatggagtcttgttctgtcacccaggctggaatgcagtggcgtgatctcggctcagtacgacctccactcccaggctcaagcaattctcctgcctcagcgtcccaagtagctgggattacaggtgtgtgccaccatgcccgactaaaatttttttgtatttttcgtagagatagggtttcaccaagttgatcaggctggtcttgaactcctgaccttgtgatctacccacctcggcctcccaaagagctgggattacaggcatgagccactgcaaccagccgatacaggtcgttttaaaaacagtattatttgcacaccatacaatttacactactaattctctaagaaacttgggatcacttaactgccctgcccttgaatcttcaacagctcttaaccccccacatagaggacttcctagcctggtgcctgcatatctgtttcttcattcaggcacctcttctcactgagagacctgagcactcgtacggttctctgtgtgacgcctaatatctgactgtagactcatgagttgtatgaagaaaaattacaaggggctttgaggcagtaacagagaggactgactctagaccacagtgttggaattccaaaaaagagaaccaagaatacagagggagaacgccatgaagggctaaaagctgtcccaggattggaggacccaccagtcctgttcaggggatgacaggagactcaccctgacacctccctggggaatttttcactggtgtcacagagaagaccctaaaagcctgcagagatagaacagtttccacacaaagaataagaactgaaatggccataagcttctcaacatcaaaactggagctggcagcttcttggttcctaaagaacatggtctgatctccaagctggaatttgatacccagccaaactgtcaactaggaagaaagaaatttacagacgtacgagagctcacactggcctgtcaggaaccttctgtcaagatgcgatagcagggtgggcttcagatgagaaaaagccagggactggcacatgccctttctgcagacaccacagtcatcctcctgtcctacctgctgttctgcggcagccctgccactcctgtcaagaggtggctgcttggccgggtgccatgtgtaatcccagcacattgggaggctgaggcaggcggatcacctgaggccaggagtttgagaccatcctggccaacatggtgaaaccccgtctctactaaaaatacaaaaattagcggggcgtggtgacgcgtgcctgtaatcccagctactcaggaagctgaggtaggagaatcgcttgaacccgggaggtggaggttgcagtgagccgagattgcacttcagcctgggtgacagagcaagaccctgtttcaaaaaaaaaaagaggtggctgcggatccccttgccttgattgcggctttggagaccgatggaaggaggtggaaatgatggtgtgtggcttctgaggccaggtcagaaaaggcctttgcttctgccagctctctgggagctctggctctcccagtgctcactcttggaacctggcctccatgttcagggaagctcaggccacaccaggaggccacatggacatgtcctgcttgacagtgaccgctaagcccaggttccagtgatcctggccgaggtgccagatgtaggagttaaggagcctcccgatgaccccagcccagctgagcaagtgggcaggaccgcggggataggcagctcccaaaggctccctccccgcggcaggacccctgcatctctgtgggaaaagacaattgttggggccctaaaaaaaacagatttattgattaaaacctcatgcatggccgggcgtggtggttcacggctgtaatcccagcactttgggaggctgaggcacgcaggtcacctggccaacatggggaaaccccatgtctactaaaactacaaaatgtagctgggcaggccgggccggtggcttgacgcctgtaatcccagcactttgggaggccgagcgggtggatcacgaggttaggagattgagaccatcctggctcacagggtgaaaccctgtctccactaaaacatacaaaaatattagccgggcgtggtggcgggcgcctgtagtcccagctactcgggaggctgaggcaggagaatggcttgaacccgggaggcggagcttgcagtgagccgagatcgcgccactgcactgcagcctgggagacagagactccatctcttaaaaacacaaaaaacaaacaataaaaaaacctcacgtcaaatgacttcagcacggactgggctcaggtgcgcacctgctcgtgtgcacgcgtgtgtacccacgtgtatgcatgcatgggcgcgcgtgggcattcctgtgtctcaagtccctttcccaggacatcctggaatcagcagccccaccctgggccgggtcagcgcgtgccatcggagcccccacgtcagcctctctctccgatcggcacctggcrtcccagtgcgcaagccccacgtcatcacgggggccgctgggcccggcctggtctgcagtgtgggaagccggccaggcctgtgaccagcgcccgggccgagggccggacctgcgtccgctgcggggcagggataccgggtccctgcagggagcwcaagccccagcgcgcccgcgaagagctgcgcggactcccggctgcttcccccgaatcccgggcgcaggaagcgcgaagccggacgaacgcggggagcgcgcggcgagcccgcctgaggccgcccctcccgccgcccggggtcacgcgccgcgcgctcccgccccgccccgccccgcagcgcctcagccgacaggggcttccgagcgagcagagtcccgcgccccgcactccatggagcagctgctgcgcgccgagctgcgcaccgcgaccctgcgggccttcggcggccccggcgccggctgcatcagcgagggccgagcctacgacacggacgcaggcccagtgttcgtcaaagtcaaccgcaggacgcaggtgctggcccgtgcgcaggcgggggctctgcgggtctctgcggggcctgggraggcggaggggtcgggggcaggcgcatttcctggggctgggcctggggaggggtcagctttggcccttgggaggtggcacctgctgggtgagcccggctsaagcgttctgtgaaggtttgtgtctgcacgatccgtgaccttcctttggcctccatgcgcagcgcacaggcttctaggggtggttttaactttyctatccagcaagcgtcgggggatgtgaggcttggggtccttggctcagctctgggccgcccctctcagcccaccgtcctcctggcagtgggaaagaagcagagacatggctgggcccctggcagggaccccacgggccaggccagcgttctccttcccacaggccttgtctgtgtttagacctgatttctatctcctgctgaaaatagttctgtttaagaatgtatggaaggccgggcgcggtggttcacacctgtaatcccatcactttgggaggccgaggtgagtggatccctgaggtcaggagttcgagaccatcctggccaacatggtgaaaccccgtctctaccaaaaaatgcaataattagccggatgtggtgccactggcctgtaatcccagctactcgggaggctgaggcaggagaattgcttgaacccaggagatggaggttgcagtgagccaagatcgcgccattgcactccagcctgggcaacaagagsgaaactccgtctcaaaaaaaaaaaagtatggaaaatgttaacggaggaagtggagaaggttagcttcagccttgagagccggcaggtggagaaaggcaggcctgggtgccctcccggcccgagtgggctcagaaggccctgcacactctggtgggggagctctctgaggggcagcaggggtcctggtggggagtgctggcaggaggaacaccagagccatgcagcctgggcgtgcgatcggatcctccggcatcacctgctctgccggctcagaaccaaatccctcaaagtggggagtcctactcacagggaagcagtttttggttcaggcttcccacgggctctgggaaacttcctcagctggtcctgaaagctctgcagggtgagacccctccttccctcccacccccacgaggggccggcacatagtagctgctcagtccatgcataagagcaggtgatgctggggcccctggggcttagcagccccaaggccgggagttcctggcctggtgcatggggggctcgccctggagcagggctggggtgtgccggccgccctcccacctgtggacactcacacccaccctcggtgcaggctggccagggctgccaggctggggaggctgtgcctgggctttccctggggtactttgaaggaaagggcgttctgttcgtgtgcaccagcagatgctttggtctcattcatgaggtttgatttttttaaacatgcagtcctacactttgggcgactgaggaaaggtggatcacttgaggccaggagtttgagaccagcctggccatcatggtgaaattccatctctttttttttgagacggactcttgctctgtcgcccaggctggatctcggctcactgcaagctgcgcctcccggttcactccattctcctgcctcagcctcccgagtagctgggactacaggtgcccgccaccttgcctggctaattttttgtatttttagtagagacgaggtttcaccgtgttagccaggatggtctcaatctcctgaccttgtgatccgcccaccccggcctcccaaagtgctgggattacaggtgcgagccaccacgcacggcggtggaactccatctctagtaaaaatacagaaaaacacagcggggtggggtggcccacacctgtaatcccagctactcaggaggccgaagcaggagaatcgtttgaacccaggaggcggaggctgccgtgagccgagatcatgccactgccctccagcctgggtgacagagtgagaccctgtctcaaaacaaacatgcaattctataggccaaggtattcatggaccacgttcgtcaatgcatgttttcaaccaatgtgtactgtacgtgaggtgagtgttcacctaactgaaaactggaatgtttgtgggaatatttcagaaacaggaaggcccaggtcccacgggaggcgttgggggccggccgggygtgccgtgccttttaccttcccagcccctgccctggacctgaggccccgcctgatgggcccagccctcttcttccctgcctgacgtgtgtgcccaagttagctccagtgaggcctctgctgtggctgccccaccctaagaggcagcaaggaaggtgggtagcccgggggtccagctctggaccttggttcactcacacctccccacgccctcagtgctcccgggcacccacacgtggcctgtgcatcctcctgtcacagcagcctgcrgaccccacacccctcacggcccaggctcagcctcagccttgcagcctctcgtctccgacggggggcccctctgcaccctgccctctgtggtggacgccagctcccagccagagccagctatcagtgaatgaaggtccttgtgactcccacgtggtagcttctgtcaagggcccagtgggcagaggccctggctgagtcaacaaggctgacaaggctgtgttctggatgcaggcccggcagatgtttgagggggaggtggccagcctggaggccctcmggagcacgggcctggtgcgggtgccgaggcccatgaaggtcatcgacctgccgggaggtggggccgcctttgtgatggagcatttgaagatgaagagcttgagcaggtgagtgtgtgtgagacccatatgcrcacawgtgtacaggcagagagagactcagagacaaacagagagagacagagaaagggatagagatggggagggagacagmaacagggagaagcctgtggctgagccgtccacacaactgcccggttatcagaggcagggccaagagttccaccctgccattcttaatggagataaaaagttactgctttctggtatgtgactggttttcctagataagtttggctgtaatgaggctgcataaaatatatatatatacacatatatatatatatatatatattttttttttttgaaacacagtctcgctctgttgcccaggctagagtgcagtgcagtggtgcaatctcggctcactgcaacttctgcccccagggttcaaatgattctcccacctcagcctcctgagtagctgggactacaggtgtccaccaccacacctgactaatttttgtatttttagtagagatggggtttcaccatgttggctgagttggtctcaaacttctgacttcaagtgatccacccacctcggcttcccaaagtgctgggataacaggcctgagccaccacacctgcccaaaataagtatatttgaacccatcatttgctttgtactttatttttattttatttttccaagacagagtcttgctctgtttcccaggctggagtgcagtgatgcaatcttggctcactgcaaactccgcctcctgggttcaagcaattctcttgtctcagcctcgcgagtggctgggattacaggcaccccaccacctcacgcagctattttttttttttttttttttgagacggagtgtcgctctgtcacccaggctggagtgcagtggcgcgatcttggctcattgcaaactctgcctcctgggttgacgccattctcctgcctcagcctcccgagtagaagggactacaggcgcccgccaccatgcccggctaattttttgtatttttagtagagacggggtttcaccatgttagccaggatggtctcgatctgctgacctcgtgatctacccgccttgacctcccaaagtgctgggattataggcgtgagccaccgcgcccggcctaatttttgtatttttagtagcatgttagccagactggtctcaaactcctgacctcagtgatccgcctgccttggcctcccaaagtgttgggattacaggtgtgagccaccacacccagtccatctttttcttttgctttktctttccttttttttttgttttttgagacagagtcttactctgtcgcccaggctggagtgcagtggtgcagtctaggctcactgcaagctctgcctcttgggctcaaatgattcttctgcctcagcctgcagagtagctgggactacaggtgtaccaccatgcctggctaattttttgtatttttagtagagatggggtttcaccatattgaccaggctggtcttgaactcctggcctcatgatctgcctgccttggcttcccaaagtcctggtactataggcctgagccactgtgccactatgcttggccctgcattttcacttatcattactttctcagcattcctcccttaattcctggtacctcctaagacttctgttgaagctcacttggttaattcctgtttgtgattacatgatgttattttctggaaagagtctttgccagtgctgggcgtggtggttcacacctgtaatcccagtattttggaaagccgaggcaggaggagaccccatctctacaaaaaaaaaaaaaaaaaaaaaaaaagccaggaatggtggcacaggcatgtggtcccagctagttgtgaggctgaggtggaaggattgcttgagccctaraagtcaaagctgcagtgagccatgattgtgccactgcactccagcctggatgacagagcaaggcctggccccagaaaagaaagaaaaagcaaaagaaagagtcattgcctggtgttcactttttactgtttgaagaatggagaatasttttcaatgtatttaaacctttctcaaaatggaacaaactgggtrgtgttatttattatttgttattttaattagctgcatttcttctttcctcagtcaagcatcaaaacttggagagcagatggcagatttgcatctttacaaccagaagctcagggagaagttgaaggaggaggagaacacagtgggtatgttcagattgcttttgggtacccttgatccagccacattgtctaccctagatgggtgctcatggtacttcttggtggcatttcaataataggttgagttgtataccgtctgtctttacactacattatgaaaatgagattattaaataagaattttgatgtagctgataagctagtagaattggcacatgatcccttttatacccagccctcctgtctggtgtgcttgaggtaataataaccccttttatacccagccctgctgtctagtgtgcttgaggtaggagtgtcctggcagatccatatattgactaattgctactgtatgtagtacatcctcagaccacctatattctagcrtgcgtagcccaggcttgtactgatgctctgctgaggtctggcatttaagagaaagacaaacagctccttcaggccaaggatctctgtcaacaggccgaagaggtgagggtgctgagcctcagtatgtggacaagttcggcttccacacggtgacgtgctgcggcttcatcccgcaggtgagtgcctgggtgagggtgttccctgatgccctaatgctggtcacccactctttatatgtgacagaatgctaatctcccaagcaccagcaagattgactacttgatttctgaaagcagagtagaagctgtgatacctggaatggggagagcagacgctgagggtcactgagctgagctgggcagggtcatgggacatgctggggcaggcagatcagcattccaagcagagcgagcctcaagtgcaaaggttgtgttgcacaaggctcctgatgagtctgagggactggagacagtgggtgatgggtagtgtgcaaagtcagggattaagtgctgattactcagctcctctcctgaggcctttacaaattattatttatttagatacaattgaaatataattcacataagatccaccattttaaaggattagaattaattggtttttagtacattcrtgatggtgtgcaaccatcactgctgtttaactccagaacattttctttcttttcttttcttttttatttttttgagacggcgttttgcccttgttgcccaggctggagtgcaatggcacgatctcgacccaccgcaacatcggcctcctgggttcaagcggttctcctgtctcagcctctcaagtagctgggattacaggcatgcaccaccacacccggctaatttttgtatttttagtagagacggggtttcatgttgaccaggctggtctcgaactcctgacctcaggtgatctgccctcctcggccttccaaagtgctgggattacaggcacgagccaccgcgcctggacttaatgttgtatttttagtagagatggggtttctccacgttggtcaggctggtcttgaactcccaacctcaggtgatccacccacctcggcctcccaaagtgctgggattacaggtgtgagccaccatgcctggccagaacattttcattatcctaaagcagaacccattagcagtcactccccatttccccctttcctggtccctggcaacctctaatgtaccttctgtctctttgaattttctggatatgtcatatgagtggaaacacataatatgtgatcttttgtatctttcattcagcatcatgtttcacagctcttccatgttgtagcaggtgttagaatgttattcttttatggctgaataatattccattctatggctaggccacacgtttctttacatattcctttttatggctgaataatactggagcctcttgaaccatcatctttgaaatctgtgaagttccaaagaagactttggacagcccaactgccctgtgcttcycttgaagaagccaatattggaccatattttggttttgttaggaacacagcacccattatataagagctagttcaaagtcactgcttcttgaagagagaatactttcaaatctgtctcctygtcgacgcccgtcctgactagttgggtccctgcgaacaatgaccaagctctccctggtgtgggtagagggtgattctcccagctggaggtcacctggggcaagatcctcatgaagcccaagcagatttagggttcccagccaacaggcagtcctcacatctgggctcgctagaactgcacatggagcttaccagatttaccgagacccccgagatctcagccacagctggctcccctggggtcacacacctgtccggagccagtgagcagcaccctcttcacctgtccaggtgagcacggctgggtgcagcttgtggtcctgtggtcctgctgtggatgctgaggtcaagggctgcaagtggcgggctctacaggacttggctggcccagcagagtggtgtttcaaagaaatgaagtgaaatcttacccagagcccctgtgtgtgaagcagacgagaagggggctagtctgtttggagcacagggagcccctcaatgcccctcggactccaggatcaaggaacccacctcagatcaggtgcagcctggctaggaagggtgaggcgccagggaggacacctgccctgcttcctgcttgttgtgcctcggacagcaccaggttccggaggcttcccactccttgggagggctcaatgggtcctgggggaatgtgtgctgcagccaatggggggcagtgctgagcggcgggctcctcagacacctgggcactaaggccccctggggctgccagctgggtcggctgtggtgcttgccccatgctctgtacactgccacatacaggcacccttctaagcacttcactgaactcaactcacccacttgccctagcaggtaaccaggcagataatgtcactgatccgttttatagatgaggaaagtgacatgcagagttcatgcctgggtccatggagcttgtcagcggggcagctgggcttcgaccctcagtctggcttcagaccacaggccctgaccatgacgcagcccctctgtcaggggaggcctggtcattgggaccagctgtgtacccaggtggcaccttccccgggtagcttggaggatcacagcccctctgttcaggtggcaggactgggctagcccaggctggtcgcctgcttccagcactaaacctggttgtcttctggaaagagtacagagctcagacgctgggagcttgggcaggcaaatgggaaataacgggaggctgcacggtgcacctctgagctggggatctgacagccaggctatggggaggggcctttccatcctgctcttgaggtgcacacagcaccagagggtgagcccaggggccgagtcaccacagcacccatgtgcagggagattcttggtgggggccactgaccagggcggtcctccccgaaggagttttacaaaataaccctttgtataaaatcagcttcgtatttttctctacagaggtgtaatttgacataaattgcacccatttaaaatgtataatttggtacattttgatgtttgtacctgtgaacctttaccacagtcaaggtgagtatactgattacccccaaaaggttcctcgtgcccttccctgcccctgggcaaccattcattggtgttgtcactgtagattagtttgcatcttgtggaatttaatataaatagaatcatgtggtatgtcttctgtctgcttctctcatgaaggggtgggttgcccctccacacctgtgggtgtttctcgttaggtagaacgagagacttggaaaagaaaaagacacagagacaaagtatagagagaaatmaggggacccagggaactagcgttcagcatatggaggatcccgccagcctctgagttcccttagtatttattgatcattcgtgggtgtttctccgagagggggatgtgtcagggtcacaagacaatagtggggagagggtcagcagacaaacatgtgaacaaaggtctttgcatcatagacaaggtaaagaatcaagtgctgtgcttttagatatgcatacacataaacatctcaatgctttacaaagcagtattgctgcccgcatgtcccacctccagcccaaggcggtttttccctatctcagtagatggaaggtacaattgggttttataccgagacattccattgcccagggacgggcaggagacagatgccttcctcttgtctcaactgcaagaggcatgccttcctcttatactaatcctcctcagtacagaccctttatgggtgtcrggctgggggacggtcaggtctttcccttcctacgaggccatatttcagactgtcacatggggagaaaccttggacaatacctggctttcctaggcagaggtccctgcagccttccacagtgtttgtgtccctgggtacttgagattagggagtggtgatgactcttaacgagtatgctgccttcaagcatttgtttaacaaagcacatcttgcaccgcccttaatccatttaaccctgagtttgacacagcacacgtttcagagagcagggggttgggggtaaggtcatagattaacagaatctcaaggcagaagaatttgtcttagtacagaacaaaatggagtctcctatgtctacttctttctacacagacacagtaacaatctgatctctcttgcttttccccacactctcaytcagcataatcatgctgatatttatccaagtctaaaatcctttgatattcatccrtgatacacatccatgttgcatgtgtcaaaagcccattcccctgtayggatctaacacagcctgtttatccattcacatgtggatggatttctggatcatttccagtttttgctcatacaaataaagccgctgtgaacctttgtgtacaaatcttggtctggacaaatgcttccacttatctcgggtaaatacctaggagggggatgactgtgtcatatggtaggtccatatttagctctttaagaaactactggccgggtggggtggctcacacttgtaatcccagcactttgggaggctgaggcgggtggatcacaaggtcaggaggtcgagaccatcatggctaacacagtgaaaccccgtctctactaaaaaatacaaaaaattaacagggcatggtggcgggcgcctgtagtcccagctacttgggaggctgaggcaggagaatggcgtgaactcgggaggtggagcttgcagtgagccgagatctcgccactgcactccagcctgggcgacagagcaagactccgtctcaaaaaaaaaaaaaaaaaaaactaccaaactcttttccaaagtggttgcaccatgttgcattcccaccagcagcatatgggagttccagttcctccacatccttgtcaacacttgagattttttgttttaaattacagccatcctagtgggcgtgaaatattatctcactgaggttctattttgcatttccataatgactgaagatgtggagcatctattcgtgtgcctgtttgctgacaaaatatcttctttggtgaaccatgtgttcacttattttgtccaatttgtgaatagggttttttttttattattgagttttgagatttctttgcgtatttaggatatgagtgttttaccagatatatgatttgcgaatagtgtctcctagtttgttgtttgtgtattttcttggaagcrtccttcagaggctgggcatggtggctcgcgcctgtaatcccagcactttcggaggccgaggtgggcagatcacttgaggtcaggagttcgagaccagcctggccaacatggtgaaaccccatctctactaaaaataccaaaacattagccaggcatggtggcgggcacctgtaattccagctactcgaaaggctgaggcaggagaattgcttgaacccgggaggcagggaggttgcagtgagctgagatcgtgccattgcactccacctgggcaacaagaacaaaacttggtctcaaaaaaaaaatttccttattatcctttttattgttgttgagatggagtttcactctgttgagcaggctagagtgcagtggtaagatcttggctcactgcaacccctgcctcctgggttcaaacgattctcctgtctcagtctcccaagcagctgggactacaggcacctgccaccacgcctggctaatttttgtatttttagtagagatagagtttcaccatcttggccaggatggtctcgaactcctgatcttgtgatctgcctgcctcggcctcccaaagtgctgggattacaggtgtgagccaccgcgcctggcctcttgcttactttaggtttaatgtgctctttttctggttggttaatgtagcagctgaggtcattactgtgagatctttgctaacacagatgtttagtgctacacattttccccaagtactgctttagtggcatctcacaaattataagttgtgtttttgctttcattcaattgaaaacactttctaatttccctttagacatctttcttamacagattttagaactgtgtttagttttaaaatatttgaggatttcccagaatttttcctattgattttgttttgttttgcttttctgagacggagtcttgctctgtcaccaggctggagtgcaatggcacaatctcagctcactgcaacctctgcctcttggtttcaagagattctcctgcctcagcctcccgagtagctgggactacaggcatgcaccatcacgcccagctactttttgtatttttagtagaaatggggtttcaccatgttggtcaggatggttttgatctcttgacctcgtgatccacccacctcggcctcccaaagtgttgggattatgggcgtgagccaccaggccyggccttcctattgatttctaattgaatttgattatactttgcatgcttaaattcttctcaatttattgagatctgtttgcatggagagagaaatcctactctattcctcttcttataggccactaatcctattggattaataattcacccttacgattttatttaaccctaattacctcctagaggcccttcctccaaatacaggtatattaggggttagggcttcaacgtaggaacgggggtgggcaccattgagtcaatagcaggatatgggatttatctatttttcctgcagttcttttacgtattttgaagctgtgttattagaggtgtaggcatttaggattattatgttcattagtcgactccctttgtgaaatgactatatttgattttctttgctttgaaatctactttgtcttgtattaatgtagccactctagctttctttttttttttctttttttttttgagatagagtttcactcttgttgcccaggctggagtgcaatggcgcgatctcggctcactgcaccctttgcctstgggttcaagcrattctcctacgtcagcctcccaagtagctgggactacaggcccacgccaccatgcccggctaattttgtatttttagtagagatggmgtttccttatgttgcctagactggtctttaactcctgggctcaagggatctgcccacctcagcctcccaaagtgctgggaattgcaggcgtgagccactgtgcctggcctccagctttcttttgactagtgttagcatggtatatcttttctatcctttcaagctttttttttttttagtagataatgtctttttgcacataacttattgttggatttgctttatttttccaacctgccaatctgtcatttaccaagagtatttatttttgacattcgtatttaatgtgcttagtcatatagttttgagtctgtcatcttgcaatttgttttttgtttcatctgccctttgttctctctttacctgccttcctctgggttgagtattttatgtttctgtcttacctcctttgttggcttactaggtatctttgctgggttttgaatggtccctctagggtttaggcagcacttggctccgaattgcaacagtggcctcttttcccttgttgtccaggtgaatgagtggcaggatgactggccgacctttttcgcccggcaccggctccaggcgcagctggacctcattgagaaggactatgctgaccgagaggcacgagaactctggtcccggctacaggtgggcacggcagtgacttctctgggaaagagctggtcctctcatgatcccgccgcatttgtgcgggttcatctryaaaacggagctggagcagggaacactgagtcctggagcacacatcagggaggaaggggggcaggggcgggggttcccccaaaagggagtccgaaaggagtgaggagtgaagacacacttggctcctcgtgcccctctccactgctaggtcaccaggtatttagcctcagactttcctcatgtgaaacacaggtgcttgtaaatggtggtgtttaccatgattactgttcttactatcagtaacacttgtccactccatygtgttcctctcccatgggaagatgtgggtaccagatgatccagaatgactgatttcaaaacataactctcggccgggcacagtggttcacgcctgtaatcgcagcatttgggaggcctaggtgggcagatcacttgaggtcaggagtttgagaccagcctggccaacatggtgaaaccctgtctgtactaaaaatgcaaaaattaaccgtgcatggtggtgcatgcctgtaatcccagctactcrggaggctgaagcaggagaatcacttgaacccgggaggcggaggctgcagtgaggggagattgcaccattgcactccagcctggacgacagagtgagatcctgtatcaaaaagaaaaaaaatcaaaatataactctcaaaatgttaaaaaagaatgtgcatgtcaatccagagtgagtatacatcaaagagacttgaactcattaatgaagaaactaggctgggcacggtggctcaagcctgtaatcctagcactttgggaggccgaggtggatagattttacctgaggtcaggatttcaagaccagactggccaatatggtgaaaccccatctctactaaaaatacaaaaattagccgggtgtagtggcgggtgcctgtaatcccagctactcrgtaggctgaggcaggagaatcacttgaatccgggaggcggaggttgcagtgagccgagatggcgccactgcactccagcctgggtgacagagcaagattccctctcaaagaaaaaaacaacaaaaccaaacaaaacctgcagacatatatgtgtagcgaaataaaagtggccagagtttgctaaggtagcgcaacaytggttcctattctgtgggtcgattaaaactataacctcagaggttctccactgtgtggggattctagacctaaattaggaggaaatcctaagttagacaaagctagactcccctgaagtcaggtggcccctatttctgggcttggcaggcagtgctggggctggacaccgaagcagatcgcgagtgggctttgccttatttccaagaacgaggtgatgagaccggggctcccagaggccagcgataactgcagccgttgctctcgtaggtgaagatcccggatctgttttgtggcctagagattgtccccgcgttgctccacggggatctctggtcgggaaacgtggctgaggacgacgtggggcccattatttacgacccggcttccttctatggccattccgagtttgaactggcaatcgccttgatgtttggggggttccccagatccttcttcaccgcctaccaccggaagatccccaaggctccgggcttcgaccagcggctgctgctctaccagctgtttaactacctgaaccactggaaccacttcgggcgggagtacaggagcccttcsttgggcaccatgcgaaggctgctcaagtagcggcccctgccctcccttcccctgtccccgtccccgtctccgtctccccgtccctgtccccccgtcccccgtccctgtgcccccgtccctgtccccctgttcccgtctccccgtccctccgtctccatccccccgtccccccatcctcctgtccccgtccccccgtccccgtccctccatccctgtcccccgtccccctgtccccctgtccacataccaatccccctgtccccgacccccatccccgtcccccatctccgtccccgtcccccctgccccgtccccgtctccgttcccccgtccccatcctccatccccgtctcccatcgccgtccccccgtccccgtcccccgtccccgtcccccctgtccctgtcccccttcccccgacccctcccagatcctggggaccaataaagcccgcagcgggyctcggctggcgtcctgcgcctcgttcctccgctcgtggggctgctttcagggccagacgcacggcgagctgtgcacggacgtttttgcggcgattcaggggaaacgcacgcggacccggtagccaaggccaaagtcggcgcagcgcccaccgcggcctccgggccccgctcccgctcccgctctggggcgcgccaccactcggcgcggggcccgtgtgatccgcgcgggtcccagcgtggcgcgaataagtgtcagggcggttggctctgaggggtgggtcccggggctcgcctcgcgcccccgactgcgtgctcaggccccgcccctccccgtccacgcatgctgaggctccgccccgctccgcggtcccccggtcccacccgcccccgccccgcccccgccccgccccccggcgtgttgtggctccgccccgctgtctccggccccaccgcaagccctgcccctcccacccacgcgtgcccgggccccgcccccgttgcgcgcagccccgccccctatcgcgtgctcaagccccgccctggcggcccccggccccatcccgaagccccgcccccccgcacaccgcctgctcaggctccgccccgctgtcctccggcggcggcctcaccccgcagcccggcccaccgcgtctcaggccccacctcctgtcctgccccgcccaccgcgtgctcaggccccgctgagcggtcccggctccgctcgcgccctgtggggtccacggcgcgctcttccagagcctttgggacccgtgcccgctcgcgtcctcaagtgcacgcgccgtcccgcgcgcggtattttggcggccgacgcgttccgtagcgaggccggcgagtggggtcggaggtcgcggggcggggccagcgtcggttgccgccttagcgggcgcctccttttcatccctcatccttcatccctggctttcgcgctctagcggagtgggatctgcgaacacgtgaggcgggggcgcggtccccaggctgccgagatggccctgagcgacgaaccggccgcgggcggccccgaggaggaggcggaggacgagacactggcctttggcgcggcgctggaagcgttcggcgagagcgcggagacccgggcgctgctgggccgcctgcgggaggtgcacggcggcggcgcggagcgcgaggtggccctggagcggttccgcggtgcgtgggcggcgccgcgtgcccgcttcctcccccggcccgggttcggcgcgctgagtgcactttaccgggcggggaccgcagcccggcggcgccggccgctctgcgagggctgccggtgcgcggtcccgcgggccgtggtggggcgcggccttcctaggcgggagagggccaccccggcgcggcgttaggtgcacggggcagacgcgcgcctcccttggggggaccgtggcccgcggagcgcctgctctcgcacggggtgaagcctctgcggcctccccgggaggcggggtgcagaagccctccgtcccccgtctccgtcactggaggaggtccctgggctggggagactcgggccagatccctccggacagctggtcagccctgcagtgtggactcccaggcttgcctccaccgagcgcggtttctgtgaatgttgtgtggacagggagatagggaatgagagagggggacgcagggaacaaacctgctgcaaacaaagcgcgcctcgggtggggagggcagcagcctgtccgttccgtggacgccgtggacagagcgggctggccgggtccgtgcctctgcaggcggggtggggtgtaggtacccctgtggaggccattcgatgagtctaaattctccgagttcagacccacctttaccgctgtctataatgggttatttccaaacaagtccttaggagctcatagctaagtagttacatggggttttgtaattcagtaaaatcatctttgtagaccctttgagtaagaagaacttttgcattatttggccttcctcattttagaatgacagcgctttgattttaggagtcaggcagggtggggggccttgtgggaggagtgcgggttcggcgtcagatcctcctgcctgtgaattctggccctgtcgcttggacctgatacttgattgcctgtttcttcgggtgtaagctggggcggataacgatgcctctcgtgcagaactgttctgagggtgagggaccctcatccagggaccagtgaagccagattttttgttcctggtgtaacagcccaatggcttcttccttttttttttttttttttttttttgatacgaagtcttgctctgttgcccaggctggagtgcagtgcagtggtgcgatcttggctcactgcaacctcaacctctcaggttcaagctattctcctgtcttagcctcccgagtagctggggctacaggcgcgcgccaccacgcccggctaattttgtatttttagtagagggggtttcaccatgttggtcaggctggtctcaaactcctgacctcaagtggtcgcccgactcagcctcccaaagtgttgagattacaggtgtgagccactgcgctcggccccagtgggttctttctgcgggctgcccagatagagttgatttgtcagggcaggggagttgccatggagaagatttagttcacgcagagccggttgaaagggagactagactagaggtttttttttttttttttgaggcggagtctcactttgtcccccagggtggagtgcagtgatgagatctcagctcactgcaacctccacaacctccacctcccaggttcaagtgattctcctgcctcagcctcccgagtagctgggactacaggtgcgcgccaccacgcccacctaatttttcgtattattagtagtgacgggtttcatcgtgttagccaggatggtctcgatctcctgacctcgtgatccacccgcctcagcctcccaaagtgagccaccacgcccggctggagttttattattactcagatcagtctccctgagaatttgagggccagggttttttagaggtaatctgggggaaagggtgggggtggctgattggttaggggtatacaatcataggggagtcggaaatgatcctccgtgatgtgctgaatcgcgtctgcgtggggccccaggagcagtgggcgggtccaggtggagctatcatgggtccgtggatcctagtgtaggtgtcagacatggaaacaatctgaaaagatatctttaaaggccagtctcaggttctgcaatagtgacatggtctgcaggagtaactggggaactcgcatgtcttgtgatctcaagaataatggctggcaattaggttacgccttagcggaattcaggctcctctcctcctcctagcctggtggcctctcattaactttacaaaggcagttgagttttggggaagggctcttagcatttaaactataaattaaatgtctcccagaggtagcttggcagcttgaagactaaaggcatgagggggttgcctggatcagatctgccccattgccataatttcctcacagatcacttttgcaaaggcagttttgctgggaagcagtgggtgtgttcagatgtggaggtgggagctgccggattggacagaagcagtttcagctgctgagaggaggagaaagcggtggttcagggtctgggaggttgtgaagagctggcagctgtgtggaagggagcagtgcctggatatgtcaaccaaaaagtatctgagacgagtctcaatcagtttagaaggttaagggtgtgcccgtgaggcagcctcaggaggtcacatgtccccaaggaagtcgggctacagcttagttttacacgttttagggagacgtgagacatcaatcaatacctgtaagatgtacattggtctcgtcagggaaggcgggacatcttgggtgggagggcgtccagggcattggtggattcaaatatttcacgattggtgattggttgaaagagtttatctgaagacctggaatccatagaagggattgtctaggttaagataaattgtggagaccaaggtttttcttatgcagatgaaggttccagttagctggtttcagagagaatagattgtaaatgcttttcatcagactaaaaaggtaccagacttagttaattttctcttggatcagggaaaagacctagaaaaggaagggattctctacagaatgtagcttttcccagcaagagacaacttagcagaaccatttcaaaatatgtcaaatatattttagggaaaaatattttgatttctttcagggcctgctgtctgtcatgtgatgctgtactagagtcaggctggaatttggtgtcttattgctacttaagatcggttttaatgctaatactgatcagctgtgcctgaattccaacgagaggagggtataatgaggcctatgtggaccactccccacaatcccttaatatcatgaggcctgaactagtttttcaggttaagtttggaatgcccttggccaagaggaggggtctgttagatggctagggggcttagaattttgtttttagtttacaggcatgtttggcaggggagtgtgagaggagtgccagggatgtgtgtctcacaaggacagagttgagcttggcccttaacggctggcagaggcaggagagagtgaaggaaggaagaggcgaggaggagactctgttaggaagagtatcgaggcagtgggaaaagaggaacagtgtgccaagcaagtaaactgcacgaggctgggccacagtggccctcaaaaggctagagggaggtggggcattccctccaggtggcctgtgtggcctcctttagtgagaggggaggtgtgctcttgagagctggggaagaggtggagctgccctgtggaagctagcaagggaaaatggggtttctgaggctcatgggtatgtttggcctagtgataattaattttcatgttatatttgtttttagtaataatggacaaataccaggagcagcctcatctgttggacccgcaccttggtaagaatagaagctgctgattttgatcattcagttacagatgaccacggaggccttggtgtgtggtgctggcacatgcatgtgctttgccaggatcaaatgccaagaagtgtccctgtcttgcttgcctggctggttggttttagccgacctgtgatagtggcttgagttccagatgtcactctaggctggggggagatgtgtctgagctacttaattcctttctgctaaggaaacaacatctgctcctcatgtgttttttttgtttttttttcttttttttgagacggagtctcgctctgtctccaggctagagtgctgtggcgcgatctcagctcactgcatcctccagctccctggttcaagggattctcctgcctctgcctcccgagtagctgggattacaggcatgcgccaccatgcccagctaatttttgtatttttagtagagacggggtttcactatgttggccaggatggtcttgatctcctgacctcgtgatccgcctgcctcggcctcccaaagtgctgggattacaggcgtgagccaccgcgcctggcctcctcaagtgtttttagtttacattagtttattattttagtttacatttgggcacatgatgtttttctggtaatagtcatacagggtcaggtgttttacatgggtcatcatttaatcctcacagcagctaaggagggcatctgttgtcatctccagtttacagatggggacactgaggctcggttttcttactttagtgtaaggggtgtggtttcttattgttttctttatttttgatgtatttcacactgattaaaatttttctttttctacctacaaatgtgacacatgcttctggcagttcacctgggaaagaggaaggtggcaatagtcaccacgttgagagggagcaccctgggtgggggcaccctggcttcatagcccagtttcaccattcagtttttgagctgctctttgccggggtttcctcgccccccgtggtgttgagatctgtgtgagagacactaagggtcagcct

SEQ ID NO: 95484 - DNA, 12740 bp, Homo sapiens
tctcagccatggaaggttgacaattcaggccatgcaatatatgcttattattatggtagacttcctatttgacctctttgaacttgtgagatcactttaattctataatttacttattcattctttcactaagaatttgctgaaaatttatcatgtgtgaaaatgtcttgtaaactcttttttttttttttccctgagacagagtcttgctctgtcgcccagagctggagtgcaatggcgtgatctcagctcactgcaacctccgcctcccaggttcaagcaattctcctgcctcagcctcctgagtagctgggattacacgcgtgcgccaccacaccaggctaatttttgtatttttagtagacggggtttcgccatgttggccaggctggtcttggaatcctgacctcatgatctgcccacctcggccccccaaaatgctgggattacaggtgggaatcaccgcgcctggccacaattattaatttttaaacctggtgagagatgcaaaagatgtctgcccttaaggaatttataacttgttgaacctagaatacatatttcccttcttagaacaaaaatcaagcatcttctaataaaagtgggaaggtacaggatgtagctaaagcatttctgtcagggttttcccactgtcccttcctgttcatcactgtcccttcctgttgactcatttcaacttgggattcactatgaccactagatccttttcctctctatttctctttaagtccattctaaccacctggacattatttaatcccaaattcacaatgcccaccttcccaatctttaactgacttggtgagctattaacaagagttctatttgacccaacgactcacggaggaaagaagagaacttcacatttgtgggactggccacaatatgcactcaggagctgtaggactaatggccactcctcagagagtccttggggtaagtgaggcataacagagaggctaactatagtaagtaagtgggctgagcctggcctggttgctctcagccttttccgccactcatttccatcaaaagactgcctttaggagcaacggaggttaatgaagctgtccacaatggggcagccagcggtagtgcgactgaagtggaaatcatgtgagttaggtgaaaaagtacaaactggcctgattcagggagctgccacccagctggagaacaggtgttacctctcagtgggcagagctgcacaaggccagatcctctcccttcttagtcacgaaggtgccctctggctccaaggggaggagagggaaccagacctcactccccaggcctcagaccccccatctctctccatgtccttcccgctgtgacctccttcaacggtataatcactcagcctgttaggcactaagtagtaaaactggtcaacctttaaaaccacttttcattacgaaggcccaaaaaaagataaaagatgaaatttaatggggggtgggggggcacaagagggtgattgaaaaaaacacagataatttctggaattggatctgttaagccttacacattagtccccgccctcggaagtaagggcctgtcattctgtaaagggacgcagccacacgcagagaaggtggaggtctccaccccttccctcttcgtcctcgcctaggagggaccgtggtgccagtaaaacagggactggctggcccagagccttggggatcccctcctttgtctggaaccctctggctcaccgcatccttcctcggggccgcatggccctgccccacaaagcaggcgtgctgggggctgcttggccaggaaagcggacgcttgcagggaccacgctgctgcctctcttctgcccttttccccttagttttacaagttccctgttcgttcgttctttctctctctcctctctctctctttctctctcctctctcccgtctctttctctccttctccgtcactctcttccctccctctctcctctctcctctctctcctctctctctctctctctctctcctgcgaggagcttcagatttgtgggttgtttttaatgcattccggatgccagatgaaattttggcccgggctcaccagttcctctgctattgggactctccccacctcccctccaggcccaaagccgcaaggagagaaataggcgggcgggcgccatctgttggcagttgcctggagccgcacgaagaggtggagaactaaggcggggcgcaggtttccagtaaagagctcgatccgtgatcctcgtgaaagaattaatgtctacctgatgaaacttcctcgagggatggcccgggcagcggctcacgcctgttatcccagcgctttggaaggcggaagcgggaggatctcttgagcccaagactttcagaccagtctgggcaatgtggcgagaccgtctctacaaaaaataaaataaaaataaattagccaggtgtagtggcgcgcctgtggttccagctacttgacaggccgagatgggaggatcgcttcagcccaggaagtcgaagctgcaatgagctgtgaccacgccactgcactccagcctgggcgacagagcaagaccatgatatttcaagaaaagtccttgaggcaaaaggtgacctgctttagaacgcctcagtgcttagacatgaacagtgaaggggactgaagattgttggaacacggtgcagaaccctcttagtctcgttttgttgccttattatgttctatttcaactttcaaaaaaaattgctggcattagcatgtcgaaaaattggtgacattagaatgtcaaattctttgaaggatggggatttttgcattcagttttgtgttcaccaaaataagctagcaggagattctgtgcaagttgacttataagtatatggtttgctgaaatcttatgaggagagggaaatgtaaagtaaatgaagtggaaataagtggttgttatggttaggaaaaggccatcgtaaggcttcatggctagcatgcaggccaccgaagttctatcccaaacagaaggaagctcttgtaggatggtgagttatggtagggttctaggaggagtgggtgtcagccttttgggagggggaatggaagggctgggaagggtgggaggaagtgaatgaagttccaaagccaggaagctaggcacaaccctgtgagtagtaccaatacctaaggatggtttctcagggacactcagaaaaaagagcccagtctcctgagagcaagcatgcagccctatccccacattttcccctgaacatggtcctgtccaccaaatcaggcctgaggatcctgaaacacctccaggccctgggccctcacccactagacagcccaggaaccaggagcctaggcctgaataatgggaagctctggtactgggctttatattcctgcattttcaacaggaacaagactatgatgtgtggggtttcacaccctttctccctcccttttcctctcagagccacctttgtctttgccaatttgtccctggggtttggtgacacagaggcagtggccagaaaagagaggcagaattgaagtcgtggtcatggggcttttgcttctggacaaggctaagatttacttggatatgaacataaaaataaggagttgctggaagagaagagctgcgctttggatgggtttattaagagttgagagcgcggaagatgaggcagctttggaaatcagctgcagtagcatgaaggatactgagaatcattttaataaagacaatttttttttaagagacagggtctcgtgctttggcccaggctagagtgcagtggggtgatcacagctcactgaagccacaacttcctgggctcaagctgggactacaggcacgcaccaccatgcccagcacatttttaaaatttttttgtagagacaaggtctcactatttggcccagcttggtctcaaacccctagcctcaaatgatcctctctcctcagcctcccaaagtgctgagattacaggtgtgagccactgtgctccacggaggatgaggtttataaggtgatttctggtgcatcaagaaggtattttcctcccctccctctgaccttcaggggcttcttgagggaccaaaacttggaaggtactttccattgatcttcttctggaagaaggagagggtccaataaaaccgctgtttatttgagtcagcatcatgcacagcccaggccacacagacccacagttatatactgattacacattcaacgcatgtgtgttctcaacactgaagaggtagtggtaatgaaggcagccatggggctatagtcctagacattttattcctttaatatttaaagcaaacctatccagcaaaacaaaggaggcaaaacaaaacaacaacaacaaaaaaaacccctgcatgtcagtgtttagaaaatatccagactatatgtctttccaatattcatggaaatctttgatccaaggtgatgttgatgagcctgtgggtgggctgggagtttgttggtggacctacaaggctgtggagcacatgtcaattctcccaccagtctcaggcagtgacgcctactggtttagagcacagattctagatcgagacattcctgggttcaaatcccagcactgttgtttccttcctgtataactcaagaaagtcttggcttttgcagataccaccgccaccgggagccccatactattgagaggtgacagcgtgctggcagtcctcagagccccgcttgctctcggaacctcctctgccagggctcccactttggcggcacttgaggagcccttcagcccaccactgcactgtgggagcccctttctgggctggccaaggctggagcccactccctcagcttgcagggaggtgtggagggagaggggcgagcgggaaccggggctgcctagggcgcttgcgggccagctggagttccgggtgggcgtgggcttggcrggccccgcactcggagcagccggccagccctgctggccccgggcaatgagcacccgggccagyggctgcgtacggtgtactgggtcccccagcagtgccagcccaccggcgctgtgctcgatttctcaccgagccttagctgccttcctgcagggcagggctcgggacctgcagcccgccatgcctgagcctcccacccgctccatgggctcctgtgcggcccaagcctccccgacgagcgccaccccctgctccacagcgcccagttccatcgaccacccaagggctgaggagtgcgagcgcacggcgcaggactggcaggcagctccacctgcagccccggtgcgggatccactaggtgaagccagctgggctcctgagtctgatggggacgtggagagtctttatgtctagctcagggattgtaaatacaccaatcagcaccctgtgtttagctcaaggtttgtgagtgcaccaatcgacactctgtatctagctgctctggtggggccttggagaacctttatgtctagctcagggattataaatacaccaatcagcaccctgtgtctagctcagggtttgtgagtgcaccagtcgacactctgtatctagctgctctggtggggccttggagaacctttatgtctagctcagggattgtaaacgcaccagtcagcgccctgacaaaacaggccactgggctctaccaatcagcaggatgtgggtggggccaaataagagaataaaagcaggctgtgggcgccagcagtggcaacctgctcaggtccccttccacactgcggaagctttgttcttttgctctttgcagtaaatcttgctactgctcactctttgggtccacgctgcttttatgagctgtaacactcaccgcaaaggtctgcagcttcactcctgagtcagcgagaccacgaacccaccagaaggaagaaactccgaacacatccgaacatcagaaggaacaaactccagacgcgccaccttaagagctgtaacactcaccgcgagggtccgcggcttcattcttgaagtcagtgagaccaagaacccactagaacacactatcagccgtggtcaaccccaccatgttcttcaacatcgccatcaacggggagcccttgggccgcatctcctttgagctgtttgcaaacaagattccaaagacggcagaaaactttcatgctctaagcactggagagaaaggatttggttataagggttcctgctttcacagaattattccagagtttatgygtcagggcggtgacttcacatgccataatggcactggtgcctctacggggagaaatttgatgtcgaggacttcaccctaaagcatacaggtcctgacatcttgtccatggcaaatgcaggacccgatacaaacggttcctaatttttcatctgcactgccaagacagcgtggttgaatgggaagcaggtggtctctggcaaggtgagagaaggcatgaatattgtgaagcccatggagcgctttcggtccaggaatggcaagaccagcaagaagatcaccattgctgactggacaactctaataagtttcacttacgctttatcttaaccactggaccattccttctgtagctcagagagagcaccctccaccccatttgctcacactatcctgtcatctttgtgttcttgctgcagttccctttgggttccatgttttccttgttcccttccatgcctagctggattgtagagttaagtttatgaatatgaaataaaatctaaataggccgggcgcggtggctcacgcctgtaatcccagcactttgggaggccgacgcaggcggatcacgaggtcaggagatcgagaccatcctggctaacacggtgaaaccccatctctactaaaaatacaaaaaaattagccgggtctggtggcgggtgcctgtagtcccagctactcgggaggctgatgcaggagaatggcgtgaacccaggaggcggagcttgcagtgagccgagatggcgccactgcacttcagcctgggtgacagagcgagactccatctcaaaaaaaagaaaagaaaaaactaaataacaaaaaaaagaaagtctatagcctcttatgcctccatcgtatctgtaaagtggggataaaaatagtaccactcctttcgagttcatgtaaggagtaaatgaatgagtaggtgaaagtgttagcatagtgactgccatattgtaatgtttattaagtgttagttactagccaggcaaggagaatcatctcttgacataggcaggctcaggacctttgtaaatacttgtggtctgaccattcagtcagatcaacccagaggccaagctgcatatgcgtcccatggactgactgcatccctaggaggtactcctctgctgggttgaaggcatctctcagttggtgaggactggctccatgacctccacctgaccctggtgtactctgattctcttgcccacctccctctaacagccaccccacctgcccctcattggagatgagaaaggaaggaaaaacagagctgggcttctgtggtctttgtcctgtccccaaagccctctggaaggaatagagagaaatcataggatgaggctttctactcagaccccatgtaactgcccggccaaaatgggccaaggtaggcagcatcccgctcaggtcctgcagatgctcacacaccctgctcccacctggccaagagcacccctcctgttcctcggaggactggggagtcccaacttccagtcgctcttcccttaggactcacatgcctttgctcccctccctgtggcttcgctggtgcttctcaccatacccaaagctccaccaccttactgagtcacgcatttacattgtgcagtactgctctgggaccaggaaaatgacccactaatagcttacaaacgagcatgggccaaggtatggttgtaatgtttaaaaatacttctgggtatttctggatctacttcttggtcttgtctcttatcgctatttccttccctgtgttcctcatgcctctaacgtgaagagcaacttcactgcagccccagcctctccagtgtctagacagcaccctggtaaactaggggcacttgccagggggaaagaccccgatgagtcactgcactggggacagaaaatgttctgacttcagtttttatttatctcattttttaacttctattttggggtatgttttagatttacatgaaggcacagtaatagctgtttacattagtaaataaatatgcagttactgaggatgcatgagcaaatgtggaagggcacaattttaaagatttggcggccaaagtcctggcccacagcgcctgtctgtcattctctgatctggtttcagggaggttttcttgctatatcagctcccagggttgtcctccaaccagagtaataaacacaacctctaacagagggaggcgcctggcaccaaccaaccagtcagaaggacctggaggctctgggttcagcccacataaaccccttagttgctggaccaaggggaggtggtagggggacagcccaggggacaggatgcacttgggaggcctggagcagctgctggctacaactagtcaggaaatactttagaaagttgacagccaggagtgctgaatatcagcgctgaccgcaccttctttccaagtggtggttcctaccagctgcacctttgcgagtttcttggtctttgcttatacagatccctgacagtaaaatgcccttccatccttcctctgcctattaacattccattcatctggctgggcacagtggttcacacctgtagttccagcaatttgggaggccaaggtgagagaatcgcttgagcctaagagatggaggttgcagtgagccatgattgtgccactgcactccagcctgagcgacagagcaagggaaaaatacagaaaaatccactcatccttcaagctctagttcagatcctcccctatcagggagacccctctgatgctccaggttagaaggaagtgttccttccctggctcacatggcatgctctcacttggctcttactgtgctcttgcctcaccctgaaggcagactgtaagttccttgaagggagaaactattatatttcaacaaacctaagatgccatggttgtaaaatgaatcattgtttcaagtacctctaaaaaagaaaagaacctgccaatgggctatgagtggtaagacataccctgatttcggagacgttgacttttttaaaaaaacagcaaaagtgctacttagaatgaatgacatgtggtggccagctggcctgtgtctctgcatcgcccatgtctagaattgtgtttgatttgcagcaagcattcaggaaatgtttctgtttgcttttttcggggttctagtgaggagttccagaggaggaagtagagaagagagctgggctggaggaagatgatggtgagacccgagggactaagacttgagctaacaaacaaatcaacaagaaataagcaaacaaccacataaaaagtgggcaaaggacacgaacagacacttatcaacacaagacgtacaagcggccaataaacatgagaaaatgttcaccatcactaattatcagagagatgcaagtcaaaacctatgagataccatctcacaccagtcagaatggctactattaagtcaaaaaataccagacgttggccagtctggggagaaaagggaatgcttataaacggctggtgaaaacagctggctaagagcccagttaccttagtcatagttccaactctgcaatggcctgtatgtcaccaaaaagccactaattcctctatgattacccatattaaatgagacaataggataataataactaccatttaccaagttctagcaacatgtcagtgcttttatacatattcatatattttcttaaacaaacagaaaagcagttatcactggccctttttatttttaaaaagataatggggccaggtgcagtggctcatgcctgtaatcccagcacgttgggaggccgagggcagatcatgaggtcaagagttcgagaccagcctggccaatatggtgaaactccatctctactaaaaatacaaaaattagttaggcgtggtggcaggtgcctgtaataccagctactcaggaggctgaggcaggagaatcgtttgaacccgggaggcagaggttgcagtaagctgagattgcaccattgcactccagcctgggtgacagggccagacttcgtctcaaaaaaaaaaaaaaaaaaaaaaagataatggaagaggcagccacccacaggtcatgggaccttagacaagccccttcctgcatttcatagctagggaaacaggatcataaatgttaatcacaggtacccggtctacagtagagaggttttatgaaaataaaatacaagaccaaattcaaagagctttaaaaaccacagagccagacaaatgtgagaggttattatgagcaaacaatgacattacagaagtgaaagtgctcagtgccatcaagaacaagggctctatttcactcccatgtgtcaccataataaagacagagtccctgatcttaaaggcatcaattttgccccactggaagccttaattgtaattcattaatacagcagcatcctaaaagttactgccgtttctaggaatccaaacaactggttttaggtcctaaagaatttgaatcattaagaaatttaaagtactagtagagtttctgggagccctacaattttaggtttctgcatggttaagaaactgaaagagatgatttcttaattggttccattttcccagttttttttgttctaatccaagaattgttccagtccttatccttccttcaatcagaatgtccccaagtttatggaatgggcttcccttgtccccactcaatggctcaagaataccactgttatatattttttcctttcaattgtgtttcgtgactctggaaaaatactggatactttcaatatctaatgtgatatgatctcatgatagtttcatactatttttgatatctaatatgtaaaattaagtaatctgatagttctaatgtttacttgcagagaaattaattatagaagtgccaggaagattcaaggaattggaaattatggtttaattagtgggtatttagaacagctcttctcaaaaatcacctggacaacttgttgaaacacaggctgctgggtctcatctccacagttgctgattcagtagatctgagtggggcagcatgatttgtacttttaataactcccagggaatggtgaaggctgcttgtcctgggaccacacttgagaaccactgatttacatggttattggaaggaccaagaaagacaaaccacagaggcctcctcttctgtctttcttgggatgtgggttgctctgatgttgaagtggatggggttaggaagagactgggaaagacactgtaagccaggatgacaggtttcatttgtaaaatctttaccagagttttcttctttaatccaggctttatctcgtgagcaagaaatcatgagatctaaagtccttctggcaagaccaggctctaactctctccatatcaccctgggatcccaaaaggaccttccataagaagacacaaaggggacaagtctacagggggaattcaccaataccagtaactatgacaacactcaaacaatccctgcaatgttcgaaggttcataagaaaggagagtctgttgtcccatctggtgaaatccagtccccaagtggaaagcaatctctgttgccacaatccccaaactactagaagccatgctctctgctttgcatattgctggcttcacgaacatcatatatatatatgtaaattttaaatagccgatagaagatcattgatacatctttattacagatatatagttcagatcaggaaatattaagttaccaactcctaaagcagccattgtatttcaagcaagtcaatcctactaccatgaccaaacctaattggaccaaagaaagatggctgattaaggactatgtcaaatcaaaagggagatgacccatccatccccatggagtccccctgcttgggaaggctgaggacatttcacatatgggctatgtaggaccttaggcaaatcccctctcctccctgggctttaatttcttcttctagaaagctaggatgctagatttcattctctcagaagcacttttggttctaacggccataaacacagtaactttctgttcttttgcatgccactcctgggccccttctctttgtactatgcgaggaacttgccccatcatcagatttgagtgggggagtattgggggctccagaaggccaggaacagtccttaggaagccaaggcagacttcagaatatacggtcagactcaaatggcaaggagcttagacaatgtcacattgtggagtttaaaaacatgcatttttaagagcctgggcttactgagtcagcaatctggaacattctcaagagactaaaaatatcctgaaagtggactgaattttaaactaggctttaaaaaactttctatgtgaaaacaattgagtatttcttctttaaaacagttatccgttttctttatttagattttcacaactggaattgataagtatagaggaagctccagcctgagatgggggattgaacgtcatgtttgaagggctgtccagtcctagcgtcgatagcaagggaccaagatttataactttaaatct

SEQ ID NO: 95485 - DNA, 16216 bp, Homo sapiens
tcagcctccagagtagctcggattagagacacatgtcaccatgcccggctaattttttgggttttttgtttgttttagtagaaacagttttaccatgttagtcaggctggtcttgaactcccgaccttaggtgatccacctgcctcagcctcccaaagtgttgggattacaggcatgagccaccacgccctgcctaacttttgtatttttttaattgaatttatttttatttatttatttatttatttatttttgagacagagttttactcttgttgccaggatggagtacaatggcgcgatcttggctcactgcaccgtccacctcccgaggtcaagcaattctcctgcctcagcctcctgagtagctgggattacaggcgcccgccaccacacccggataattctttttggaagtttagcagagatggggtttcaccatgttgaccaggctggtcttgaacttctgacctcaggtgatccgcccacctcagcctcccaaagtgctgggattacaggcgtgagccaccacacccagctgtatttgtgttttaagctaactgttactacaaaagagtccaaaagtttaaaaaaattagaacatttgtaggccaggcacggtggcacgcctgtaatcccagcacttcgggaggcctaggtgggcagatcacgaggtcaggagatggagacaatcctggccaacatggtgaaaccccatctctactaaaaatacaaaagttagctgggtgtggtgatgcccgcctctattcccagctactcgggaggctgaggcaggagaatcgcttgaacctgggaggcggagatttcagtgaccagagatggcaccactgtacttcagcttggtgacagagtgagactctgtctcaaaaaaaaaaataaaataaataaaataaaaatacaaaaattagctaggcgtggtggcaggcacctgtaatcccagctactcacttggagactgaggcagcagaatcacttgaacctgggaggtggaggttgcagtgagctgagattgtgccactgcactctggcctgggtaacagagtgagactctgtctcaaaataaataaataaataaataaataaataaaaactcgtaaagtaaaagttacagtggctgggcgcggtggctcacacctgtaatcccagcactttgggagcccaaggcgtgcagatcacgagttcaggagatcgagaccatcctggctaacacagtgaaaccccgtctctactaaaaatacaaaaaattagccaggtgtggtggcgggcgcctgtagtcccagctactcgggaggctgaggcaggagaatggcgtgagcccaggaggcggagcttgcagtgagccaagatcgcgccactgcactccagcctgggcaacagagcaagattccgcctaaaaaaaaaaaaaaagtaaaagttacagtaagctaaggtttattattgaagaaagaagtatttcaaataaatttagtgtagcctaaatatagtgttgataaagtctacagtagcgtagagtagactttgttctgggccttcacattcactcctcagtgacccacgcagagcaacttcctgtcccagaagctccattcatggtaagcgctttatacagacaggtgtatcattctttattttttattattattacttttttttttgagacaagagtttctctctgtcacccaggcttgagtgcagtgacactacctcggctcactgcaacctctgcctcccgggttcaagcaattctcctgcctcagcctccccagtagctgggaatacaggtgcgtgccaccacacccggctaatttttgtatttttagtatacacagtgtttcaccgtgttggccaggctggtcttgaactcctgacattgtgatccacctgcctcggcctcccaaagtgctgggattacaggtgtgagccacctagcctggcatactttttttggtttgtttttttttttgagatagagtctcgctctgtcgcccaggctggagtgcagtggcacgatctcagctcactgcaacctcagcctccggggtacaaggaattctcatgcctcagcatcccagggtagcttggattacatatctttatgtgatgcatgattatatttgcaaaccatacatctgataaggggttaatatccaagatatataagtacttaaaacatctcagtagcagctgggcatggtggctcatgcctgtaattcaagcactttgggaggcggaggcgggtggatcacctgaggtccggagttcaagaccagcctggccaatatggtgaaacccagtctctactaaaactacaaaaatattagccaggagtggtggtgggtgcctgtaatcccagctacccaggaggctgaggcacaagaatcacttgaacccagaggcggaggttgcagtgagccgagatcgtgccactgcactccagcctgggtgacagagcaggactctgtctaaaaaacaaaaacagaaacaaacaaaaatctcaatagcaagaaaacaatgtgatttaaacaacacgcaaaggacctgaatagatatttctcaaaagaagacatacagcactttgggaggctgaggcaggcgaatcgccaggtgaagagatcaagaccatcctggccaacatggtgaaaccccgtctctactaaaaatacaaaaattagatgggcatggtggtgtgtgcttgaacccaggaggcggaggttgcagtgagccgagatcgagccactgcactccagcctggtgacagagccagactctgtctcaaaaaaaaataaaaaaagacataaaaatttctggcaactatctgaaaaaatgctgaacaatgcatggatcatctgggaaatgcaaattaaaaccaaaatgagataccacctcacacctgtcagaatggcttataaaaaaaagacaaggccgggcgtggtggctaacgcctgtaatcccagcactttgggaggctgaggcaggtggatcacgaggtcaggagttcaagaccagtctggccaacatagtgaaaccccatctctactaaaaatacaacaaaattagccgagcgtggtggtgtgcacctgtaatcccagctactcaggaggctgaggcaagagaattgcgtcaacctgggagggggaggttgcagtgagccaagattgtgccattgcactccagcccaggcaacagtgcgagattcaccctcaaaaaaaaaaggagattctgtcatttgtgacaacatggaagaacctagaggacgttacggtaggtgaaataagccaggcacagaaagacaaacacgacatggtttcacttatattcggaatgtaaaacaactcatagaggtggagagtagaatgatggtaccagagtctggggattggtgggagttggggcggtggggaatggggaaatgttggtcaaagggtacagtttcagctagacaggaggatttttttttttttaatttgagacgggggtcttactatgttgcccaggctggtcttgaactccttggttcaagcaatcctcccaccttggcctccaaaagggctatgattacaggcctaagccaccatacccggcccaggaatgttttttttttagaactatagcatggtatggccaggtgcgatggctcacacctgtaatcccagcactttgggagactgaggtgggtggatcatctgaggtcgggagttcgagaccagcctgaccagcatggagaaaccctgtctctactaaaaatacaaaaaattagctggggatggtgacacatgcctgtaatcccagctactcgggaggctgaggcaggagaatcacttgaacctgggaggcagaggttgtggtgagccgagatcacgccattgcaccccagcctgggcaacaagagcaaaactctgtctccaaaaaaaaaaaacacaaactacagcatggtcactatagttaatgtatatttcaaaattgctgaaagtagctgggtatggtgatacaccatagcctgtagtcccatttactcaggaggctgaggcccacagatcacttgatcccaggaggtcaagaacagcctgggcaacaaagcaagaccctgtcccatatttttttttgaagcagagtctcactctgttgcccaggctggagtgcagtggcatgatctcggctcactgcaacctccgccctccaggttcaagcaatcctcttgcctcagtcccccagtaggtgggattacaggcacggtccactatgcccagctaatttttgtatttttagtagagacagggtttcgccatgttggccaggctggtctcaaactactgacctcaggagggcttagtggctcatgcctgtaactttgggaggccaaggcaggaggatcactggaggccaggagttcaagaccagcctggacaacatagtgaggccccatctctataaaaaatttaaaagttagccaggcatcatgatatgtgtctgtggtcctagctactcgggagggtgaggcaggaggatggcttgagcccaggaggtcaaggctgcagtgaactgtgatcttgccactgcactccgtgtgggtgacagcacaagaccttattttccttaaaggaaaaaaaaatgctaagagtggctgggttgggtggcccatgtctataaccccagcactttgggaggccaaggtgggtggatcacaaggtcaggagttagttcgagaccagcctggccaacatggtgaaacccattctttactaaaagtacaaaaattagctgggcgtggtggcgcgcgcctgtagtcccagctactcaggaggccgaggcacgagaatcgcttgaaccaaggaggcggaggttgcagtgagcctgggcgacagagcgagactccgtctcaaaaaaaaaaaaaattagctgggcctggtggtgcgcgcctgtaatcccagctacttcagaggctgaggcaggagaatcacttgaacctgggaggcagaggttccactgcgcggagatcacgccattgcactccagcctgggcaatagagtgagactccatctcaaaaaataaaagtccttaaccagtccatatttctgaatattttgcttattcctgccggcagtgtaatactctggtgaatatttgcgttcgagatccttgcattcccgagatttccccagctcagccctctgcgtgggttgaacggtatgaacctttttaaggcttcgcttgtactgtactgtcaagctgttttttggaatattcgccccaggtttctgttccagccagcagccagcatcagccgtctgcatccttgtcctcaaactgctgttaattaaaatctttgccaatctgggccgggcgcggtggctcacgcctgtaatgccaacactttgggaggccgaggccggcggatcgcctgaggtcgggagtttgagaccagcctgaccaacatggagaaaccctgtctctactaaagatacaaaattagccgggcgtggtggcgcatgcctgtaatcccagctacttgggaggctgaagcaggagaatcgcttgaacctgtgaggcggaggttgcagtgagccgagatcacgccattgcactcgagtctgggcgaccagagcgaaactccgtctcaaaaaaaaaaaaaaaaaaaaaaaaaagaaacctttgccaatctggtagaattgcggggcttattttatggtgtcatggaggatagcctagggccagatatacctggggccctgtgcctgctctgcgaactaggagctcactctccgagcggtgtagagggtgagactaagcagtgacagtaaaagctttcgacagtgcttgacccttccgcggagcgtattaagcaggagctccctgcgcaggcgcagaggagagagtgtctcccaccccacgaccagcagggggcctgcgaggcgggtgcggagccaggcctgatggtggccaatcgcgagctgaggcgacgatgccacgcccctcataccggcgtcttaaatgcgcaaagaaaggacgccggggacacccggttgggctctgctgctcccttctgggttccgaggcccaagcccttggcagtgtttgtgagtggaagggaggtcacgctatcgtccgcggccccagcagccctgtgccctcgttggatcccgcgacgcggctcctttaagagcctcgcgggtcgcccgccgctaggtcgctccccggccatgcgggcgctgcgggccggcctgaccctggcgtygggcgcggggctgggtgcggtcgtcgagggctggcggcggcggcgggaggacgcgcgggcggcgccgggactgctgggccggctgcccgtgctgcccgtggcggcggcagccgagttgccccctgtgcccgggggaccccgcggcccgggcgagctggccaagtacgggctgccggggctggcgcagctcaagagccgcgagtcgtacgtgctgtgctacgacccgcgcacccgcggcgcgctctgggtggtggagcagctgcgacccgagcgtctccgcggcgacggcgaccggcgcgagtgcgacttccgcgaggacgactcggtgcacgcgtaccaccgtgccaccaacgccgactaccgcggcagtggcttcgaccgcggtcacctggccgccgccgccaaccaccgctggagccagaaggccatggacgacacgttctacctgagcaacgtcgcgccccaggtagcgcccgcgccccgggccggtcgcggaatgmggggccggcgcctggcctcgcggggcctcggtttgttcttctgcagaacggggcagctgcccaacgcgcccccggtcaggcatcgcagtgacatcccgtggcgggagggaggagcactgggctccaggcacagggtctgcaggccgaccagggcttgagcttcaactgcgaaccmtgggcacctccctgagcgtcgctttcctcgtcaaaaaaatggggataataccgttattcaccttcctcctgcggtagtgatgaggcgctgaggctcacagaggcaaagtgacgggcacagtgtcacacagcagaagaaggctgtctgttgtagaaccgcagcgcccaacctattgggcaccagggtgcggtttcgtggaagacagtttttccacggcttggtgggtgagggcgggtttcaggataattcaagtgcgttacatttatgtacattttatttctattattattacattgtaacatatagtgaaatatacaactcacagtaatgtaggatccgtgggagccctgagcttgttttcctgcaactagrcagtcctatctggaggtgatgggcaacaacgacagatcaggcattaggttttcaaaagaagcgcgcaacctcctcacatgcgcagttcaccatagggttccagctcctatgacaatctccagccgccactgatctgacaggaggcggagctcaggctgctgtgggatcaatgggggggtggctgtaaatacagatgaagcttcccttgctcgcctgctgctcacctcctgctgtgtggcccggttctggtaccggtctgtagcccaggggttggggacccctagtctataaaaccgtgagcctccagacattgtcctaccctgcctgccttcaggcagtttcgaggcagacacctggcccacgatcaggttgttagtgccaggcactgtgcactgggccaaccaccctctcagcctgttcccagcaggtcctggcaccaatggatggagactgccatggggctctgggtggagcccatggggcaccaacctctgacccagcttccttctgggaagacagccccctatccactttccattgtcccaggcctggagagctcaggatggaggtcgattcatgrcattccccgctaggctcttcctgtggctcagactgggaaaaggaacgggttggtagttggaagggctggtcttcccaggagaccctgggtggggctggggacaggcctcagtcctctctgaaaggtggagacaggctcttccttcattcgactcttgggagctgagaaaagactttgacacctgggctgtgggagggacagagggtggtggctagcactctatcagccctgggtttcagggagtgactttcattccttgagcctcagtttccccccgcttgtctcactggatatctctgagcctgtccatcccctcaggacctggggcggccctctgatagaggaggaagggtcccagccacagtcctgctaagccctatctctcctaccaggtgccccacctcaaccagaatgcctggaacaacctggagaaatatagccgcagcttgacccgcagctaccaaaacgtctatgtctgcacagggccactcttcctgcccaggtaaggtggaaaccaggggggcggcagaacctcccactcaccygaggcccctactgccactcacagggccaggcttgccccaggctctgggtcaataccagttccctactcatctggtttcttggcaagcctgtcagcttccctgcctcgagtcccctcattccacctccacagccaaagacctgtcgggtacccctgaccatctctcctctgcccatgggcagcagcaggccctgaatctgcccccgcttctccctgctgtcacctcttggcatgcccacccaatcttgttctgccaatatggaaccccccgcaggtctgcagtgcaccaagctctcccaccttccccccgcaggtctgcagtgcaccaagctctcccgccttccccctgcaggtctgcggtgcaccaagctctcccaccttccctctgcaggtccgaggtgcaccgagctctcccgccttccccatgcaggtccccagtgcaccgagctctcacgccttccccatgcaggtccccagtgcaccgagctctcccgccttccccatgcaggtccccagtgcaccgagctctcaygccttccccctgcaggtccgcggtgcaccaggctctcccgccttcagtctctgctctgcttggagcacttccctccacccttctcgggagtttgaatctagatctgcctgacccagggcctccactcttgctcctgtgcagccctgcctctcaggtggaagcaactgagcacctctgggtgtgctccgtggtttttctggcctgcagagggctggggctgagaggcaacaggtccaggctgagcagctcactctggaatccacaggctcgggatggagtccaggcctcatcacctagttccttggtgctgtgggcaaatgacctgtgtccccctctgcaaaacctgtgacctcttggttgatgtcacatgcttccccagggcctggtccatggtaagggctcggcataggctggccaaggcggtggttggggcactgatcaaatttcattagcaggtgcctcctagggcctggtggaagggaggagactctgctgagggggagcccccgtccggtgtcctggcacctgtgctggtgctgggatrtcacctgtcatggtccttgcccacttgttgctcacctctgtggggagagatggacagtcgttaagtctcccctcagacgaatgtgaatattcagaaggctcgattctcctagcagcgtttattgtcgcccactctgcctgacccagtgttgggcataaggaaaacagagggaaagagttaaccaccctggagagagttccagsctcaaggaggagccaggcaggctacagaagtctcacagtgagggcgtggtcctgcaggttgacagaagttagaggacagatcagggaaggctgcctggaagaggtggctttgggttcatccaggccccctgcccacgtgtgcctgggtctgcccacaggacagaggctgatgggaaatcctaygtaaagtaccaggtcatcggcaagaaccacgtggcagtgcccacacacttcttcaaggtgctgatcctggaggcagcaggtgggcaaattgagctcckcayctacgtgatgcccaacgcacctgtggatgaggccatcccactggagcgcttcctggtgcccatcgagagcattgagcgggcttcggggctgctctttgtgccaaacatcctggcgcgggcaggcagcctcaaggccatcacggcgggcagtaagtgagggtggagcccagtgagactgtgggtgtgtgcaggccggggagtattaaaggtsgtgatttttggagacaagtctggtggcgtccgtcccaagtgacctgcagagcccctggtttcactgctgcttcactgatgtcctcggccccttagaactttcaggtgtgccgggcacccgcctgggtgaggccaggctgcagggcggccagggagatgaggatggcttcctggaagagaagcgtggcagtgggctggggcctggggggctagcgggtgcccccgctcccagcctgtcttcagtgcctggctgcccgagacccggcccactggtgtcccctgtccttagtagggcctggtgaggttaatgacaggcccaggttcacactgcacacttgccacctggaggaccacacagcctgctcctcaggctcctcttctgtaaaatgggggcgaaggtaacaacgcccacctcccagggccaggggagggcaagaagaggggcaagaagttttcacccctcgtgcaggggttggaagggtggcagccagggttcctgctggggggtatggctgtcaggctcagagtgctcggcttgggcaaggccttagggatgggtagacagggctgtcggcccggcgagactgatgggagtaccagccttcccagcagagttcccgtagcacagcgtcctatgcctgaccccaaaagtgggtacacaggttccatgaggccaggacgaaggctccagctgcacgtggcttcccccgtgggacagatgcaagtgagaccccaaggggagagctgctgtgcccaccgtggtcacacacaaggaagtggcagaaccagggccctgggagatcactgagcgcacggctaaggaaccagaggcccggagcaggggtgggcagggccccctgggtcacccagtctgggagcacaggacgggcactagcacccatggttgactcccagctacactcatgtctcgtcgctgtggcaagaggccaagggggatgagaggaccacctccagacaaggcagccacgggcaagggtgggtgacagggcaagagtagcacccgcccctcggacagatcccaaggccccagcggctggcagtcggggaggcaggcgggctcacctccgtgcggatggtacggctaccctggccaggacaggtattgacgtacaggtcaaagaggacactgggttcagccacctccaggttggggtcagcatccgctccagcttccagaccctggaggcccccgaacaccacaagagcatgcctggcccatgtaagagggggtcacctgagcggccaccgaggccccacccagcacagcgcccagacctcagtccctccccaccccagacagcaggggcccatctgtgcagcttcacccaccaggcaggttcctggccacattcctcctgccctggccgcagccccaggaggtacacacctgaagttgggaagctgggcagaggccacatctgagccgcgctctgacgtcccgatggtcaggtcatacccatcttggaagggggcctcagcaaacacagcacctgggggtggggccagctcagtgcaggtcctgctccccacaagccatagctccgggtattatgtgtgtgtgtactgaggcgggggtgggtgggaagagctgtgtggtgtgtgtgtgtgtgtgtgtgcgtgtgtgtactaaggtaggggtgggtgggtagagctctgcctgtgtgtgcactgaggcaggggtgtgtgtgtaccgagcaggggtgggtagagctgttcctggaaagtcaaggactgagcagggcagacaccaagcctgtgcttggctggggaacagggcagagactggataggaagaggcaccaagaacatgaagtgggcctctgacttctctggcccttttgcctccattcccaaccctacagaaacattattgatcaataatgatacttttgctcagtagtccttaacagcattccaggcagtgcatccagggagaacaaggcccagagaagggaaaggacttgcccaaggacacacagcaagttgacaggacaaaaaccctggtctgatatttgggtcaggcaaggctcccggccacctcccagagggatggatggatattcagagaagtaaggtctgtccttactgaggcaggaagccagtcggacggtgtagccccagtagagaccagctttggtgcgagggtcctgcgatgataccactttgccatggtaggtcttgcagtctggaggggtaacagagtctgtaaagatggggtgagggaatggaagcaggtggctgaaccctggagctcatcaggccaacccaggggttggagaaccttccagatacctgggtgctgctgctggttcagtcgcacagtcacccgaagcccgggctccaggttcttgtcaatcttcacctcctggggagaagccagaagaaatgggtgccattcctctcaagatcagcaggggccacggctcttccagatgccaccaggggagccccggggctggcaagggaccaaggggtccaggtcaacctgccaccctccacccctggcaccggctgaacctgctcacaagagatcatttgtgcaaaacacaggtcactggccaaacatgcacctttggggcgctcatggcacaggatagaagtagatgaaactcagttttctacattttggtagctctgcaactttttttttcttttttttcttttttaagatggagtctggctctctcacccaggctggagtgcagtggcacgatctcagctcactgcaacctctgtctcctgggttcaagtgaatctcctgccttagcctcccgagtagctgggattatagatgcgtgccaccacacctggatcatttttgtacttttattagagacagggtttcaccatattggccaggttggtctcaaactcctgacctcaaatgacccgcctgcctcagcctcccaaagtgctggggttacaggcgtgagccactgcgcttgggttgtgctttctgacaggaagggactccatacatgtaaaggtttctgcctctgatttgaggaggcttgaggataaagaggcggcaaattaatgccctcatcccagcttggctctgtgccacatgggagcagctccagagtgactttcaacttgtttctgcagggttttgtttggagcatgaggactgtcttctgttgatttgctttttaagcaacagtaaattcattcctggctttatctattgagccccattttgcacaattctctggcccaaatttgcatcagtgagggatttcgggcaggtccagggctctccgcaacatccatctgcttgccctccattgccagggtgtgtcctggaggtgtgtcctagcccatctttctgttcctacctttttcatgccacagttgacaaaggagccgtggcctggccgggtgggccgatccaccacgatgccctctcggaactcggattcctcatcctgacgcatgtggtgggggctgtccagggggttcaggagccctgtggaggcagagccgggaagagtctgggaagtgctagggcacacagggtgcagtggggaccctggagcggagtaccggctctgccacagacctgcgtcttggcatcagacacaggtcttgctctcccaggcctgctttcccacctggacagcgcagggtaggactgggtggtctcagtgtctgtggcatgatccaggggaaatgggggggcgggcccacacagcgttacctgcaaactgtagatcctggtgcttggggaagaacgccttcctcaggtacctaggaaagaatgctgacctcaggatgttcccaggggaagccgcctcctacctggtctccactttgacacacccctccctcatgcttaggggagtgacccccttactgtggacactccaggtactgcaggatccgggccagctgtacgcacgcctgccccttcttcccaactcctgtgaattccccctccacagtcctggagagagagagatgggggctcaggatccagctgtggccccttcaagagctcctgtctacaagtgcacgcgtataatcccagctactcaggaggctaaggtgggaggatcatctgagtgcagcaagtagaggctgcagtgagccatgaccatgccactgcatgcactccagccggggtgacagctgagatacaggtttaggccttctggctcccaatcccacctctgtagtcatcacccccacctggcaactctacccactaaggattacacagggaatatttcaggcagggcacgagggaagagccaggcatgtggacgggggcatggtgaagcctcggcccatcccggcagcccctccctctccctgaaccctggcaccctgtgggatggccccttacttggcatcctggccctcctcatcaaacaccacgatctcatccacacagaagatggcacaggctctggcaatctgaccggccaagtaggtgcgaagctccggcgactgagcattgtccaggatggagcccggcagggctacgctcagtgtgtagggccgccctgagcaggggagggatgttcccagccagtgtgagaggcaagggccccctacctttctctcccttcctctgtccctagcgcccatggtttgagaatttcccaagtgggaggaattttgagatgagcaaaatagatccagctcccctctctgggcctcagtctcccagcagtctccatggctcctctgagcagggcaaaccactgggcgaggctgtggagcggttagtagcaatggcctaagttcacatcctggctctcccacttactgcctcagttctccagctatcaaatggggataaaatgaaagctgatatctaataagtctttagtgtgtgcacattaacccgatagccattaacctgatccctagtgaggatactgccattatccccatttacagaccaggggccttcagccccgggaagtcaaatacatggcccaaggtcacacaaaaggtggctcatgcctgtaatcccagcactttgggaggccaaggcgggcggatcacctgagtgaggtcaggagttcaagaccagcctggccaacatggcgaaaccccgtctctactaaaaatacaaaaattagctgggcatggtggcgcatgcctgtaatcccagctactccggaggctggggcaggagaatcgattgaactgggaagtggagattgcagtgagcggagatcgagccactgcactccagcctgggcaacagagcgagactgtgtctcaaaaacaaacaaaaaagcccaagaagcacatagataacatggtttcactgttgtaacattgtatctgtactttgctacacatggataagtagctataattgtttggacaagcttttgctacaatgtttgctgggattgttcctgtcttctttgtagttttctttcatttttattatgaaatcaaaataattgaaaaatgaaattaaagcacacagaaaatgctcaataaaaaagtcaaaaaatcaggaagatcatgaagttctagaggtctaagttaagagatatgaggcttgggccgggcacggtggctcatgcctgtaatcccagcactttgggaggctgaagtgggcagatcacctgaggtcaggagttcgagaccggcctccccaacatggtgcaaccacgtctctactaaaaatacgaaaattagccaggtgtggtggcacacttctgtaatcccaactactcggggggccgagggaggaaaattgcttgaacttgggcagtggaggttgcagtgagcagagatggcgccgttgcactccagcctgggcaacagagcaagactccatctcaaaaaaaaaaaaaaaagagagataaggcttgccttccataggcttgaaatttacctaagcaggaggtcagaactcagtttgctggctccctcccttctctgggcctcagtttctccatcaggacaagatgtttggacctactggtctgtaaaggccctttcagataagacatctctgctctgcctg

SEQ ID NO: 95486 - DNA, 22313 bp, Homo sapiens
tgctgagggtgggaggtcaccaccccctgcaagatccttggcaagtgaggtgggcctgagaatgaagaaggctttagccaggtctggaaggacctctccccctacctgcgcccctgctgcaggtgggctgggtcctgggtccagatcacatcatgaagcacctgcggaccgtgcaccagaactccgtcttccactgccccacgcagagccaggtgaagaggggcaggacgtcacgggggagtggggggacaacaaaagagcccaggctggcccccgcgtcagggaacagctgatctatctgtgtgtccatctgccctgcccaggctgcagtagccgagagctttgaacgggagcagctgctcttccgccaacccagcagctactttgtgcagttcccgcaggccatgcagcgctgccgtgaccacatgatacgtagcctacagtcagtgggcctgaagcccatcatccctcagggcagctacttcctcatcacagacatctcagacttcagtgagtgagacttgccggtctgggcagggcgcaggggctggaggctgcagggggctcagtgtggcctctgtctcccagagaggaagatgcctgacttgcctggagctgtggatgagccctatgacagacgcttcgtcaagtggatgatcaagaacaaggtgggctgggcctctgccaggcagccatgtatggtttcacaggttgtgtgctgctcaagggtgcccaggcaagaggctcctgggctagatcttagtccagcctctgccgtcaaccttggggcagggttgtatccacttcagagaatgaggaggctgtttctttttttctttcttttttttttttggttgagatggagtctcactcttgcccaggctggagtgcagtggcgcgatcttggctcactgcaagctctgccccccaggttcacgccattctcctgcctcagcctcccgagtagctgggaccacaggctacttttttttgcccggctaattttttttgtatttttggtagagacggggtttcaccatgttagccaggttggtcttgatctcctgaccttgtaatccgcctgcctcggcctcccaaagtgctgggattacaggcgtgagccactgctcctggcctttttttttttttttttttttttgagacagagtctcactctgtcgcctaggtgggagtgcagtggcgcaatctcagcacactgcaacctccacctccagggttcaagcgattctcctcccttagcctcctgagtagttgggtaactgggattacaggcatgtacaaccacgcctggctaatttttgtatttttagtagagacggggtttcaccatgttggtcaggctagtctccaactcctgacctcagatgatccactccccttggcctcccaaagtgctgggattacaggcgtgagccaccgtgcctggcctgaggaacctgtttctaacttgcacagagatgctgtgtgggctggcaggatttcctgcctctttggatctccatcttcccatctgtacagtgaggagttggcccattaactcttgagttcatccaggtttgatctgtgactctaaggctttgttcttctctggctctgccctgacctgctccatgatcctccctctgtcagcctccctctgccctctatacccagggagggacttggaatgatgttctgggattcttttcttctgactttgtgtttgtttttgttttggatggattttctctctttcgcccaggctgcggtgaagtggcgcaatctggctcactgcaacctccacccccgggttcaagcaattctcctgcctcagcctcccaagtagctgggattacaggcatgcgccaccacacccggccaatttttgtatttttggtagagacggggtttagccatgttggccaggctggtcttgaactcctgacctcaggtgatccacccgtctcagcctcccaaagtgctgggattataggcgtgagccaccgcacctggccttgttcctctgactttgatgcagctctaggtgctggattggagctaactctccttccccgcctggtcgtgggaacctctctgtcccctccggagccaaggcctgctgggccacgaggccgtgttgagacatgtccttcctcctccccagggcttggtggccatccctgtctccatcttctatagtgtgccacatcagaagcactttgaccactatatccgcttctgttttgtgaaggtaaagggcagggctgggggaggaaagacctcacagagcttcccaaggccggctgggcacatggggagagtgtaggactaatctgtgctggcgcaggatgaagccacgctccaggccatggacgagaagctgcggaagtggaaggtggaactctagccctgaagtcacgccttggccctgacatccccacatgcccgcagagatcctctttgagtgtctgtctttgtccaggtttcagacatttctaggttggggaagatgctattgggaaacctcttctccgtgacacagaatgttctgggtgggagccgcccttcttcatcttagagaaccaagtgcctcctgtctgaaaggtgagggtggcctgacctgggcctctccctgcccctccataggtgggtttgtagggtcttgtgttgcttctggtctctccaggcttggctgagacggacggtagacttccaccatgtaccgatcacatcccagctctgcatggcccctgctaaggctcaggtataacctcaccttccctggctcatcttggccttggggagttgcctttaggcttgagtcctcaagcctctccttttcgtccataataaaatgtttaagttattaagatccttattgacggcttctctctgcttcacactcatgctgatggctgatctaacttgtgaagaatgcccagaagaacctcagacacccccacaactttgtacaaatggttactgtagtcacatagtggcacaaccaggcctagcacccaaggccctcaaatgaattcctcactattaatctttgttgttgttgttgttgttgttgtttttgaaacagagtctcgctctgtcccccaggctggagtgcagtggcatgatcttggctcattgcaacctccacctcctgggttcaagcaattctcctgcctcagcctcctgagtagctgggactacaggcacctgccaccatgcccggctaatttttgtgtttttgtagagatggggtttcaccatgttggctgggctggactcaaactcctgacctcaggtcatctgctcgcctcggcctcccaaagtgctgggattacagacgtgagccaccatagctggcctctcatattaatctgatggtagcagttattggtgctgggtgtggtggctggggtgggggtgtcatatgtgtttgtgtgtgtgtgtgtgtgtgtgtggagaggattggggttcgtgacaaggaagacatggacattcccacaggggtgagagaacagcacagtgggggccaggaggaccagggacttaaataattctcaggaggaggactgaatgttgatcgtgcaagccctacctgcgaggcactcagacgcacatcatcttacacaaccctctgagactgagacctgagttatctccagttcacaagagaggaaagcactctggaggtgaggtgaagtggtgtgcccaggccttctagctggccccgattgagtctcactggatagcaatagtagctcctgaatttctttggaaggtggtgttaggggcctggtcttgaagttgcatttgcatagcaagcgcatgggtttggctcatatcatatgtttaactgggggagctgataggaatatatcatataataaaatacatatttggtgtttgcccctggtccttagtaaagaattcctaaaatccttggagtttctggaagataggcatgtcttgttagtcacatggaatccctctgcactgtacgattacggggtcagaacttttagcccatcgggccccctccatctctgcctccatggaggtgtgagggactagactttgagcccaatcacatggtccatgtctgtttgttattgttgttttggggggatttttgtgtttgttttttcaaatggccaatgtcttaatcagtcatgcctacaaaataaacctgtcaaaaatcacaacaaatttagtataagatctaagttcgagaccaggcacggtggctcacacctgtaatcccggcactttgggaggccgaggcgggtggatcacgaggtcaggagatcgagaccatcctggctaacacggtgaaaccctgtctctactaaaaatataaaaaattagccgggtgcagtggcgggcacctgtagtcccagctactcgggaagctgaggcaggagaatggcatgaacccaggaggcggagcttgcagtgagcggagatcacgccactgcactctagcctgggcgacagagcagagcgagactgtctcaaaaaaaaaaaaatctaagttcgagaccgggcacggtggctgacacctgtaattccagcactttgggaggccgaggcgggtggatcacctgaggtcgggagttcaagaccaacctgaccaacatggagaatcccgtctctactaaaaatacaaaaattagccgggcttggtggcaggcgcctgtaatcccagctacttgggagcttgaggcaggagaattgcttgaacctgggaggcagaggttgcagtgagccgagatcatgccactgcacttcagcctgagcaacagagtgagactagatctcaaaaaataaaaggcattaatggctcaagtctataatctcagccctttgggaagccaagttgggaggattgcttgaaccctggagtctgagaccagccctggcaacatagtgagacactatctgtacaaaaagaaaaaaaaaaattagtcgggcatggtggctcacacttgtagtcccaactaatatagtctgttaattaaaagagaacgaggccgggcgtggtggctcatgcctgtaatcccagcattttgggaagccgaggtgggcggatcacctgaggtcaagagttcgagaccagcctgaccaacatagagaaactccatctctactaaaaatacaaaatcagccaggcgtggtggtgcatgcctgtaatcccagctactcgggaggctaaggcaggagaatcgcttgaacccaggagttggaggttcctgtgagctgagatcgagccattgcactccagcctgggcaagaaaagcgaaactctgtctcaaaaaaaaaaaaaaaaaaaaaaggccgggtgcagtgggtcacgcctgtaatcccagccctttgggaggccgaggctggaggatcacttacggtcaggagttcaaccaggctggccaacacggggccaacatcaacaccatctctactaaaaacacacacaaaaaaatttgctgggcatggtggcacgctcctgtaatcccagcttcttgaaaggctgaggcaggagaattgcttgaacccaggaggtggaggttgcagtgagccgagatcgcgccattgcactccagcctgggcaatgaatcgagactctgtctcaaaaaaaagaaagagtacgtgaacgaatctataagaaacctggagtaaattatctcattttcagctctgaatcacactacagctcaaggccccagggtccccatgtataaagccttccaggagctaggcgtggtgctgcgcacctgtggttccagctactcgggaggctaaggtgggaggatcccttgagcccaggagctcaagcctgcagtgagctagaattgctccactgcactccagcctcggcaacatagcgagaccctgtctcaaaaaaaattatttttaaacaagtgaactactcagaggtctgagtgttgtatttgtcccaactcagaggggggctccgagccatccaaaattcagcacagtacccgcgatgccscctatttggacacctactctgcccaacctactccagcccgcgtrcccctgcagcccgtcgggcgcccaggccacgcccctgggcgayattggctctccgattggacagcttaatggaggtgtggccggaagaggcgagtctcattggcagaggcgggaccgacggtgtgtgcggaacatggcggagcgcggcaggaagcggccgtgcggcccggtaagtgcgggcggcgggaccccgtgcagggcagcatggtggaggcgtgagaaccagtggcgtgggggccttcgccggggccgggccgcgcctcctgctgcctgcttcccgctgatcccaggccggaagsccccgaaggtgccgcgtgagcctcagcaggatgggaacagcgccygtrtcctctccggaacyccctgcggctccctggcccccgctggattacggaggcgggaccctgctcgcctccggatgctgaatccggagccctttcgtggcttctggagcccttttctgacttccagggcgactgtgggcagtgctgtaccctgagcctcagttttctcttctgttttgtgggaactcattcgamagttkcttgagtgctttctgtgtgccaggctgggtcccaggcgctggggatacagcgggtccctgccctcctgccgctttctggggcagcagttcgcagaggttccttggcttccttgccgccccgtgtggaggggctggctatggtgcagcaaacggaccccctccaggtgtgaccatcagcctcacactcataatcctcctaccactccttctccagggtgaacacggccaaaggattgagtggcgaaaatggaagcaacagagtaagtaagggtgggtwagagtatcttcccataggccactccaccagtgctcagtcaaaccctggagaaagacaccaactttgttccctctgggtcctgcagcacacaaagtggggaggcaggggccgggagccctggggaggctcccttgctgccctctggctgctcacccagcagctctccagagtccaggctgacccaatgagtgggaactgtctccttggccaattaggatgttcttttatccagagaaagaggagaaaaaaaaatggaaggatctcaagctgatgaaaaaactggagcggcagcgggcacaggaggaacaggcaaagcgcctggaagaggaggaggcagyggcagagaaggaggaccgcggtgagctggggtcttggggagggccacaggttgtggcccacggtagttgtcctgcaggcagagcagagatgtcttatctgaaagggcctttacagaccagtaggtccaaacatcttgtcctgatggagaaactgaggcccagagaagggagggagccagcaaactgagttctgacctcctgcttaggtaaatttcaagcctatggaaggcaagccttatctctcttttttttttttttttgagatggagtcttgctctgttgcccaggctggagtgcaacggcgccatctytgctcaytgcaacctccactgcccaagttcaagcaattttcctccctcggccccccgagtagttgggattacagaagtgtgccaccacacctggctaattttcgtatttttagtagagacgtggttgcaccatgttggggaggccggtctcgaactcctgacctcaggtgatctgcccacttcagcctcccaaagtgctgggattacaggcatgagccaccgtgcccggcccaagcctcatatctcttaacttagacctctagaacttcatgatcttcctgattttttgacttttttattgagcattttctgtgtgctttaatttcatttttcaattattttgatttcataataaaaatgaaagaaaactacaaagaagacaggaacaatcccagcaaacattgtagcaaaagcttgtccaaacaattatagctacttatccatgtgtagcaaagtacagatacaatgttacaacagtgaaaccatgttatctatgtgcttcttgggcttttttgtttgtttttgagacacagtctcgctctgttgcccaggctggagtgcagtggctcgatctccgctcactgcaatctccacttcccagttcaatcgattctcctgccccagcctccggagtagctgggattacaggcatgcgccaccatgcccagctaatttttgtatttttagtaragacggggtttcgccatgttggccaggctggtcttgaactcctgacctcactcaggtgatccgcccgccttggcctcccaaagtgctgggattacaggcatgagccaccttttgtgtgaccttgggccatgtatttgacttcccggggctgaaggcccctggtctgtaaatggggataatggcagtatcctcactarggatcaggttaatggctatcgggttaatgtgcacacactaaagacttattagatatcagctttcattttatccccatttgatagctggagaactgaggcagtaagtgggagagccaggatgtgaacttaggccattgctactaaccgctccacagcctcgcccagtggtttgccctgctcagaggagccatggagactgctgggagactgaggcccagagaggggagctggatctattttgctcatctcaaaattcctcccacttgggaaattctcaaaccatgggcgctagggacagargaagggagagaaaggtwgggggcccttgcctctcacactggctgggaacatccctcccctgctcagggcggccctacacactgagcgtagccctgccgggctccatcctggacaatgctcagtcgccrgagcttcgcacctacttggccggtcagattgccagagcctgtgccatcttctgtgtggatgagatcgtggtgtttgatgaggagggccaggatgccaagtaaggggccatcccacakggtgccakggttcagggagagggaggggctgccgggatgggccgaggcttcaccatgsccccgtccacatgcctggctcttccctcgtgccctgcctgaaatattccctgtgtaatccttagtgggtagagttgccaggtgggggtgatgactacagaggtgggattgggagccagaaggcctaaacctgtatctcagctgtcaccccggctggagtgcatgcagtggcatggtcatggctcactgcagcctctacttrctgcactcagatgatcctcccaccttagcctcctgagtagctgggattatacgcgtgcacttgtagacaggagctcttgaaggggccacagctggatcctgagcccccatctctctctctccaggactgtggagggggaattcasaggagttgggaagaaggggcaggcgtgcgtacagctggcccggatcctgcagtacctggagtgtccacagtaagsgggtcactcccctaagcatgagggaggggtgtgtcaaagtggagaccaggtaggaggcggcttcccctgggaacatcctgaggtcagcattctttcctaggtacctgaggaaggcgttcttccccaagcaccaggatctacagtttgcaggtaacgctgtrtgggcccgcccccccatttcccctggatcatgccacagacactgagaccacccagtcctaccctgcgctgtccaggtgggaaagcaggcctgggagagcaagacctgtgtctgatgccaagacgyaggtctgtggcagagccggtactccgctccagggtccccactgcaccctgtgtgccctagcacttcccagactcttcccggctctgcctccacagggctcctgaaccccctggacagcccccaccacatgcgtcaggatgaggaatccgagttccgagagggcatcgtggtggatcggcccacccggccaggccacggctcctttgtcaactgtggcatgaaaaaggtaggaacagaaagatgggctaggacacacctccaggacacaccctggcaatggagggcaagcagatggatgttgcggagagccctggacctgcccgaaatccctcactgatgcaaatttgggccagagaattgtgcaaaatggggctcaatagataaagccaggaatgaatttactgttgcttaaaaagcaaatcaacagaagacagtcctcatgctccaaacaaaaccctgcagaaacaagttgaaagtcactctggagctgctcccatgtggcacagagccaagctgggatgagggcattaatttgccgcctctttatcctcaagcctcctcaaatcagaggcagaaacctttacatgtatggagtcccttcctgtcagaaagcacaacccaagcgcagtggctcacgcctgtaaccccagcactttgggaggctgaggcaggcgggtcatttgaggtcaggagtttgagaccaacctggccaatatggtgaaaccctgtctytaataaaagtacaaaaatgatccaggtgtggtggcacgcatctataatcccagctactcgggaggctaaggcaggagattcacttgaacccaggagacagaggttgcagtgagctgagatcgtgccactgcactccagcctgggtgagagagccagactccatcttaaaaaagaaaaaaarraaaaaaaaagttgcagagctaccaaaatgtagaaaactgagtttcatctacttctatcctgtgccatgagcgccccaaaggtgcatgtttggccagtgacctgtgttttgcacaaatgatctcttgtgagcaggttcagccggtgccaggggtggagggtggcaggttgacctggaccccttggtcccttgccagccccggggctcccctggtggcatctggaagagccgtggcccctgctgatcttgagaggaatggcacccatttcttctggcttctccccaggaggtgaagattgacaagaacctggagcccgggcttcgggtgactgtgcgactgaaccagcagcagcacccaggtatctggaaggttcyccaacccctgggttggcctgatgagctccagggttcagccacctgcttccattccctcaccccatctttacagactctgttacccctccagactgcaagacctaccatggcaaagtggtatcatcgcaggaccctcgcaccaaagctggtctctactggggctacaccgtccgactggcttcctgcctcagtaaggacagaccttacttctctgaatatccatccatccctctgggaggtggccgggagccttgcctgacccaaatatcagaccagggtttttgtcctgtcaacttgctgtgtgtccttgggcaagtccttyccctyctctgggccttgttctccctggatgcactgcctggaatgctgttaaggactactgagcaaaagtatcattattgatcaataatgtttctgtagggttgggaatggaggcaaaagggccagagaagtcagaggcccacttcatgttcttggtgcctcttcctatccagtctctgccctgttccccagccaagcacaggcttggtgtctgccctgctcagtccttgactttccaggaacagctctacccacccctgctcggtacacacacacccctgcctcartgcacacacaggcagagctctacccacccacccctaccttagtacacacacgcacacacacacacacacacaccacacagctcttcccacccacccccgcctcagtacacacacacataatacccggagctatggcttgtggggagcaggacctgcactgagctggccccacccccaggtgctgtgtttgctgaggcccccttccaagatgggtatgacctgaccatcgggacgtcagagcgcggctcagatgtggcytctgcccagcttcccaacttcaggtgtgtacctcctggggctgcggccagggcagraggaatgtggccaggaacctgcctggtgggtgaagctgcacagatgggcccctgctgtctggggtggggagggactgaggtctgggcgctgtgctgggtggggcctcggtggccgctcaggtgaccccctcttacatgggccaggcatgctcttgtggtgttcgggggcctccagggtctggaagctggagcggatgctgaccccaacctggaggtggctgaacccagtgtcctctttgacctgtacgtcaatacctgtcctggccagggtagccgtaccatccgcacggaggtgagcccgcctgcctccccgactgccagccrctggggccttgggatctgtccgaggggcgggtgctactcttgccctgtcacccacccttgcccgtggctgccttgtctggaggtggtcctctcatcccccttggcctcttgccacagcgacgagacatgagtgtagctgggagtcaaccatgggtgctagtgcccgtcctgtgctcccagactggstgacccagggggccctgcccacccctgctccgggcctctggttccttagccgtgcgctcagtgatctcccagggccctggttctgccacttccttgtgtgtgaccackgtgggcacagcagctctccccttggggtctcacttgcatctgtcccacgggggaagccacgtgcagctggagccttcgtcctggcctcatggaacctgtgtacccacttttggggtcaggcataggacgctgtgctacgggaactctgctgggaaggctggtactcccatcagtctcgccgggccgacagccctgtctacccatycctaaggccttgcccaagcygagcactctgagcctgacagccataccccccagcaggaaccctggctgccacccttccaacccctgcacgaggggtgaaaacttcttgcccctcttcttgccctcccctggccctgggaggtgggcgttgttaccttcgcccccattttacagaagaggagcctgaggagcaggctgtgtggtcctccaggtggcaagtgtgcagtgtgaacctgggcctgtcattaacctcaccaggccctactaaggacaggggacmccagtgggccrggtctcgggcagccaggcactgaagacaggctgggagcgggggcacccgctagccccccaggccccagcccactgccacgcttctcttccaggaagccatcctcatctccctggccgcsctgcagcctggcctcayccaggcgggtgcccggcacacctgaaagttctaaggggccgaggacatsagtgaagcagcagtgaaaccaggggctctgcaggtcacttgggacggacgccaccagacttgtctccaaaaatcacsacctttaatactccccggcctgcacacacccacagtctcactgggctccaccctcacttactgcccgccgtgatggccttgaggctgcctgcccgcgccaggatgtttggcacaaagagcagccccgaagcccgctcaatgctctcgatgggcaccaggaagcgctccagtgggatggcctcatccacaggtgcgttgggcatcacgtagrtgmggagctcaatttgcccacctgctgcctccaggatcagcaccttgaagaagtgtgtgggcactgccacgtggttcttgccgatgacctggtactttacrtaggatttcccatcagcctctgtcctgtgggcagacccaggcacacgtgggcagggggcctggatgaacccaaagccacctcttccaggcagccttccctgatctgtcctctaacttctgtcaacctgcaggaccacgccctcactgtgagacttctgtagcctgcctggctcctccttgagsctggaactctctccagggtggttaactctttccctctgttttccttatgcccaacactgggtcaggcagagtgggcgacaataaacgctgctaggagaatcgagccttctgaatattcacattcgtctgaggggagacttaacgactgtccatctctccccacagaggtgagcaacaagtgggcaaggaccatgacaggtgayatcccagcaccagcacaggtgccaggacaccggacgggggctccccctcagcagagtctcctcccttccaccaggccctaggaggcacctgctaatgaaatttgatcagtgccccaaccaccgccttggccagcctatgccgagcccttaccatggaccaggccctggggaagcatgtgacatcaaccaagaggtcacaggttttgcagagggggacacaggtcatttgcccacagcaccaaggaactaggtgatgaggcctggactccatcccgagcctgtggattccagagtgagctgctcagcctggacctgttgcctctcagccccagccctctgcaggccagaaaaaccacggagcacacccagaggtgctcagttgcttccacctgagaggcagggctgcacaggagcaagagtggaggccctgggtcaggcagatctagattcaaactcccgagaagggtggagggaagtgctccaagcagagcagagactgaaggcgggagagcctggtgcaccgcggacctgcagggggaaggcrtgagagctcggtgcactggggacctgcatggggaaggcgggagagctcggtgcactggggacctgcatggggaaggcgtgagagctcggtgcactggggacctgcatggggaaggcgggagagctcggtgcacctcggacctgcagagggaaggtgggagagcttggtgcaccgcagacctgcagggggaaggcgggagagcttggtgcactgcagacctgcggggggaaggtgggagagcttggtgcactgcagacctgcggggggttccatattggcagaacaagattgggtgggcatgccaagaggtgacagcagggagaagcgggggcagattcagggcctgctgctgcccatgggcagaggagagatggtcaggggtacccgacaggtctttggctgtggaggtggaatgaggggactcgaggcagggaagctgacaggcttgccaagaaaccagatgagtagggaactggtattgacccagagcctggggcaagcctggccctgtgagtggcagtaggggcctcrggtgagtgggaggttctgccgcccccctggtttccaccttacctgggcaggaagagtggccctgtgcagacatagacgttttggtagctgcgggtcaagctgcggctatatttctccaggttgttccaggcattctggttgaggtggggcacctggtaggagagatagggcttagcaggactgtggctgggacccttcctcctctatcagagggccgccccaggtcctgaggggatggacaggctcagagatatccagtgagacaagcggggggaaactgaggctcaaggaatgaaagtcactccctgaaacccagggctgatagagtgctagccaccaccctctgtccctcccacagcccaggtgtcaaagtcttttctcagctcccaagagtcgaatgaaggaagagcctgtctccacctttcagagaggactgaggcctgtccccagccccacccagggtctcctgggaagaccagcccttccaactaccaacccgttccttttcccagtctgagccacaggaagagcctagcggggaatgycatgaatcgacctccatcctgagctctccaggcctgggacaatggaaagtggatagggggctgtcttcccagaaggaagctgggtcagaggttggtgccccatgggctccacccagagccccatggcagtctccatccattggtgccaggacctgctgggaacaggctgagagggtggttggcccagtgcacagtgcctggcactaacaacctgatcgtgggccaggtgtctgcctcgaaactgcctgaaggcaggcagggtaggacaatgtctggaggctcacggttttatagactaggggtccccaacccctgggctacagaccggtaccagaaccgggccacacagcaggaggtgagcagcaggcgagcaagggaagcttcatctgtatttacagccacccccccattgatcccacagcagcctgagctccgcctcctgtcagatcagtggcggctggagattgtcataggagctggaaccctatggtgaactgcgcatgtgaggaggttgcgcgcttcttttgaaaacctaatgcctgatctgtcgttgttgcccatcacctccagataggactgyctagttgcaggaaaacaagctcagggctcccacggatcctacattactgtgagttgtatatttcactatatgttacaatgtaataataatagaaataaaatgtacataaatgtaacgcacttgaattatcctgaaacccgccctcacccaccaagccgtggaaaaactgtcttccacgaaaccgcaccctggtgcccaataggttgggcgctgcggttctacaacagacagccttcttctgctgtgtgacactgtgcccgtcactttgcctctgtgagcctcagcgcctcatcactaccgcaggaggaaggtgaataacggtattatccccatttttttgacgaggaaagcgacgctcagggaggtgcccagggttcgcagttgaagctcaagccctggtcggcctgcagaccctgtgcctggagcccagtgctcctccctcccgccacgggatgtcactgcgatgcctgaccgggggcgcgttgggcagctgccccgttctgcagaagaacaaaccgaggccccgcgaggccaggcgccggcccckcattccgcgaccggcccggggcgcgggcgctacctggggcgcgacgttgctcaggtagaacgtgtcgtccatggccttctggctccagcggtggttggcggcggcggccaggtgaccgcggtcgaagccactgccgcggtagtcggcgttggtggcacggtggtacgcgtgcaccgagtcgtcctcgcggaagtcgcactcgcgccggtcgccgtcgccgcggagacgctcgggtcgcagctgctccaccacccagagcgcgccgcgggtgcgcgggtcgtagcacagcacgtacgactcgcggctcttgagctgcgccagccccggcagcccgtacttggccagctcgcccgggccgcggggtcccccgggcacagggggcaactcggctgccgccgccacgggcagcacgggcagccggcccagcagtcccggcgccgcccgcgcgtcctcccgccgccgccgccagccctcgacgaccgcacccagccccgcgcccracgccagggtcaggccggcccgcagcgcccgcatggccggggagcgacctagcggcgggcgacccgcgaggctcttaaaggagccgcgtcgcgggatccaacgagggcacagggctgctggggccgcggacgatagcgtgacctcccttccactcacaaacactgccaagggcttgggcctcggaacccagaagggagcagcagagcccaaccgggtgtccccggcgtcctttctttgcgcatttaagacgccggtatgaggggcgtggcatcgtcgcctcagctcgcgattggccaccatcaggcctggctccgcacccgcctcgcaggccccctgctggtcgtggggtgggagacactctctcctctgcgcctgcgcagggagctcctgcttaatacgctccgcggaagggtcaagcactgtcgaaagcttttactgtcactgcttagtctcaccctctacaccgctcggagagtgagctcctagttcgcagagcaggcacagggccccaggtatatctggccctaggctatcctccatgacaccataaaataagccccgcaattctaccagattggcaaaggtttcttttttttttttttttttttttttttgagacggagtttcgctctggtcgcccagactcgagtgcaatggcgtgatctcggctcactgcaacctccgcctcacaggttcaagcgattctcctgcttcagcctcccaagtagctgggattacaggcatgcgccaccacgcccggctaattttgtatctttagtagagacagggtttctccatgttggtcaggctggtctcaaactcccgacctcaggcgatccgccggcctcggcctcccaaagtgttggcattacaggcgtgagccaccgcgcccggcccagattggcaaagattttaattaacagcagtttgaggacaaggatgcagacggctgatgctggctgctggctggaacagaaacctggggcgaatattccaaaaaacagcttgacagtacagtacaagcgaagccttaaaaaggttcataccgttcaacccacgcagagggctgagctggggaaatctcgggaatgcaaggatctcgaacgcaaatattcaccagagtattacactgccggcaggaataagcaaaatattcagaaatatggactggttaaggacttttattttttgagatggagtctcactctattgcccaggctggagtgcaatggcgtgatctccgcgcagtggaacctctgcctcccaggttcaagtgattctcctgcctcagcctctgaagtagctgggattacaggcgcgcaccaccaggcccagctaattttttttttttttgagacggagtctcgctctgtcgcccaggctcactgcaacctccgcctccttggttcaagcgattctcgtgcctcggcctcctgagtagctgggactacaggcgcgcgccaccacgcccagctaatttttgtacttttagtaaagaatgggtttcaccatgttggccaggctggtctcgaactaactcctgaccttgtgatccacccaccttggcctcccaaagtgctggggttatagacatgggccacccaacccagccactcttagcatttttttttcctttaaggaaaataaggtcttgtgctgtcacccacacggagtgcagtggcaagatcacagttcactgcagccttgacctcctgggctcaagccatcctcctgcctcaccctcccgagtagctaggaccacagacacatatcatgatgcctggctaacttttaaattttttatagagatggggcctcactatgttgtccaggctggtcttgaactcctggcctccagtgatcctcctgccttggcctcccaaagttacaggcatgagccactaagccctcctgaggtcagtagtttgagaccagcctggccaacatggcgaaaccctgtctctactaaaaatacaaaaattagctgggcatagtggaccgtgcctgtaatcccacctactgggggactgaggcaagaggattgcttgaacctggagggcggaggttgcagtgagccgagatcatgccactgcactccagcctgggcaacagagtgagactctgcttcaaaaaaaaatatgggacagggtcttgctttgttgcccaggctgttcttgacctcctgggatcaagtgatctgtgggcctcagcctcctgagtaaatgggactacaggctatggtgtatcaccatacccagctactttcagcaattttgaaatatacattaactatagtgaccatgctgtagtttgtgttttttttttttggagacagagttttgctcttgttgcccaggctggggtgcaatggcgtgatctcggctcaccacaacctctgcctcccaggttcaagtgattctcctgcctcagcctcccgagtagctgggattacaggcatgtgtcaccatccccagctaattttttgtatttttagtagagacagggtttctccatgctggtcaggctggtctcgaactcccgacctcagatgatccacccacctcagtctcccaaagtgctgggattacaggtgtgagccatcgcacctggccataccatgctatagttctaaaaaaaaaacattcctgggccgggtatggtggcttaggcctgtaatcatagcccttttggaggccaaggtgggaggattgcttgaaccaaggagttcaagaccagcctgggcaacatagtaagacccccgtctcaaattaaaaaaaaaaaaatcctcctgtctagctgaaactgtaccctttgaccaacatttccccattccccaccgccccaactcccaccaatccccagactctggtaccatcattctactctccacctctatgagttgttttacattccgaatataagtgaaaccatgtcgtgtttgtctttctgtgcctggcttatttcacctaccgtaacgtcctctaggttcttccatgttgtcacaaatgacagaatctccttttttttttgagggtgaatctcgcactgttgcctgggctggagtgcaatggcacaatcttggctcactgcaacctccccctcccaggttgacgcaattctcttgcctcagcctcctgagtagctgggattacaggtgcacaccaccacgctcggctaattttgttgtatttttagtagagatggggtttcactatgttggccagactggtcttgaactcctgacctcgtgatccacctgcctcagcctcccaaagtgctgggattacaggcgttagccaccacgcccggccttgtcttttttttataagccattctgacaggtgtgaggtggtatctcattttggttttaatttgcatttcccagatgatccatgcattgttcagcattttttcagatagttgccagaaatttttatgtctttttttatttttttttgagacagagtctggctctgtcaccaggctggagtgcagtggctcgatctcggctcactgcaacctccgcctcctgggttcaagcacacaccaccatgcccatctaatttttgtatttttagtagagacggggtttcaccatgttggccaggatggtcttgatctcttcacctggcgattcgcctgcctcagcctcccaaagtgctgtatgtcttcttttgagaaatatctattcaggtcctttgcgtgttgtttaaatcacattgttttcttgctattgagatttttgtttgtttctgtttttgttttttagacagagtcctgctctgtcacccaggctggagtgcagtggcacgatctcggctcactgcaacctccgcctctgggttcaagtgattcttgtgcctcagcctcctgggtagctgggattacaggcacccaccaccactcctggctaatatttttgtagttttagtagagactgggtttcaccatattggccaggctggtcttgaactccggacctcaggtgatccacccgcctccgcctcccaaagtgcttgaattacaggcatgagccaccatgcccagctgctactgagatgttttaagtacttatatatcttggatattaaccccttatcagatgtatggtttgcaaatataatcatgcatcacataaagatatgtaatccaagctaccctgggatgctgaggcatgagaattccttgtaccccggaggctgaggttgcagtgagctgagatcgtgccactgcactccagcctgggcgacagagcgagactctatctcaaaaaaaaaaacaaaccaaaaaaagtatgccaggctaggtggctcacacctgtaatcccagcactttgggaggccgaggcaggtggatcacaatgtcaggagttcaagaccagcctggccaacacggtgaaacactgtgtatactaaaaatacaaaaattagccgggtgtggtggcacrcacctgtattcccagctactggggaggctgaggcaggagaattgcttgaacccgggaggcagaggttgcagtgagccgaggtagtgtcactgcactcaagcctgggtgacagagagaaactcttgtctcaaaaaaaaaagtaataataataaaaaataaagaatgatacacctgtctgtataaagcgcttaccatgaatggagcttctgggacaggaagttgctctgcgtgggtcactgaggagtgaatgtgaaggcccagaacaaagtctactctacgctactgtagactttatcaacactatatttaggctacactaaatttatttgaaatacttctttcttcaataataaaccttagcttactgtaacttttactttttttttttttttaggcggaatcttgctctgttgcccaggctggagtgcagtggcgcgatcttggctcactgcaagctccgcctcctgggctcacgccattctcctgcctcagcctcccgagtagctgggactacaggcgcccgccaccacacctggctaattttttgtatttttagtagagacggggtttcactgtgttagccaggatggtctcgatctcctgaactcgtgatctgc

SEQ ID NO: 95487 - DNA, 51008 bp, Homo sapiens
gctgcccaggctggagtgcagtggcgcaatcttggctcactgtaagctccacctcccgggttctcgccattctcctgcctcagcctcccgagtagctggaactacaggcacccaccaccatgcctggctaattttttgtatttttagtagagacggggtttcaccgtgttagccaggatggtctcgatctcctgacctcgtgatccgcccgcctcggcctcccaaagtgctgggattacaggcgtgagccaccgcacccggccaaaatacctattttctagtctcctaagttacccgagatgcagttgttaagcattaaaacagatgccaacaggggttcagggaaattccagtttctatccctttgggttttttgttttgttttgttttgtttttgagatggagtctcgctctgtcgcccaggctggagtgcagtggcgtgatctcggctcactgcaacctcagcctccagggttcaaacgattctcctgcctcagcctctcaagtagctggaattacaggcgcatgacaccacgcccagctaatttttgtattttttagtagagacggggtttcaccatgttgaccaggctggtctcaaacttctgaggtcaggtgatccacccacctcggcctcccgaagtgctgggattacagatgtgaaccgccatgcccagaccctttccctttgtctgattgatatcattccacccctgttcactgaaccaaccagaggcgtgtgcaccttctggaggctggaatgattcgtgttagtctgaatgcctgggctttggcataaaggccctgagtccatcttctggctctgctcctgatcagctctgtgaccctgggtgatggtcttagcctttctaggcttcggttttctgatctgtaaagtagggatgataataacattacctagcctgtagtcccagctatttgggaggctaaggtgggaggatcctttgagcccaggagttcaagggtgcagtgagctgtgaccgcactactgcacccaccctgggcaacagagtgagaacactatcctatctccagcaggcacgcagggccccataacttaagctcatgtgatcttatccctgccctcttcttggccctagaatcctcaccatgtatttgctctgcctagactgggctgtgcattcctctgggaaggggtggtggttatctcgctcatatcccagggccagcacagggataaacttaaaattgtttggaatgaacaacaacaaaaaaatcagggctgggcgtggtggctcattcttgtaatcccagcactttgggaggccgaggtgggagtatcacttgagtccaggagtttgagactacccaggacaacatagtgagaccctgtctctatgaaaaatttaaaaagtagctgggcatggtggtgtgtccgtagtcccagctactcaggatgtagtcccaggctactcaggaggctgagatgggaggattacttgagcctgggagaccaaggctgcagtgagctgagatcatgccactgctctacaacctgggtgacagagtgagactttgtctcaaaaaaaaaaaaaaaaaagaaaaagaaaaaagaaaaaaagaaaaaagaataggcggggcatggttgcttacacctataatcccagcactttgagaggccaaggtgggcagatcacttgaggtcaggagttcaggaccagcctggccaacacgatgaaaccccatctctactaaaaatacaaaaattaagtggtcatagtagcatgagcctgtaatccagctactcgagaggctgaggcaggagaatctcttgaacccagaaggcgaaggttgcagcgagctgagatcacaccgttgcactccagcctgagtgacagagactccgtcttaaataaataaataaatcggtcaatttggtctaatccagtgaatgtctcaagtagcattattgaggcatattttccatatcataatttacccttttaagtgtgcaatttagggattttaccacatcatcatagtcaatttaccaacctactatggtgtaaccaccaacataagtcagttttaaaatattttcatcatcccaatatgatctctctttctgagacagcgtcctgctctgttgtctaggctggggtacagtggcggaatctttgtacactgcagcctcaacctcctaggctcaagcgttcctcccacctcagcctcccaagtagctgagactacaggcatgcaacaccacacccaactaatttttgcattttttctagagtttggtctcattatgttgaccaggctggtcttaaactcttgggctcaagtgatcctcccaccttggcctcccaaagtgctcgtattacaggtgtgagccacaccacacctggcctctcttttttgttttttttaactgacctatttcaaagcactttgcagacatttttaaatgtcacccctacacccttcatcatgtatctcctaagattaaggagagctcttccaaaaccacaatacccataccgtcttgctttgcttttcatttctttttcgagatgggatctcattctgtcacccagactggagtgcagtggcgcaatctcagctcactgcaacctccgcctcccaggttcaaacaattctcctgcctcagcctctcgagtagctgggattacaggcacctgccaccatgcctagctaatttttgtatttttagtagagacagggtttcgccatgttggccaggctggtctccaactcctgacttcaggtaatccacgtgcctaggcctcccaaagtgctgggattacaggcgtgagccaccaygcccaacctgttttgttttttaaattcaagatctaatcaaggattaaaccttgcatttcgttgtcttgggaagccagaacccagactgaattgaatccaggttaatgaacattgctagcccatgtgaaaacttgcacaggccaggcgcctggggaaagtgcagtgcaccctgaatctcatttaatcctcagaacgttctgctaggtgccactgcccacattttatggagagaggtggtgtcctccaggctggagtgcaatggtgcaatctcagctcactgcaacttctgcctcctgggttcgagattctcactcctcagcctcctgagcagctgggattacaggcatgggccaccacgctcagccaatttttgtgtttttagtagagatgggatttcgccatattgtccaggctggtctcgaattcctgacctcaggtgatccgcccgcctcagcatcccaaagtgctgggattacaggccaccgcgcctgatcctaaataatcatttttaaaatcaatcaatccttccttcctccttcctccctcccctgccttccttctttcctttctttctttcttccttcctttctttctctttctttctttctcttttctttctttctttcctctttctttcttctttctttctctttctttctgtcttttccttccctccctccctccttccctccctcctccttcccttctttccttcctctctccctctttctttctttcttctttctctgtcttttccttccctccctccctccttctctctctttttcctttctttctttctttctttctttctttctgtctgtctcttttccttccctctctccttcccttctttccttccttcctttctttcttccttccttctttccttcctctctccctctctctctcttttttctttctttcttctttctttttctttctttgtcttttccctggcgcctggtggcaggcgcctgtaatcccagctacttgggaggctgaagcaggcgaactgcttgaacccaggaggtggaggttgcagtgagctgagatcgcaccactgcactccagccgggcgacaagagcaaaactccatctcaataaataaatacatacatacatacatacatacatacatacatacatacatacatgtatacatacatactattggaatctagcatggaggttgccacccccttttgctggtgtggggtgcagttctgagaggcagggcagacacccattggggccttttgctaaggaccgaattgtgtccccctagaatttgtgcgtcaaactccaaatccccaatgtgatggcgttggagattggggcctttcggaggtgattagggtttgataaggtcatgagggtggggccctcaagattggatcagtacccttataaaaagagacaccagggaacttccttctactctctctcrccatgtaaggacacagtgagaaggcacctggatcttggacttcccagtctccacaaacataagaaataaattcctgttgtttaagcacccaatctgtggcattttatttatttatttatttattttagagccaaggtcttgttttgtcacctgggctggagtgcagtggtaccatcatggctccctgcagcctcaaacggctgggctcagggcatcctcctgcttcagcatcccaagtggctgggactacaggtgcatgccaccacgcttagctattttttttttttttttagagatggggtcttgctatgttgtccaggctggtcctgaactcctgggttcaagtgatccttctgcctcaggcttccaaagtgctgagattacaggtgtgagtcatcacacctggcaatggcattttattatggcagcctgagctgactaaggtagacagcagggaaagaagcttccatgcattcctctttggggaatctgaactttccaaggcctgcctccctcctctgcaggacgctggaacatgttcagtgataggtgggcctgaggctgtgcatcccatgtccccagagcctctctgttgctagaaaatgttctttctttccttgtgattaaggagaaatctgccttcctgggcctctccacccctggggcctgtctctactactctactatttgggtttctagaaccctcccatctcctttggagacatcctctttcttttttcttttcttttcttttttttttttttgagacagattcttgctctgtcacccaggctggagggcagtggcacgatctcagctcactgcaacctccgcctcccaggttcaagcgattctcctgcctcagcctcccgagtagctgggattgcaggtgccggccaccacgcccagctaattttttgtatttttagtacagatggggtttcaccatgttggccaagctggtctcgaacctctgacctcatgtgatcctcccgcctaggcctccgaaagtgctgggattacaggcgtgagccacctcgcccagcctcagcctttctcctaatcatcaccttgccctgggcgggtcctaactgccgggagcccccagcaagcctcatcttaacaagccagaacatagcccacatgaggggatgggggagtgactggaagtcactgggccatggttgcaaaggtggcgaatggcagaggagctgggacacacccacagggtgtctgaccgtgattttaactgctcttccacgcctccgtgaatgaatgaatgaatgaacacatgttctactaccagactttgtttttcagaaatatagcaaccctttggaaaaatcataggtccygtcactaacaagttgaatttagttatcaagtcactttcttggttagagaagaggaaaggggaggaggagatgggaagaggaggagggaggagggaggatgaagaagctctgacgggacccagtagtgcaaggcagagggtgtctccggaggaagcttcccttcactgtggcaatttcctgaggcttggtcttggcttctcgcagcaaacagggtcttcatctgcccagcatctgaaccctaaccgcagagggttgagagacagaggagggggcccccacagggcctgtggtttgagtgaggaaagcaattgtgtaaaagtggagagcctttccgcagcccagggccagtccctgcctgagtcatgctagagagagagggaggagcaggcaggatcctggagctccctggatttcaagctggccgtggcctcccgggtgacgtcactgcggtcattgcctgatgagctcaggcagaggcgcctggggacggggtaagtggtgagagggagggccacggctgtcttgggtgaaccccaggctccagttggagactctgctgtggcragaggtccaccccacccccgggcgccatctggggacactccggcatcccattccaatggctgttctgccagggcctcaccctggctcttggtcttaggactgctgtgtttgcctgcctaggtgtgcgggtcaatctgtgcagagctggggagcaagtgatcactgggagcaaagacagctttcagcctggagggagaagcatttcttcccgctaggataatggccaattcagaggccctagaccatgctgtccccagagcctgggtgcattgctgatgacgagatcccagccgggggtcaggcctcccaggactgtcaagctgggctgcttgagtccctggctccaggggtgggggtggggctgaatggcaagggagagagctggtccattccaggctccaacctcagaaccctctgggagtaagattacccagccctgtgctcgggctgagcaatcaactatagcgcacacgctcctttactgtggttcygagatagttaattgraatctggatactctgggtaaagtcagaacatccagctgggcccagcatgggagatcagcttgatgagtctcccgcaccctattctgggcatcagcagagtcagttctctgaagagtctttttcatatatatcacatagatagagagataggcaggttggtaggtaggtagataggtcaataggtaggtaggtaggtagttagacataggtatctatctatctatctatctatctatctatctatctatctatctatctatctatctatcttactgtagtttagcacagacattggttaagtcatgtcactcctctgaacctcaattttctcatctctaaaatggggatattaggccgggcgaggtagctcaygcctgtaatcccagcactttgggaggccaaggcaggtggatcacctgaggtcaggagttcaaaaccagcctggcaaacatggtgaaaccctgtctctactaaaaaatacaaaaaaaattagccaggtgtggtggcacgcacctgaagtcccagctactcgggaggctgaggcaggagaattgcttgagactgggagccagaggttgcagtgagccaagatcacaccattgcactccagcctgggtgacagagcaagactctgcctctaaaaaatataaaataaaataaaataaaatasagataataatagacccacctcctakgattgctacatgagggcaatgaactgatctacataaagcaccaagcatagtgtctggcaggtaaagttggccagtaatgtcatcaacattgttatataataataattattgtcattaattttattgcccaactggcgtcccagcctgagctgaagctctgtctcttggccaccctgtccaggaggtatgagcctgttttcttgggccagatcttctgcttggcttgaagccaaagtgtgacttcccaacctctgcatgcagccccctccccagggtgctggttggtctctcctctcagctgctgctgcaatgtgcttcacagtgacaacacacccacagctccagtggcagttgatgcrtccttgtggccagaatcatgcctggcaggacgcatgtggcaaagggcttgtctgggtcggtgctatgctctctgtgccagggaaaatccagctcttggagtgggtgagagcagggaggccttcatggtggtggagttaggggatgggagagacagggaagcaatgaggggcttgcacagaaaatatcgttttaccctaagtacccagatgacaaatgagacccaaaatgacctttggcaggggccgtggcttctggggaccccagcgtttgacagagcaggtggcagagccgcaggacccagctctagtgtgtggcagtttgttggtttcattgccgttgctgggccagacgtgcactgaggaccccgggataaaggggtttactgtgaggatgctggggcccaagacctcgtgggcacaggacccaggygaagaccccagggcccgtgaagagccgaagtggatttcactgtaggggcttcttgtcatccccaggggtacacattcttgtggccgctcctgctgctggcagccgagtccttggccacgagcccagcctcctctggggggtgggtctcagcccaggcccacatcgggctgttgatttcattggctgctggctggcctcgccattggctgcttgcagccaggtgctcacccctgcccatcagctgtggccatggtggtgccagcagggagaggagcatgtgacttgcacgtgaggagtagccgaaggcttcttccctaggggacatgtgtctacctcggggcgatgcgtctacctgtggatggggagggaccccttattggggcccaggcaggtccgcattctgggccttgtccagtacaccctctggtttccaaccagccaaccaggctcctgggggacccaccaaccctcccctttcttctccgtacttctctcctcacctggtagacacacatgtcttcattttggttcttacgttgagagacaaacccatccttccctccctttcttccttcctccctccctccctccctccctcccttccttctctctccccttccttccttcctttctttctttctttctttctttctttctttctttctttctttgtttctttctttctttccttccttccttctttctttctttctttgttggtttctttctttctttgtttctttccttccttctttgtttgtttgtttctttgtttctttctttctttcttttttcttcctttctttctttctctctgtctctctttctctctttcttttctttctttcttgcacctaggttggagtgcagtggcatgatcatggctcactgcagcctcgacctcccagcctcaagtgatcctccctcctcagcctcctaagtagctaggaccacagacatacaccaccatgcctggctattttttttttttttaactttttgtagagacaagatctccctgtattgcccaggctggtctcagactcctaaggctcaagtgatcctcctgcctcgatctcccaaagtgctgagattacaggcatgagccactgcacccagcctgagacaatgctttctctaccagtctctaccccattgcactaatagtcagtggaaggctgcagaccttcacacgtgagtccctggccctgggcctcaggcagggtttgctgggtgtatgtttacccaatagttgtgggaaagtgggtgctgacctcaccgggtgcggaggacagggtgttaagcggctcccacaaaacactccctcctcctcgggctatgttggcagaagcacatctaaccctggcgacccaaggtcatgagggggatgagttaacttccttgtgtgtcctaagcggctgctgtgtatttgttgactgtctcagagtaaatgtggttggtttactcactttctaccccttttagctggtgggactggttaaaagcttgtcctctgcataaaagctttgcctctgggattagcctggcctggttgagtctcagttgttgaaataacaacagcaataccaatagcagtgatagcttacatgtaacaccaggtatgatttcctacctggactatctcagtaatcctaggaggaaggtctattatcatgtccattttagagaaggaagaagtgaggctcagtatggtgctcagctaggaagcagtagagcctggtggtaaccaggcaggggctcagagcttctctccttcctgctccttagctgatgggccatcgtgggcaggttacttggcctctccaggactcggattccccttgtctgcaaatgggtcaagaaagtttaatgtggctgggtgcggtggctcacacctgtaatcccagcactttgggaggccgaggtgggtggatcatgagatcaagagatcgagaccatcctggccaacatggtgaaaccctgtctctactaaaaatacaaaaattagccaggtgtggtggcgcacgcctgtagtcccagctgcttaggaggctgagggaagagaatcacttgaacctgggaggcggaggttgcagtgagccaacatcataccactgcactccagcatggtgacagagccagactctgtctaaaaaaaaaaaaggtttaatgtggcagggtacgctgattcacgcctgtaatccctgcactttgggaggccaaggtgggtggatcacttgaggtgagagttcgagactagcctggccagcatagtgaaacgctgtctctcctaaaaatacaaaaaattagccgggcgtggtggcaggcacctgtaatcccagctactccggagactgaggcaggagaatcgcttgaacccaggaggcggaggtttcagtgagctgagatcacaccactgtaatccagcctgggtgacagagcaagactccatctcagaaaaaaaaaaaaagaaaaaagaaagcttaatgcatgaagtggttacagaaaataagcacttttcaaacagtgaaactcagcccctagtttgggattattatcttggatggaaaggggagttttttttgtttttgtttttgtttcttttttaacatttcccatttcacagatggagggaagagtgatttttgctgctctttctgcattaagttagagtttgtagaggtgacctttaagaccagcttgctcaaaatcagcccgcgacttgggcacctccctcaaaggcagcttcatctttgtattgtttgttttgtttttgagatgggctcttgccatgttgcccaggctggagtgcagtggctattcacaggcatgatcatagctcactgcagcctcgagcttctgggttggagcaatcctcctgcttcagcstcccgagtagctgggactataggcctgtgccaccatggccggctarctttttgtttctttgtagagatggggtctcgaactcctggtctcaaacagtctttctgccttggcctcccaaagtgctgggattacaggtgtgagccactactgcacctggccctagaacactttattatgtagtaaaaagtaaataactctcacccatctctttttatagaactgtgctgcccaatatggcagctacaagccaggtgtgatcaccgagggcccaaaatgtggtgagtccaaattgagtccaactgacacgtgcagtgagtgtaaaatcaacactgggccttgagacctaatatggaaaaaaaagtaaaatatctcactaataatttgtcaatattggcaaggcgtggtgtctcatgcctataatcccagcactttgggaggccgaggcgggcggattgcctgagctcaggagtttgagaccagcctgggcaacacggtgaaaccccatctctactacggtacaaaaaattagccaggcatggcggtgagtgcctgtagtttcagctactcaggaggctgaggcaggagaatcgcttgaacccaggaggcagaagttgcagtgagccaagatcgcgccactgcactccagtctgcgtgaggggaacgagactccatctcaaaagaaaaaaaagccgggcgcggtggctcacgcctgtaatcccagcactttgggaggccgaggtgggcagatcacctaaggtcaggagttcgagaccagcctgaccaacatggagaaaccctgtctctactaaaaatacaaaaattagcctggcgtgatggcacatgcctgtaatcccagctactcaggaggctgaggcaggagaattgcttgaacccaggaggcggaggttgcggtgagccaagatcaggccactgcactccagcctgggtaacaagagcgaaactccgcctcaaaaaaaaagtcatggcccctccatgaatcctcacacttgagacagtttatagacccaggacctcttgaatgaagaagaggctaggtccccttggcgaaggactttggtatgctactaaaaatttatactcccaatctttctcccaaccttcccctaaagagacctttaccagggtaactgcgctgggaaaggaaataatcagatatcccagggactactggacactggctctgaactgatactgacaccaggagacctcacctgtcacwgtggccctctagtcaaagcaggggcttatgaaggtcacgtgacccacgagttttcactcaggtccttctcacagtgtgtccagtgggtccytgagcccatcctgcggctattttcccagctccaggtgcataattggaasagacatatgagcagctgacagaatcccacattgatttcctgatggtgggaaaagtcgagcagaagccattagaactgcctctacctaggaaatcaaaagcagcactttattcctggatggattgcagagatgagtgccaccattaaggactggaaagatgcagggttgaagattctccccacatcccctttcaaccctcctatttgtcctgtgcagaaaacagatggatcttggagaatgacagtggattatgatacatttaaccaggtggtaactccattgtagctgctgtaccagcccgacctgatgacattattctgattggaactcgtgagcaagaagtattggtagcaataagtaatctaggtcgggcatggtggctcacacctataatcccagtactttgggaggcygaggcctgaggtcaggaatttgagaccagcctggccaacatggtgaaaccctgtctctactaaaaatacaaaaattagcagggcatggtggcttgtgcctgtagtcccagctacttgggaggctgaggcaggagaatctcttgaacccgggaggtggaggttgcagtgagccgagatcacgccattgcactccagcctggtgacagagcgagactctgtctcaaaaaaaaaaaaaaccaacaaacaaaaacaaaacaaaacaaattagccgggcrtggtggcrggctcctgtagtcccagctactcaggaggctgaggcaggagaattgcttgaacctgggaggcggaggttgaagtgagcygagattgcatcgctgcactcctgcttggatgacagagtgagactccttcyccaaaaaaaaaaaaaaaaaagtaatctagacttgttggtaagacatttgcatgtcaaggttagaaataaatatgagtaaaattcagagttctttatcagcgaaatttctgggagtccagtggtgtggggcctgtccagatgtctctttgaaggtgaaagataaattgttgcactacgcctctcctgcaagcaaaaaagaggcacaatgcccagtgtggaggcaacatatgccttatctgggtgtgttagttactccagcccatttaccgagtgacctaaaaagctactagttttgggtaaggttcagaacagggccttagtggagactgaacacctaaccgtggacaaccaaattaccatgtgacttgagcttctcatcatgaactgggtgcgatttgaccgccaagccataaagttgggtgtgcacagcagcaccccatcatcacctagaagtggtagatacatggccaggccagagcaggccctgaaggcagaagtaagtgacatgaagtggcccaaatgmtgaaggtccccactcctgcaaccctgccttctctcttcaagcacccatggctcacagggagttccctgctatcaggtgaccgaggaagaggagactcaggcctggtttatggatggttctgcaggatatgtgggcatcctctgaaggtggccaactgcagcactacagctcccctctgggacacccctgagggacagtggggaagggtcatcctcccagcgggcagaaacttaagcagtgtacctagttgtgcacttttcttttttctttttttgagacggagtttcactctgttgcccaggctggagtgcagtggcacgatttcagctcactgcaacctctatctcccgggttcaagcgattctcctgcctcaacctcccaagtagctaggatatgggtatgagccaccatgcctggctaattttttgtatttttagtagaaatgaggtttcaccatgttggtcaggctggtcttgaagtctggacctcaggtgatccacccacctcagcctcccaaagtgctgggattacaggtgtgagccaccgcacacagccatcttttctttattcttgctttttttttttcttttgttctgtcaccccagctggagtgcagtggcacgatctcggctcactgcaacctcagactcccaggttcctgagcctcagcttcccaagtagctgggactataggtgtgtaccatcacacccggctaatttttgtattttttggtagagatggggtttcaccatgttgcctgggcaggtcttgaactcctgatctcagattatccgctagcctcagcctctcaaagtgttgggattataggcatgagccaccgctcccagccacgcgctgtgtatgttcttaaccagcggcccatatatggtgctgtttctctgaaagccaaggttcatgggtctggaatcaaaaggtgaaaatgggagtggcaccactcactattactctgagtggcctactggaaaaatgtgtgcttcttattcttgtgactttattctctgttggcctaaagatcttagttccagagggaggagtgtttccagcgggagacacaacaattcctttgagctggaagttaagatgccacccggccactttgggctcctcatgcctctgggtcaacagggaaagaagggagctatggtgtgggctggggtgactgatccagatcaccaaggggacattgggctgctgctccacaatggaggtagggaagagtgtggaatgcaggagacccgttaggccatgtcttttttttttttttttttttttgagacgagtgtggctctgtcgcccaggctggagtgcagtggtgcgatctcggctcactgcaagctccgcctcccgggttcacgccattctcctgcctcagcctcccgagtagctgggactacaggagcccgccaccacrcccggctaatattttgtagttttagtagggatagggtttcaccgtgttagccaggatggtctcgatctcctgacctcrtgatccgcccaccttggcctcccaaagtgttgagattacaggcgtgagccacagcgcccggcctccttaggccatctcttagtatcaccatggcctgtggaaaatgacaataacccaatctagatcggactatgaatggcccagacccttcaggaatgaaggtttgggtgtcactccacccagataaagaatcacractggctgggtgtggtggctcacacctgtaatcccagcaatttgggaggctgaggcgggagcatcacatgaggtcaggagtttgagaccagyctggccaacatggagagaccccacctctaccaaaaatacagaaactgcgtgcctgtggtcccagctacttgggagactgaggtgggaggatcgcttgagcccgggaggtcgaggctgcattgagccaaaatcgtaccactgcactccagcctgggtgacaaaaaraaaaaaaaaaaaaaaaaaacatgaccagctgaggtgcttgctgaaggcaaaggttgtacagaaccagtagtggaagaaggtggttttaaataccagctataaccatgtggtcagccacagaaacagagactgtgattgtcatcagtttttcctctttatttttctctgcatgtgtgtctgtgtgtgtgtgkrtatatatatatatatatatatatatctttgtttcytttcctctcttactctcttatcatgtaacataagatgtattgattttatatcatagtatttaagctatgggatatcaaggagaagcgtaaacatcactctcctcttcttacctcctcttccggggaagggatgagtgtgtttctggtgtatgcaggagagttgcatcgtgttaggtggaattatgactttgctttgtctttacttggagattaagtacggtttaggaaatgtctacagggtacctagttgacaaggggtggacttgtgrtggttagtcttttgggtcagtttcattggccaaaggtgcccagattacacattgtctctgggtatgtctgtgaggctgtgattggcatttgaatccacagacacaatacagtgccctccccagtggcagtgggcatcgtcyaatctgttatgggcttgaataaaacaaaaggcaggttgggcacagtggctcacgcctgtaaccccagcactttgggaagctgaggcaggtggatcacttgaggtcagaagttcaagaccagcctrgccaacatggtgaaaccccgcctctactaaaaatacaaaaatttggctgggtgcagtggctcacgtctgtaatcccagcactttgggaggctgaggcgggcagagagcctaagctcaggagttcgagaccatcctgggcaacatggtaaaaccgtgtctctactaaaatacaaaaaattaaccagatgtgacggygcacgcttgtagtgccagctactcaggaggctgaggcacaagaattgcttgagccggggaggcagagctttcagtgagcagagatcgcgccactgtactccagcttgggctgcagagtgaaactccgtctcaaaaaagataaattaaaaaataaataaatacaatacataaataaaatacaaaaattagccaggcgtggtgaaatgcgcctgtaatcccagctactcaggaggctgaggcaggagaatcgcttgaacctgggaggtrgaggttgcagtgagctgagattgcaccagggcactccagcctgggagatagagtgagattctgtctcaaaataagaataataataataatawggcagaggaaggaggaatttgcacctttttccttgcctgcctgcttgagctgagacatctcctctcatcttctgctcttgcactgaaatttataccattggcttcctggttctcaggcctctggactctgaactgccccaccagctctcctgggtctccagcgggcggacagcagttaatggtacttctcagctgccgtaatcacatgagccaattatatggcatagtaaatctatctatctatctatctatctatctatctatctatctatctatcthtttatctctctatctctctatctatctgcatttccttgacacagggtcttactctgtcatccaggaagctggagtgcagcagtgcaatcactgctcactgcagcctcaaccttctgggctcaagtgatcctcccatctcagcttcctgagtagctgggaacacaggtgtgagccaccacgcctggctaatttttaaaaatttgattttagaaatgaggtctcattatgttgcccaggctggtcttgaactcccagcctttagcaatcctcctccctcaacctcccaaagtgctgggattacaggtgtgagctgccatgcctggctcctacttttatataaaaggatatatttatggtcatgtgcctcatgatgacattttggttaacaactgactgcatacgtgatggtgatcccatagattataatggacctgaagaattcctatcacctagtgatgtcttagccattgtaccactctaaggtttattaaagaaaaaaaaaaagacttggcatatggctcacacttatagtcccagcactttgggaggctaaggcaagaggatcacttgagcccaggaattgaggctgcagtgtgccacgatcccagcactgcactccagcctgcatgacagtgttgtctcaaaaaaaaaaaaagataactgtaaaacagcctcagataggtccttcaggaaggattccagaagaaacattgtcatcataggagatgacagctccatgcctgttattgcccctgaagaccttccagtgggacaagatgtggaggtggaagacagtgatattgatgattctgcccctgcgtaggcctaggctaacgtgtgtgtttgtgtcttcatttttaagaaaaaagtataaaaattaaaaaacaggccaggcccggtgactcacgcctgtaatcccagcactttgggaggccgaggcaggcggatcacgaggtcagragttcgagaccagcctggccaacatggtgaaacctgtctctaaaaaaaatacaaaaattagctgggcatggtggcgcatacctgcagtcccagatacttgggaggctgaggcaggagaatcacttgaacccatgaggcagagcttgcagagagccgcgatcacgccattgcactccagcctggtgagagagtgagactctgtctccaaaaaaaaaaataaaaaaaaaattgcgtccaggcctggtggctcacgcctgtaatcccaacactttgggagatcgaggcaggcagatcacttgaggccaggagttcgagaccagcctggccaacatgacgaaaccccatctctactaaaaatacaaaaattagctgggtgtggtgcgggcgcctgtaatcccagctacttgggaggctgaggcatgagaattgcttgaacttgggaggcggaggctgcagtgagctgagatttcactactgcactccagcctgggtgacagagccagattttgtctcagaaaagaaaaaaaaaattgcttgttgcttggctgggaggaagcacaaaaggatgctagctgctgtttactgctcatgttattattcataataacatgttggtatttgctatatcatgagaggccctaccaagctgattgtgtcttcagctatctctgatgttatgtttgtgtgggttttgattaggacgtgtcttccttactcgccctttgtcgagtcgtcctgagcttggaatctgggccggcttcctgcagtcacacagggccctgcacgaagaaggaacccctaggcttgctttaattttttctgtccctgtcttgaaattctcttttttttttttttttttttgagacggagtctcgctctgtygcccaggctggagtgcagtggcaygatctcggctcactgcaagctccgcctcccaggttcacgccattctcctgcctcagcctcccgagtagctggaactacgggtccccgctatcacgcccggctaattttttgtattttttttttttagtagagacggggtttcaccgtgttagccaggatggtctcgacctcctgacctcgtgatccgcccgcctctgcctcccaaagtgctgggattacaggcgtgagccttaacaatttttgaacaaggggctttgcattttcattttgtactggactttacaaatgatgtggccagacctgcttggagtcacaattcttcctgtgctaatagcagtgaggggggtcccagcaaaggatggaggctcccggcagtctgagctgagtcagcagcacatgggataaggcccctctaagagggacctttacaaactgcaacgaagcagtggttacaggggctggaaaacctgacatccaaggatgagctcacggggcagtggttgtttcgcctggaagacaagattttgggtgaactgggtggtgtcctccaatttctgaagggcagtggagaggaaaagggagagagggagtgtgtgtgtgtgtacgtgtgtgtgttctctgtggccctaaaaggcagatccagctcactataaggaaagaatcttgaagaattttgaacaaggaaagttgtgcaagaagggaacagctggcctgaactcaaacctcagctctctcagctctgcctgggggtcaagagcatgggctctggctggagccaactacatctctgtccagatctgttattcttaggtahggtcattcactggcttgatcctttatctccctctgtaacatgggcctgataatgctccacagtacagggtgatgatgctggtataaaatataaagcacctaaagggtgtctggccattaggaggtgcctaacaaatgacaccattgtttgctgttttttttgtkttttttttgacagagtttcactcttgttacccaggctggagtgctatgacgaaatctcggctcactgcaacctccgcctcccaggttcaagcgattcttccgcctcagactcccaagtggctgggattataggcacacgccaccatgcccagctaatttttgtatttttagtagagatggggtttcgccatgttagccaggctggtcttgaactcctgacctcaggcgatccgcctgcctcggcctcccaaagtgctggggttacaggcgtgagccaccacgcccagccgtttgctgttattactgttactataatgagttcctcgtgcctgggaaggttgcagttgagatggaactcaggaagttgcagagatgacccttgtatcagaagtaaaataagatgcacacatttcctccttgacaattgcagcatctggcatatttggatgattagcaaaaaccagtccgtcaggcgtgatgactcacgcctgtaatcccagcactttgggaggccaaggcgggcggatcacttgaggtcaggagttcaagaccagcctggccaacatggtgaaaccccgtctctactaaaaatacaaaaaaacaactagccaggcatggtggtgcacacctgtaatcccagctactcaggaggctgaggcaggagaattacttgaacctgagccaagatcatgacactgcactccagcctgcagcctgggcaacagagcaagactcaaaaaacaacaacaaaaaaaaaaacaaaaaaaaaaaaacacaaacaagtcataaagtgctgtccgagtgacaaaggccctcagggaaaggggtggtgcttcttgtggaatggaggttgttttggggcttggaggctactgagaaagtgggagtggtttgaaaactccagccaacttcccggtagctaatcactggctgaatccaatctgaggaatgtggagctccccatagggctcctaggaaatgggtccctgatgtgtctgagagctgcacacaggaattgcccatctcctctgcagcccgtgggaagcagcatttgtgggccgtgtgcgtgtgagcatgagactgtatgtgcctagttaatgcatgggcagccaggcatgggagggtctcggctccctctgactccagagcctctgctttgagccacactcagggtgacagcagcttccctggaaatggcagtggtttgtgctgagacaaacatttctcctcttccttctcccccatccgcctctcctgtgagtggggtccagtcccggagcttcagccaggaaatgctccttgtgtgtccacagccctgctcatcagcagtgggatgagaggcccagagtccaaggagcagcagatgggttccatcaggggctgctggactgtggtcagaactcaggcagtcacaagtgtgtttgtctctccagagacagaaggagagggcggcatcacagtcagctccaggaattcccctgcatttaacgcacacgttcaggccgtctgtctttccacaaatatttaccaagcacagctctgggcgcacaccaygctaggcactgtaaattcagccataaacaagacagaagctcagtttcagttttctcttaccataaaactaaccatcttcaagtgtgcaattccatgtcattggtacagtcacaatattttgcaaccatctttaccatccatttccagaacattttcatcatcccagaagaaaactttatacgcatgaagcagtcattcccatttccccaccccgcctacccgctggcaaccacaaatctgctttctctctctatagatttgcccattctggacattttatatgcgtggaatcatcataaaacatgtgactgcgcacctgttgtcccagttactccagaggctgaggcagaagaaccgcttgaacccaggaggtggaggttgcagtgagccgagatggcaccactgcactctagcctgggcaactctccgtctcaaaaaaaaaaaaaaaaccaaaaaaaaaaaaagtgaccttttatgtctggcttctctcccttcacatcatgttttccaggttcatccacgtcacagcatgggtcaggatttcatttctttttatggctgagtaatattccattgcgtggataccctgtctttgctttcttttctttttttttttttttgagatggcgtttcattcttgtcactcaggctggagtacaatggtgtgatctcggctcactgtaacctccacctcctgggttcaagtgattctcctgcctcagcctcccragtagctggaattacaggcacccaccaccatgcccggctaatttttttgtatttttagtagagatggggtttcaccatgttggccaggctggtttcgaactcctgacctcgtgatctgcccgcctcaacctcccaaagtgctgggatttcaggcatgagccactgcttccggcctgtttatttttatttatttatttattttgagacagggtctcgctcttttacccgggcagtggcgggatcacagcatggctcactgcagccttgaacacctggggtcaagtgtagctgggactacaggtgcgcaccatcatggccggctaatttttttttttttttttttttggtagagacagggtctcactgtgttacccaggctggtctcacacttctgcagtcaagggaccctcccgccctggcctcccaaagtgttggaatgacaggtgtgagccaccatgcccgccctccaggcttttctgaccactggaactttcttatcactggagcagtcccgcttttccacatttgtaagaggggaagagctcactttcagtttcctgactcagggaagcatgaagttagggaatggagggaccctgaaattgcacgtggaaggctgagtagtaaagtcagctgtctcttgagagcttaccaggtatcaggtgctatgggcacgagccgacagccccacagctagaacagggctgcctgtgtgacgagaacgtcctccactaccaaaggccagctgtggggtcaggataaggacaaccactaacccaggactcgggctccatatctctaaaacgggcctcctagacatacctccctgaaatctgatgacctctgtgattagcccagtgtygagtgagaggacaatgcccagtgaccccgcggccatcacccatctgactgctgtccttaagcagggtggcatcatccctgaaagccctcttggctatctcaggaatgagctccaggggctgggcttggcctgggagccaggcaggcagctcacaatgagtggttccctaacagggagcttctagtcctaaccactcacacttgtcaataaatgtcagcttctatgttcttcactcctggataggtgtttgtggtatcaacatgcaaactaaatttaaaatgcacagtcttttccagtccaaatggaatggttcaaaggagggtgtgttggggtaatgcctcagtggccttgttctggtcccagcctgcccagcacctagtccctctcggagaccagcctgctcagcacccagtccctctcagagacgcacaagcctctctcctggctctctcctcatcagaagacaggcagccaggctcccgtggggtgttccgggaaggcaggagtcaggacccagggccaagcttcaggatgcagagccaagctcctggaagagaagtggaggttttcacttatgtcagtgtagactcttttttataagggagagaaatccaaaacaaattagcttagttcaatttaacaaattggggttgtggctatatatcaggcacgatactggtgcctgtagttcactggtgaaccaagagccctgccccaggaggacagatgttaggcagtagggataataagttagatggtgtgaggctgggcatggtggctcatgcctgtaatctcagcactttgtgaggccaaggcaggcagatcacctgaggtcaggagtttaagacaagcctggccaacatggcaaaaccccgtctctactaaaaaatacaaaaagtagctgggcatggccaggcacagtggctcacacctgtaatcccagcattttgggaggccraggtgggaggatcacctgaggtcaggaattcaagaccagcctggccaatatggtgaaactttgtttctactaaaaatacaaaaattagctgggcgtggtggcacatgcctgtaatcccagctacttgggaggctgaagcaggagaatcgcttaaacccggaaggcgaagattgcagtgagccgagatcgggccactgcactccagcctgggtgacagatcaagactctgtcaaagaaagaaagaaagagagagaggaaggaaggaagggagggaaggaaggaaaagaaagaaggaaagaaagaaagaagaaagagggaaggaaggaaggaaagaaagaaaaagaaagagggaaagaaagaaagaaagaaagaaagaaagaaagaaagaaagaaagaaagaaagaaagaaagagaaagaaaataaataaattagggcatggtggcgggcgcctgtaatcccagctactctggaggctgaggcaggagaatctcttgaccccagaggcggaagttgcagtgagccaagatgatcgcgcccctgtactccagcctgagtgatagagcgagactccgtctcacaaaaaaaaaaaagttagatggtgtgttattgggtgatatgcgctatggaaagaaaagtggaggcagggaagtggcctcaggagtgggaagggcagggcagactgcagaatagataaggttgccagggtgagtcttatggagaaggtgagagtcaaaccacgatttgaaggagatgagatgtcagccttgtggaaaccttggggagaattctaggcagagagatcagttatagcaagggcccagaggcacgactgtgtctgacagattccagcacggagggcagtgtggctgggcttagtgagtgaggggggcggaagaaaagaggagttccgagagaaatggggagcagacaggacaggaccatgaggtgttgtccagacgttggctattatttatttatttatttatttatttatttatttatttatttaagacagcggagtctcaactttgttgccaggctggagtgcagtggtacgatctcagctcactgcaacctccgcctcccgggttcaagagattctcctgcctcagcctccggagtagctgggattacaggccggtgccaccacacccagctaattttttgtatttttagtagagagggagtttcaccatgttagctaggatggtctcaatctcttgacctcatgatcctcctrcctcagcctcccaaagtgctgggattacaggagtgagccacggcgcccggcccagacggctttactctgagtgagattgggagccactgcggtctttgctgaaaaggaaggaagtgatttgacttttttttttttttaagcaaaaatgaaaaatcctaatttctaggctcggctgagtcagaggcaggtggaacacctgaggtcaggagttcaacaccagcctggccaacatggtgaaaccctgtctctactaaagatacaaaaaytagctgggcgtggtggcacaygcctgtaatcccagctactctggaggctgaggcaggagactcgcttgaacccgggaggcggaggttgcagtgagccgagatcacgccactgcactccaacctgggcaacaagagcgaaactctgtcttaaaaacaaacaaacaaacaaaaatcactgtgcatttatttccccaycactggctacagaaagcctagcaatactcccaaaggtcaggaaccagcagcagaggtggggccacttcctcctctctaagcctcctctgatgttagggacaatcagccagcgtgaagagcttggtttctgctcctcaggaaatgccagggagggcgctggtctaagccacgggatggttttcaacagggcagagcctctgctcagggtttcgaacggggataggaagaactttcactttcatgggtcgaaaaaatatagtaaagtaaaaaggtttgaagatacatctcagtaacttttttctctttttgagacagagtcttgctctgtcgcccgggctggagtacagtggtgcagtcctggctcactgcaacctccgcctcccaggttcaagtgattttcctgcatcagcctcctgagtagctggaattacaggcacacrccaccacgcccagctgatttttgtatttttagtagagacggggtttcactgtgttggccaggctgttcttgaactcctgacctcaagtgatccccctgcctcggccttgcaaagtgctgggattacaggcatgagccacaaggcccagcccatctcagtgacttttgacatatgcattcacctgggtaatcaccacccaggacaagatgtaaaatatttccaggggcttctgttgtcctcattgttgtgggcacactgctgtagttcccgtgggcctcaggaccaggccacagtgagtgtcccccagcccccaacactgtgcacacaccatctcctgtcccccaccctctgcaaggcaggggacaccaagcccatcttacaggcaaagaaatggaagctcagagagaagtgacaccaccatcaccgtcacccccaacagccacaatggcagcttccattggccaagggcagcttcagggaaattcttggccaaagatcagagattttgtcctccttggcaggccttggcttagcaggttcatttcagtagacagtgacgaaaagattcctatcttgagatcatgtccatcagttatacgaattcccctacacagtctctcccctattttcggctcagggtagcgggaggtgatcgtctgctcyttgccccaagctggttttcccagcctctgctttctatcttgttatttcagaagaccagtcagggaagagccactctccctagtccaaggaggacaaccaaagggcccctcctgggctgtgtctggtccacgattctgggggtggtacagccaccagaccccaacctcatagctgagctttttgacaaggaaggtagctacctgcaggggttcccacgggctgggggcgagagaggcagggattctctcttctccgacagaaatatcagccagaagcgagcttgcacagctcctccaacagacaaccagagataaaacgtgtctcagggcatcttgtactttccatgttccgtccctgatggtatggtgacctatcatttatcttgtggggccgggacagcctggcctggcagttccccacgggagtcagtttatcaagcacatcttttgttcggataaaggactgcttggcacacagcaaatgggcaaggcaccacccccaccttgctcacacccacctcccccagcaacaagggcagggatttctatgagtctccctcctgacaaccctactaggtagggatcattattccctttgagcaggaggaaacggaagctcagaggmtgatactgaacggagtgcctacttgttccaggggcttcataattatttagctcccacaactgcgctggggagtgacttagggtcagctgcattttacagctgaggaaactggttcagaggaggaacctgcctgcctaaggccacacagctacagctgagggctggctttgggattcgaggctggctaaatctagctctggccaatcttccctttgatctctgctgctttggggcataggttggactgacacagctgtctctctgggcaggtgctgtcccaaagcacctggtcaagcccaagagtgaagtaggcatgggagactggtttctccctttcccctttgccccacttccccagggcacctctcagcaaagccaaayatgttggcgaaaataaatgagcaagaaccgtgtacaagatccctgcccttggccaggtgcggtggctcatgcctgtaatcccagcactttgggaggccgaggtgggtggatcacaaggtcaagagattgagaccatcctggccaacatggtgaaaccccgtctctactaaaaatacaaaaattatctgggcgtggtggtgggcacctgtagtcctagctacttgggaggcggaggcaggagaattgcttgaacctggaggtggaggttgcagtgagcagagatcacgccattgcactccagcctgggtgatagagcaggagtctgtctcacaagaaaaaaaaaaaaagatccctgaccttgtggaggtcctgccagaacccggggaagcgggcaggatgcagcaaggtgaggattttttttgagacagagtctcggtctgtcgcccaggctggagtacagtggtgcaatcttggctcactgcacctccacctcccaggttgaagcgattctcccgcctcagcctcccaagtagctgggattacaggtgtctgccatcacatctggctaatttttgtatttttagtagagaggggatttcaccacgttggccaggctggtctcgaacttctgacctcagataatctgcccccctcggcctcccaaagtgctgggattacatgtgtgagccacctggccaaggtgaggattttgaggtgagggattcaaagaatcttagaaaacaaacgttgatgctttctttcttttttgagacagggtcttgctctgtcacccaggctagagtgcagtggtgagaacatggctcactgcagcctcagcctcctgggttcaggtgatcctcccacttcagcctcctgagtagctgggaatacaggcgagcaccaccatgcccagctaattaaaacatttttttgtagagacggagtctccctatgttgcccaggctggtcttgaacttctgacttcaggtaatctgtcccccttggcctcccaaggggctggaattacaggtgtgagccaccgcgcccggcctggtgatgctttctactgaagagtcagttgataggtctttcggggagatcttgtgatgaagaatcaaagcatttgactggggaaagagttccaggatagtcaagtgatgctcaggaagtcagtggagccacgtgctggttccccatccctgctatagcaaattaccacagacttagtggcttaaaacaacacagcttcattctctgacagttctggtggatgaagcctgaaatgggtctcacagggctaaaatcaaagtgtcgggagggctgcgttctgtctgaacgcagagagtttgtttcgtccccttttccagtttctagaggcccctggtattccttgggccatgatctctccttcatcttcaaggccagcaggttagcgtctctcctgtctgacccctattctgtcctttcatctcctctcttaatgctgcctctgtttttatatcttttctctaattttactgcctccctcttggaagggcccctctgtatactctgggctcacccagataaactaggataatttctcccatctcaaatccttacgaaatcccatgtgaaaagtcccttttgccacatagtcacagtcacgggttctagggattgggacatggatgtctttaggggtggagggcgtccttcagcctgccacagatggcaaagtcatgccattgtggctgcagctccattgtccaggctgagtgtgggggcgcayggcgtggttctcatgcccaccacctaccctgaccctgcggaggtgggcaggaggcagcgataatcaccacgtgcagaggtcctgccaggtgcccagcctcatcattccctagaaggcaggcaccaccacatgctcccacactrtagataaggaaacagctttgaaacagatttgaaagtgtttgaggatttgcctggaaggagggctccagagccagggactgggtccgggacacccggagactctctgcttcttggagctccggcaactgcttgtctttctcttcacaggagaagggggccctgctgccgctgccgtggggcggggcgtgggcggtgctggctgcaggaaggctctcccctcccactttgtgctttccctgcaggctgctcctctgtcgagctgatcrcacccacagttgagctgcgctggccagagatgcctgcccacagcctggwgatgagcagcccggccctcccggcyttcctgctctgcagcacgctgctggtcatcaagatgtacgtggtggccatcatcacgggccaagtgaggctgcggaagaaggtatgtgcctccctgggggtccccggcctgggtcatacttgcttctctccacgtcctgtcaggaaagccccgggatagggaaacrtggccaaggtgtgtgcagggctgggaggtgagcacctcttccagccccgccggggggcttcctgccagtcccacgtgtcagcaaggcctgcaccttctcctctctggcttaagagcacttactcgcttgccgtgccaccgggctgagttcttggcatggagagagccagcgagtgtctgtgagagaagcagrttctggagggtggagtgtgggagcgtgacagcacaaagcctctgtctaacctggtggcttcccggcacgggaggtctgatatctgggtggagtgggaaccggcaaaacaggagtccgagaaacgtttaagtggaaattcccaactcctggcaaatgtcactaacaagcccactgtagcctccaaaggccagctcccagccgggcaccgtcggggtgctcagcgaggaatttccccactaatccgagcccctgaaccaaaacaacattaacgagtcccagagctgggccggggcaagttccagtagcgtccgtcacactggttggcgagtctgcaaagtcataggctgagcttgtcggctgtcctggcggcagaatgcagaaagaccccaggcacctgttacttcctccccaggtattttaataaagcaatcatttcctgaaactgtctctgtcttcccctgtgtccagttcaaaggcgaggtgaggcaaggctggctctggcactgcatgcgggtggatcctggggagtgaggatcttggccacaagccaggctcaggccctgctgcaggtacaggcaggattaaaggcagggcagctgcccaagtgataggatgcccggaggctacagcacactgatagcttctgacttctccctgccttggctggtcctgggatatgggatccgggcatcaagtagaacagctgcattcactcattgaatccttcccagaggaccgaatgtggcccrgagctgagcatgagatccccgccacagccctgagggcaggggaggcgccatagtcatcctgttttctaggtgaggaacctgggctcagagaggagacatcacttatgaaggtcacacagcccggtttgaactccagtgtccagcttcagagcccacatcctgtcttggaggcgggggtttctgttttgttttttttttctgctgtccaggctggagtgcagyggcatgatctctgcttactgcaacctcyacctcctgggttcaagcaattctactgcctcagcctccccggtagctggcattacagacrcacaccaccatgccctgctaatttttgtatktttagtagagatggggtttcaccatgttggccaggctggtcttgaacycctgacctcaggtgatccacccgcctcagcctcccaaagtgttggaattacaggcgtgagccaccgcacctggctgaggcctgggttcttaccagcaggccagcgattccttttttttttttttttttaattattatttatttattttagagacagggtcttgctctgtggcccaggctggagtgcarttgtgcgatcatagctcactgtagcctcgacttcctgggctcaggtgatcctcccacttcagcctcccaagtagctgggactataggtgtgcgtcactgctcctaattttttatgtttttggtagagatggcttttgccatgttgcccaggctggtctcaaactcctgggctcaagtgatcctcccatcttggcctcctggagttctgggattacaggtgtgagccactgtgcccagctgtgatttccttttaacacgaattcggggaagggaggaggtgaacctgtcccagagcctttctgcctgattggcagggacaccgcagaaggaaacccccactccttgggctgctcctgaggtgttcctcatgacaacgtggccccctcttatctctgctctgggcgctaagtatcatccaggaaggacttgctggaggtgacagtcacaggccctggctcctccacccaccagcctggggacctggaaaagtctgggagctcagtgtcctcacctgtaaacgggggtcgtgacagcagcgccaggagaatgcaacgccccaccaatgtttgtccttaagacttataagtaactgaaattaacatgagcatcgcagcctcaggtcactttcaagggacctcaaccaaaggctggcctccaccccagctaaggtggcacctcggccgctgacactgggggcttcctggcctgcactgcagctggctctggcctggctgacttgtatctgagttgtatctccagggggagcaactccatgggcagtggactcctaaaggcagtgcccactgtatgctgaggccccttgaaacgtatcacagatccacggacagagccttcggtgttggtgattcactgatttcagggccagcagagaggaattttgggtgtgaaggttccaatctcgaagatctgagctgcattctcctctggggtagggcagggcaggcccaccagggaggacaaaccagcccttgggggacagtcatgagtcagaagcacaggatttgccgtcagctgaacaatttagaaaacctgctcctgagattcaggctctgctgtgggcctggtggggtctgactgtctggaygccagcagggaacagtggagcaagagtcatgggcctctgatgatctcagtgtgactttatgtctctgctttccaatgagagaaagtgacaattcactgagcacctccttgtgctgggcattgtcctagcggcttctccaggtctccctctcactcgtcacacagcacatgagctgtgatttctcctgagttttcagagttcaggatcctgtggttaatcagcrcggagctgggttttcagcctggggctctcaagaccttctcatggcttttagtgcaaagtccaaattcttcaggtgctgccaggacccctgatgacccctgtccctttatcttgggcccctgtcccttgccctctgtgctcccgtgtgctggttttctgttcttcacacatgcccagcttcttccagcctcagggcctttgcacgtgctgtcccttctgccttgaatgttgttgctccagccctcccttcatctggttaatgtcaatgcatctttcaagcctcagattgtttgttttattttttttggagacagagtctggctctgttgcccaggctggagtgcagtggcaagatcacggctcaytgtagcctcgacctcccaggctcaagcaatcctcctgcctcagccctcctgccaagtagctgggaccacaggtgtgtatcaccacacacagctaatttttgtattttttatagagggggtttcatcatgttgcccaggctggtcttgaactcctgagctcaagtgatccaactgcctcggcctcccaaagtgctgagattacagacatcagccactgtacccagcttgtttgtttgttttagagatggggtcttgctatgttgcccgggttggtctcaaactcctggaagctcaagcaatcctcctatcttggcttcccaaagtgcttggctcacaggcgtgagccaccacacctggcttgttttagagatggggtcttgctatgttgcccaggctggttttgaactcctgggctcaagcaatccccytgccttggccttccgaagtgctgggattactggtgtgagccacctcatccagccctaagcctcagctttcatgtcactgcctcagagaaactttctcagagcctcagactgggtcaggtcccacgtaaacattctcaaggccagccgtgccttcttcttaacaggtgagacaccctggccttccctggttcataggcaactcccccatcggactgtgagcttcataaaagcagagacagggggrccttttcatggtgagctaccagcccctggcacagggtaggaatcgtggatgatggttggatgggtgtgtgtgcaactgcacctctgtcctgccactgtgaactctggtcatggacaaaacatagccccaggtgactgggccgtttgtctcacgaggagtgactctcaactggtatatttcaggcctttgccaaccccgaggatgccctgagacacggaggcccccagtattgcaggagygaccccgacgtggaacgctgcctcaggcaagtacttcgggcccctggyctggccacacctggccatggcctgccctttcagaacttcttctgcacacaggggacttggaggactcccaggggctgaggttttctgtgttcctgatcttctctgactgttttactttattcaatgatttaatttcaaatgaactttggaaaagtaagacgtggtcatgactcataattacaaagtgagaaaggtggtgacttcagtgaacattcagtctccctcctacctctgacctccaggcactacgcagttctactggccaggggcaaacactcctgccaatggccatgcatcttcccacagagatttgctgcatttacaaacatgtgtgccacgcttttcccgttctgccccatagaatcaccctttatcctctggtctgtactatgcttttttttttttttttttttttttaatatggcaacagagtttgttccatatcggctcacagaggagttgcattcactgtattggtgctccagtatttatgttgccactctgttgaatgtacagcccataacttccctaaccaattcccctgcratgggcatttgggctccttctgtgttatgaacagaaggcctcaatacctctttttttttttttttttttttttttttgagacagagtctcactytgttgcccaggctrgagtgcagtggtgccaccttggctcactgcaacctccgccacccgagttcaagcgattctcctgcctcagcctcccaagtagctggggctacaggcgtgcaccatcatgcctggctaatttttgtatttttagtagagatggggtttcactatgttggccaggctggtctggaactcctgacctcagatgatctgtccgcctcggcctcccaaactgctaggattacaggcatgagccaccgcacccggcctcaacacttttttcatttgcctttatgggtatgtgtgagtaaaaccgcaggatgcaacaaaatcatgtcccactactggtgtgggagccatttttccatccctctgacaatgcaactgacaactcattgtattggcatatttgggtggattcctaccaaggtgataggtgaaaatttatatcacatttttgttttgctttgcacttctttattcttagtgaagttgaacatcttttcatatgcttaacatccccctggtcaattaaaatgaatttcctcattataaaaatcagaactcattacagacgatttgggtaatacygaaaaaacacagagacagaaaggaaaaccactcacagttctaatcacagttcacacttgcatctctctcctctttgtcttctatagctaaatattttccataaaattaggcatgcattaggtacacccaatttggagttctgattttcttttattaacattattttgcgaacacttyccatgttggtaaatgttactaaaaaaattattcttgaccagatgtggtggctcatgcctataatcccaacattttcgagggccggcagatcacttgaggtcaggcctggccaacatggcgagaccctgtctccactaaagatacaaaaattagccgggcatggtggcacgggcccgtagtcccagctactcgggaggctgaggcgggagaatggcatgaacccaggaggcggaggttgcagtaagccaagattgcgccactgcgctccagcttgggggatagagtgagactccatctcaaaaaaaacaaaagatccttaaaaaactggcttcgtaaaatcccatcagagactaaatgctaatttcacataatcacagtcaatattaaatttttttggcagtttctgctctgccatcttttaccagttagctggagagtgaggcgatggcactccaggggttggggtcatcggaagagcttgaaggggaagtggggaggayggagagctggacaggctgaggccggagacaaactgtctcatgggtctcaacacattcccctgcatcacaggcggaaatgggtgggacactgtcatttaaataatacaaatttctttcacttgaaagaaagtctgtgggtttttttcttatgtttttcttggccattgacaataatatgtccacttgtggttttaaaaaaattacagacctgtgtcatgtaggaagtgaaattccttgctattttaccctttcaaatccttcatatgaggcccgtctctccattaatgagcccttactacatcccagacactgtgctaagcactggctgtactttcaagaacaaaagccttctccatacatgacttccattggtgactcttgtccccagctgtggcggccctcctggacagtggagaaggatgggatgagctgtccaggcagcaggaggccaggacggtgggttgcccggggccagctcacagcagccaccaagaggatgcgttttggctcctcccaggctgcagaggttttatgtagcaaagctttcatgtggcacaatgtggcacaggagtggccaagtggccttacagatacttggtttatttttactggctgaaaccatgccccatggagagacgatagacccgggtggcgccgagacatttccacccaaccaatctttttttttttttttgagacagagtttcgctcttgtcccccaggctgaaatgcaatggcacgatctcggctctctgcaacctctgcctcccgggttcgagcaattcccctgcctcagcctcccgagtagctgggattacaggcacctgtgaccacgccagctaatttttgtattttttttttagtagagacagagtttcaccatgttggccaggctggtctcraactcctgacctcaggtgatccacctgcctcggscttccaaagtgctgggattacaggcgtgagccattgcgcccagcccaaaataacccctcatctacagtactggggtttaaatggtagaaattcatttcagcactttctgagtgcgtcttatctaataatactttatagccatttggtgaggacttactggargccgactgtatactgggcccaagtcagacctggggagtgcctgggtcccctgggcccctcctctgccacctgatttcacagaayctcatggaaacttgagtgtgcagaactaagagaattctatatcctgccgtctgctaccggagaactggctggaacccgaagggggagaccacctggaagcaaaagttggttaaatattagaccagggtttatggtatgattcgagtcacccttctgtcaaataggaaagcacttcagtcttggttcttggagcatgaatctgccttgcaggttagcacatgctgcagtccaaatgtgagcctagttctgggagaagccagggactagccaccttttcaggatacctatccggagttcccggcaatgtgcgtctgggccagaatctgaggttgggtgtgtggaactgcacggaggggttacctgtgtggtcccaaagaagagaggcaaacgtgcgacctaagcttggagcatttctgtttggagtgtatagacttaaactgagtgaactgatttgtcaggaaattgggtcccaaaatgtcagccctagaagtcccttagatgtcatccagcatgtacattttgtacatagtgaacgcagtcccagagagtgagagagatttgcctgaggccatggagctaataagcaccacagcagaactggaggtttccagcctaatactcccttccggctgcaccacgaagtactcaaaaaaaawtttttttttttttkagatggactttcactcttgttgcccaggctggagtgcaatagcgtggtttcggcttgctgcaacctccgcctcccgggttcaagtgattcttctgcttcagcctcctgagtagctgggattacaggtgcgcgccaccactcctggctaatgtttgtatttttagtagatgcaggatttcaccatgttggctaggctggtcttgaactcctgacctcaagtgatccgcctgcctcggcctccccaaagtgttgggattacaggcrtgagccacctcgcccggtcttttttttttttttttttttttgtgacagggtcttgctctgtcgcccaggctggagtgcagtggaatcccggctcactgatgccttgacctcctgggctcaaacgatcttctcacctcagcctcctgagtagctgggaccacagacacgtgccaccatgcctggctaatttttaaatttttattgttgtagagacgggatcttgctatgttgctcaggctgattccagcacccaagtgatcctcccacttcagcctgagatcacaggtgtgtgccaccacacccagccccataacgtgcttttgattcatttggccggagcatctgagggcagtcagaaagtctggcaaagccaagagggtgaagtgagctttagcgatggtgtccaggacagggctggtgatggcgatggaggagatggcggcttgcttaaaatctccctactcagtcaagcacagtggctcacatctgtaatccctgcactttgggaggctgaggcgggtagatcacctgagcttaggagtttgagacgagcctggccaacatggcaaaaccctgtctctactaaaaatacaaaaattaaccaggcgtggtggggctcgcctgtagtctcagctactcaggaggctgaagcacgaaaatcacttgaacccaggaggtggaggttgcagtgagccgagatcacgccactgcactccagcctggggcacagagcgagactctgtctcaaaaaaaagatcttcctactcagtgtccaggagtgttgtaagcactttccaggaattcactcacttggcactctgaggaggggcctggcactctcggctctgctcctgaggctgtccctctatgggaaggcgatttcactgtcttgtatacctgcctttgaaacgaagcaggcactgcattgcgtcaaccctgatacaaagtcaaggaaattggccccaccgtggatgccagcagggctgggggagagaagaggagaccctgtggagcggccagcagctgtccctgtcctggccatctggggatcactgtcctcaccgctgtcacctatgcaggaaaatgcagctggtgtggaaaagtctgtggagggtgarggcaggcctgatgctgcaggaggcaatacaagtccagtctagtaggaatttgctttgggtggcttttaccttaaaaaaatggttattatttgaatgatgcatttcacccgagcaygtctgtggtacgtgcctgcctccatgtctctcggtttggagcctggaggtgggaggagggaggtgagctttcttccatcattccttggtgtctccattgctccctgtccctggccactgcggcctcggaggggcccctctgcggtttgagacagaccagacgagtgagggagggctgggccagccccaggggctgacagtcagagctcctgaccacctctcctcccacgctggtgaccgctgaattgctgcccaatggctggaaatagaaggtggggctcagtccccgctttttctgcaaggcctgctcctccccagcctgcagacatgccaggcagagcaggatccacgtctgccatgaacttcccgtcttgttcctccttcccaccctgtgttccccaacttctttccttcacccactcttcagggtttggctatgtttgtgaactatctgtactatgattctcttaacagctttccaaacattgacttactctttttttttttttgagacggagtctcactctgttgcccaggctggagtgcagtggcgcgatgttggctcactgcaacctctgtctcccgggttcaagagattcccctgcctcagcctcccgagtagctgggmctacaggcgcctgccaccacgcctgactgatttttgtatttttagtagagatggggtttcaccatatcagccaggatggtctcgatctcctgacctcgtgatccgcccgcctcagcctcccaaaggacttactcttaaaatatcaacacatactttaaggaatagctgagtgaacgagttgcatatgctggttgtgcttttcctgaaactttcaaataaacattacaaaactcctcatccaggtggcactcccttgtgaatcacttgtgacaggcagacctcattttgggacataatcaaaaatgggttttccaagggtgtccctctaatcagcctgtagggggatgtgggtacccacagctcaattgccagaggacggagtgatttttgttttgttttatgttttttttttttttttttttttgagacagagtctcactcactctgtcgcccaggctggagtgaagtgacacgatcttggctcactgcaacctccacctcccaggtttaagtgattccctgcctcagcctcctgagtagctgggaactacaagcacacaccaccatgtacagctaattttttttttttgtacttttagtagagatgggattttgccatgttggccaggtaggtctcaaactcctgtcctcaagtgatccaccagcctcagcctcccaaaatgctgggattacaggcatgagccactgcacccggccaaggatggagtgattttggaggaacacctattgcctttcctcatcagtcctggtaagggacttacttgacagggaggtggccccagtctttggtttctccctctcttttattttatttatttatttttttgagagggagtttccctctttttgcccaggctggagtacaatggcatgatctcagctcactgcaatctccacctgcccggttcaggtgattctcctgcctcagcctcccgagtagctgggattacaggcatgcaccaccatggctggctaattttgtatttttagtagagacagggtttcaccatgttggccaggctggtctcgaactcctgacctcaggtaatccgcccgccttggcctcccaaagtgctgggattacaggcgtgagtctgtaatctccctcttatgtcttccctgagggcagtaccccaggatctatccagagccagcctctgacagacacaggcaggccacagtgttccccaccgctgggtgagaactgccctgccacagacttgctttccttgtgtctgggttgcaaggtcaggatctgggggaaaaggagaagaggggttcatgtcagtctcgggatatgcggacccagatgccaggtgctgtgtcctgagtttggcctgagaaagatctaggccctgctgggtttacaggagttttgtacactcagattgaattcctctccctctcttatctgcctcactccctcttgtgcaccgcactgtagccatgggctcacctttctgcacattgaacatgctgtgcttattgtgacctcaggacctttgcacacactggtcttccttcctggaatgcttttcccctgcagggccagcttctcatcattcaggcttctgcacakatgtctccttccctgcccacccccaccccaggcacgctgcagagcttcctacagtgtggggtggccaagcactccaggccccctctttccttttggtcaggcccacacaccatcgcactggcccaagaatcgtcttgccagtgrgagggaagaggaggaccctgcagcgggtccccactcagtgctgctagtctgggcctggcccgaggagackgtgttattggtggaatgtatgtcagcaggaaggcccggagaacatgcttctgttcctgcacctcacacgcgtggcctgtccttgggggaggtcatgccctgggcactgaattcctgtttatttgagcttccaatgtggcaatctatgggtttagttgctcattcagtctctaatttatgggactcaacctccccacccttcataaaggaagccggccattagtaggagtctggaaaatgtgaaccagcagaagtaggtgagttttctgagttttctttcttggtcatttatttatggtggggttatacagagcccctccgcccccaccacacatatgcacatgcttgattcctttcaacagaaaaagaggcaggaaaggatgtgtaaaatgaagagcttcaccgggggctggccatyggttggctccagtgagtgggagcggatcttgttatgattgtccctgaaaggacaggtggtagttagatttagggggaaaaggagacagagcccggcattcatttcaaaggcctgctcttgggctctagccccttctactcgggaggggcccaggaagctgcattcagaaggaggatgacctcaggcctgactcagagaagccctgccctggaggtaaagagcacaaactccagtcagaactcggttccaatcccagctcctccactcgttggctctgtaaagcactcagcacctctgagtcccacttttcctgcctggtatccaagggctagagaggaaggtgggggagagtatggcaggagtggggtcccggcaagccatagaggtatggtaagagcatcctggaccagtagccctctgactcccagcccatgacgtggcctcgctgcctcagctgcttgcaagcataagcttggagctgccttcttctggactctggggtatccatctccttgacctggctgtgaatggatttgagtgtgtgatatgcctgaaatgacccccagtgggtcaaagcacccccagcttccatgacactctcaaaagggcctatggccccaaagctaatacctggctgaccgcacccctcttgtctccccagggcccaccggaacgacatggagaccatctaccccttccttttcctgggcttcgtctactcctttctgggtcctaacccttttgtcgcctggatgcacttcctggtcttcctcgtgggccgtgtggcacacaccgtggcctacctggggaagctgcgggcacccatccgctccgtgacctacaccctggcccagctcccctgcgcctccatggctctgcagatcctctgggaagcggcccgccacctgtgaccagcagckgatgcctccttggccaccagaccatgggccaagagccgccgtggctatayctggggacttgatgttccttccagattgtggtgggccctgagtcctggtttcctggcagcctgctgcgcgtgtgggtctctgggcacagtgggcctgtgtgtgtgcccgtgtgtgtgtatgtgwgtgtgkatgtttcttagccccttggattcctgcacgaagtggctgatgggaaccatttcaagacagattgtgaagattgatagaaaatccttcagctaaagtaacagagcatcaaaaacatcactccctctccctccctaacagtgaaaagagagaagggagactctatttaagattcccaaacctaatgatcatctgaatccygggctaagaatgcagacttttcagactgaccccagaaattctggcccagccaatctagaggcaagcctggccatctgtatttttttttttccaagacagagtcttgctctgttgcccaagctggagtgaagtggtacaatctggctcactgcagcctccgcctcccgggttcaagcgattctcccgcctcagcctcctgagtagctgggattacaggcgcgtatcaccatacccagctaatttttgtatttttagtagagacgggttcaccatgttgcccaggagggtctcgaactcctggcctcaagtgatccaccggcctcggcctcccaaagtgctgggatgacaggcatgaatcactgtgctcagccaccatctggagttttaaaaggctcccatgtgagtccctgtgatggccaggccaggggacccctrccagttctctgtggaagcaaggctggggtcttgggttcctgtatggtggaagctgggtgagccaaggacagggctggctcctctgcccccgctgacgcttcccttgccgttggctttggatgtctttgctgcagtcttctctctggctcaggtgtgggtgkgaggggcccacaggaagctcagccttctcctcccaaggtttgagtccctccaaagggcwgtgggtggaggaccgggagctttgggtgaccagccactcaaaggaactttctggtcccttcagtatcttcaaggtttggaaactgcaaatgtccccttgatggggaatccgtgtgtgtgtgtgtgtgtgtgtgtgtgtgtgtgtgtgtgtgtgtgtgttttctcctagacccgtgacctgagatgtgtgatttttagtcattaaatggaagtgtctgccagctgggcccagcacctcgtcttgggttgcgcgttcctggtgttccctgctgcccaagctggcctgatgctccagcgcgctgggcgttcttgccggtgactgtctacagccagtttggcgggacaagatctctggcgcagacaccaacgcgccctggctgggtgttaatcacacagcaagcagcagcctcctgcctcccgttggggcgggtaaggtggcatctggcgaggtgagccaggagcacccaaatcctgccccggccaggtcacccctccctgcggggctgccccgcccgcgggctgccattatcagctccgtcaaccaggacacggagactccaggaggccagcgcccggaagtgcggggccaggtctgaaagtcggggctgccaaagtccctgggcggagcccctgtgctgcacggcctcactttccctgaacgccccctcccagcaccccgaggccggagcccctctaacggatgggacctgccgtgccgggggttctccagcagcgcagggaccccaggccccgccagaaagcgccgtgaggccccgggtcccgttcggagctgagaggggaaacactgccccctggtggtaaggggacgcctctgtttttgggccgcggcggctctcgggagagaaacgggaagggcgcgatccagtattgagcacctactgcttgctaagcgttgggctgggcatactagttggatttttttccaacttatgtctgtaattcaagcactttgggaggccgaagttggaagatctgagcccaggggtttgagactagcctgggcaacagagctagatcccttttctaccaaaaaaaaaaaaaagaattagccgggtgtaatggtgcctgcctatggtcccagctactcgggaggctgaggcaggaggatcgcttgagcctgggaagttgaggctgcagtgagccgagatcccaccactgcactccagcccgggcaacagagggaaaatgtctcaaaaaaaaaaaaaaaaaatccccaaaacaatccgaggcaggagggatttccgctttctagatgaggaaggtgagggtttttagatgagagaggcaaggttcacaggaaggaggcttgtagggggtgtctcctcacaggggagaggtgacttgcctgctgtccctgggctcggacagtgtaaggccagagggaggacagatcccagggcaggggccatccaggaggcgaacccagcgtgcattcttgttgttgttgttgttgttgtttgagatggagtctcactctgtcacccaggctggagtgcagtggtgccatctcggctcactgcaacctctccttcccaggttcaaaccattctcctgtctccgcctcccgagtagctgggattacatacaggcatgtgccaccacacccggctaatttttatatttttagtagagacagggtttcaccatgttggccaggctggtctcgaactcctgacctcaagtgatctgcctgcctcagcctcccaaagtgctgggattacaggagtgagccaccgtgcctggccacagcagcgtgcgyttttatatttatattttccttcctggggaaagaggggctctgtgggcaaaataacctgctgggaacccaccggacccaggtgagcaggggcatcggatgcccatggcaatactgtgaacctggggcgtgggtgaaggaggcggcccccaccacactggagccgcagagaccacgagaccatgaggtcccctgcccggcaccgcccctgttctgtcggcttgtgagtgcctcctcagggtggggtggtgcccgatgctggggtggcaacctcatcctgccccccgtccccatgcatgcagctccagcctggggtgggcgggctccgcaggacggcgcccgtgatgaccccaaggctcagcgccctgatggaggcagatggggccttttaacccctgctggggagcggctgcctggggagggggcaactcacctgcggtggggggtgaaagagcggttttaaggggaccatccaagccaagaaagcaaggagcaaagagaagagctcagcagctctccccagacccctccaccttgagcttgggaagtggagggcggtggggaaagttggggaggaaaagtgtgagggttgatggtgtggaggggagatgtacggaggggcgtgggggtagggggagggagtggggatgggggagggatggggtatgaaagggaggcgtggggggtgtggagaaggggtggatatggaagggaggggtaggggtggggtgggtgttggggatgagtgtgggggaggggtgggtatggaaaggaggggcaggggtcggggtggttgtgggggaagattgggacatggaagggaggggtggggtggggtgggtgttggggatgtgtgtgggggaggattggggtatggaaggaagacagggtggggtggggtgggtgagggtgttgtgggagtggtgcgtatggaagggaggcttgggttgggctgggttgggggtgggtgtcggggagtggtgggtatggaagggaggtgggggtgggagacagatgggcatagaaatgaggtgtaagtgtgggaggggctaaagggatcagcagtgtggggtcacgagcctctggcccttatcagggagtctggggctgtgggtcacgccgggatgggcttggcatggctggctttgtttcctaagaggrcctctggctctgccgtgggagggcagggggtgtggacagccaggcagtggacacagtgggcagtggcatggctcttgcttccccagtggcttggacagtcccctggctactcgcccaggagctggaggacccaggtgcgggggagagaagagaggggcagtacccaggatggtgtctgggctgctatgaggagcccattgaattttttaagggagagaaggaggccctggaggcctgtgctgctcccacccaagatcagacccaaccctcggggatggggagggccaggaagaggtcttctggctccacagccagggccctagggggccagggcccatctcccgggcagcagtggagcacagtaggccagcgaggcagggagggcatctcatggttttcttttttcttttctgagacaacagtcttgctctagcccaggctagagtgcagtggcacgatctcggctcactgcagcctccgcctcctgggttcaagcgattctcctgcctcagcctgccgagtagctgggattacaggcatgcgccaccacaccaggctaatttttgtatttttagtagagacggggtttcaccatcttggccaggctggtctcgaactcctgaactcagatgatccgcctcggcctcccaaagtgctgggattacaggtgtgagccaccatgcccagccgcatccttttctttttctaacagatgggggcggggggagtctggctctatcatccaagttggaaagcagtggcaccattgcagctcactgcagccttgaattcctgggctcaggcaatcctcccacctcagcctcctgagtagctgggaccacagatgtgtgcaccacgcctggctaaagcacctcatggttgatcgcatcttccgaactgaccagaggcagagtgggaattggtaccgagtgcaagatgacctcaggcactggcggggttcttcctgacctcatcccccacgcctgyggcccccsacgcctgcagcccatcttcctcccaactccccccagatttagctcaactcctgggggctgtctcctccttcctgaccctggagttgggggcactgggaagggtgggcctcggctgtctgtggtctagggggcagagggcactgagcagaagcctggggggcccagagcctcgattcagggaggcaggcaaggactttttcctcttgggggcagtgaatggggccaaggtccaggcctgcaaagctgaagctgccctagttggggcccactgtctggagcatcttctcccgagctctgagtgagcagttggaattcatgtagacccaaggcccagggaacaggatagcaatctgggggcctcttttcatgatatgtcagtgagatctcatgttacagaagccttcattcccaccccacacaccttcttaggaggaagcccatggcaggtgatggcagctgtgccctgcccacctgggctcccccatctctcgtgacaggcccaccaaggacctcctggggctccctcgacaaacaggttaatgagtctaatgtctcaaggcttctgagaacctccctggtgcgtgaggaccttgagggtgaggatgagggcaggcaatgatgacagtggacagagggacctgctgttcaccgccttggatgctggtctgcgaggcagggatcgaacctggggaccccctgggaaggcagaatccacaggattgaggggattcctgggcctctgtgtgtgtatcctgggaggatgctgcggttgggaacaggtttccaggcaggccaggctggaaggttgcactgtttctaattcaaggcagtccaaagagggattatctgttggggctggtaagaatccaggcaggcttcccaggagaggcatcgcttgaattaaaacttgtttatgtttttaggctgggtgcagtggcttactcctgtaaatcaaccccagcactttgggaggcccagccaggctgatcatttgagaccaggagttcgagtccagcctggccaacatggcaaaactccatctctattaaaaatacaaagattaggtcgtgtgcagtggctcacgcctgtaatcccagcactttaggagggtgaggtgggcggatcatgaggtctggagatcgagaccatcctggcaaacatggtgaaacctcagctctactaaaaataacaaaaattagctgggcgtggtgggcgggtgcctgtaatcccagcaactcaggaggctgaggcaggagaatcgcttgaacccgggaggcggaggttgaagtgagccgagatcgcaccacggcactccagcctgggtgacagagcgagactctgtcttaaagaaaggcttgtttaagtttctgaacttgttaattatatgtacttgcaagtaatggtcgatgtcacaggtttagaaactacaggaaagctcacaagagctcacaagagaaacatcaacccctccaggaatcaccatgcggaggctgacccaggccgggctccgggcgctctgggactcctgttcaagcgccttgcagtgaggccctgggtcactgcagtacctcccgactggatccctgagtctaccctgggcccttacggtcactccccacccagagtcagaggcccccatcacccctgtgtgcgaagccctcaggtggctttgatcctgcttggaggaaggccaagttctcaagaggccagcaaggtacctcgaggtcgtcagtgtgcagaccccctttaccttctgtgtctttatctcattgcccgtgtccccctaggatgtgcacttgaggggcaccgggatttcggtctgtgccgttctctgccgtgcctgtgtccccggctcctggggaagatatgttaagtgaagaaacggatgtgaatgatgagtgtgtacatgcacgtgtgtgtggatacaagcagagggccacagggaggttcaggttgttttttcccccaccggaccaaattgaagactatattcaggatggaattccacagcaaaagatatttacagagggcttctcagcatcggggagacgccagtgtgtcacagcggtgagtgctgtctgtgctcggggctcacagccttgaagagacacctaagacttgctttttttatcatcgcttgagaatttcctttgatcatacatctgcatgtactcctaggggtctcggtggtcagtggcatgaactgtgacagtgcccttgcacggtacatcatcatcctggagaccctcatcatttatttaatcagccctcgttgttggataattgattcatcagggtgcatga

SEQ ID NO: 95488 - DNA, 41956 bp, Homo sapiens
tcatcgccactatttacctccagaactttttcatcattccaaattgaaactctgtccccatcaagcagtagctctgttaccataaccgcttcccttgccccctgccccagcccttagtaaccactgttctactttctgtttctatgaatttgactattctatcatgtaaatggaatcatttgtctccttttcattttatgtaattttgtcaaacttctctttttgtatctcttaccttttgttctcatgcaactttcatctctattaaggtgtgcttttctcttctctttctttcctgagtttcaattcgagtttgccctctcctgttttcttataatctattctttaatccctcacagccttcctttgggctaactcctccgcccccgcccccaaagatcatgtgtcagtgtcttaagagattgtgagaattacacatcagaatgcttcatcttttgtaaagatctttatctccttttccttagagttatatgcatgtgtgcgtgtgtgtagtgtctatggtcctgtgtttgttcttttctattattgatctgtggacacaaacatttatattggcatttgctgaagaagagtgttttgaaagttaggaaaggtgtccaaggcagtctgaggcttcaattcacgtctgttgtcttaaacacctttcataaaatctgctattcccagctatggaaatatgtgcaaatagtcaatacacatgaaaaggaacccaccatgattagtcactagggaaatggaagttaacatcacaaggagatatcactacaagctgggtgcagtggcccacacctgtaaccccagcactttgggaggccaaggcaggtggatgtcttgagctcaagagttcaagaccagcctgggcaacatggcaaaaccctgtctctactaaaaatataaaaattagccaggcacgggggcacacacctgtaacgcaagcaactagagaggctaaagtgagaggatgacttgagcccaggaagcagaggttgctgtgagctgagatcataccgctgcattcctttttttttttttttgagacagagtctcaaaaaagaaaaaaaaaaaaagagagagagagagagatcactacgcatccaccagaatgggtaattatttttttaaatcaagttttagaaagcagctgctagactgtgtggtagggaatataaattggtataaaaacactgaaaaattatttggcttctaaagttaaaacatgtatttactttcacccagaaattctatagtggtgattgggtaggggcctaaaaggaatgctggtaatgttctgggtcatagatacaggtaggtaaactctgtaataatttactgtaggcactgttttgtatttatgtagtatccaatgaaaatgtaatgaaatttgggccagaaggcagaaagaactcctgggtacacactcactaccttagtccccctgaggtttaaataattaaaagtgtctgtttcatccttgcctttaagaaaactctccctgctgataactgagcagatcaaagatctaaaggttgtggtggagaagggtcatggagttgattacccccaataaaaacaaaaagaaaaacttggttttttttaagctgaaaaaggaggatggaaaagtatagtgggcaggcatagtaaaatcactacagtctactgcattcctgaaaggagaagcttgtgaggactcaccccttacccctataacctgctgtggtgatttcattacccatagctacttaaatcaatgagtatatcatattcaaaagctgaagggagaatgtttcagcttgggagtgtagtaaaagaattcccagtcctctctttggttccataaatatatcaccttgttctattaaagcacttggatgtgatttttaaatatgcccaacaaaatgccatcagttgatttctctaactaataaagaaaatgttcaagagttggtagtaaattcttggtgattatgccattagaatcagagtacatcgtttgtaagaaatcctcagcccggcacggtggctcacgcctgtaatcccagcactttgggaggctgaggcagcggatcatgaggtcaggagtttgagaccagcctgaccaacatggtgaaaccctgtctctactagaaatacaaaaattagctgggcatggtggcacatgcctgaaatccacctattcaggaggctgacacaggagaattgcttgaacctgggaggtggaggttgcagtgagctaagattgcaccactgcactccagcctgggcgacagagcgagactctgcctcaaaaaagaaagaaagaaagaaatcctcacatcttatgctcagcaaaagcagcagctcttcgctacttagcaattaatttgccctaggtgaaaccgattcctgttctaattccacactggaattctgttcattatttacattttttttaaatggaagcatgattcatatctcaatttacctagttccttacacaatatttattagccagcatttagaactggttaccctttcagatcagataaagattattgggtacactctctggcggcctttgagctgatttaaatattgttgccacacggttctagatactgatattagttgattggcttcctatgcacaagcactcctcagttacttacataattgaattaaacactttgtatatgttggagctactgcttttgttatataagcctgcttgccttttcacctactgtctcccaactttaactatggtatttccacatgggctggatttttttgtttttgtccaaagcaggcaagcgagaagtagaagtgaagaagagtttgatggtcttgccaatttccttgcttcatcatgaatctccttaagcttcaaattacaggctgttgagaaagccacaaaagtagacagtgccaagacactaagactagagtatgtgagagtgtaccattcattcattcattcattcaataaatacttactgagcacctactgtgggccagattctattcaaggtactaacattacagtgaacatgaacaacaaagaccctgattttacaagatattccagtgaggaagacacattaaaaacaacaaacaaatagatacatttatattaagaaaaataaaacagggtcagggacagaaagtagcagagactgatattttagacatggtggtcagggaagtcttctttagggaggtaatattgaagcagcaattgaattaagtgagaatgatagctggacactacaggcaaaggaaacagaatgaatgcaaaagccccgggctgggaatgtgtttagaatgctcagtagtgtacagcaaggaaggcactctggctgaaactcactaagtgggagaatcctacaaaaagaggttgaagatgtagtcacgggccagggcatttagggcttgtagaatatgtgtagaaaaattcacattttgaattttattctaaacgtgaggggaggctattggaaagttttaagcagtgaattaacatgatcagggtaccttcggacaccaatggctaggtggagaacaggctacaacaaagtgttatcagagtccagtcacgaaagataaactatctagttatttcatgcagagggaattttaagagtaatagatgtcaaaaagaataatggggtgacatcatagataaaaaagctgctaaaaatacccttagctggaaccaatggaactgcaccagcttctgtgccatttggagacactatcactttcatcctctgtctactagagaggtgccaccttgaccatggaaggaattcctagagtaaagaataatccctcctccactttcactatagaaatggccagcaactgccacacgattgaatccagaagcagtaagttactctccacctcctgccttctgatttccttatagtgccccctactggcagaagccagcgggcacgagagcctgggaaatggggttcacacactctaggtccctgcagtagagtataaaagggcaagtgtagaactgagaaataacaatctctagagtcaagagtagaagcagggggccggcgaggtggctcacatctgtaatcccagcacttcgggaggctgagggagggggatcacttgagcccaggagtcggagaccagcctgggcaacatcgcaagccctcatctctacaaaaaatacaaaaaaatttagccaggcatggtgacacatacctgtagtcccagctacttgggaggtggaggtgggaggatcacttgagcctgggagctggaggctgcagtgagccatgatcatggccactgcactccagcctgggtgacaagagtgacaccttgtctaaaaaaaaaaaaaaaaaaaacccgaaagagtagaagcagggaaaccatcaggatgcccggcctgttttttctttttcatttttttcccctcagctgtggtaatttagccaattcaaagaccttgttctccataatttcaactttccttcagatttgaccaagtcaagtagagctggtcaaacccaatgggaaaaagaccaaaacaacaacagaaacaaacaaagaaacagttaagcaaaagaaatgatcgcacaatttgtattattgagcgctctaatggtaaggagaaattaagaccagctggttgttaatcttaactttagtcaccaaggagagtttccaagacaaaactccaattcaggtgcttacctaggaatagggtccaggctcaagactgctctttaccattttagaaggagaaaaaaaactcagactcaccttccctgctggaagccagatgaaattccagaaaggagttgcctcccctccatcgtcatggaggcaggaaaacgcaccttctttgttgggagtaagtaaaactgcagacaaagaggtgtacagcaaaataaactttagatctcaaccaaattttgggacatcagggattctctggagtggggtgctcccaggcctcagcaaattgtcctgtttgagcaataaaaatagcccaagctggtaccaagcactgatagatttgtcaaaggtcagggccacctccactgagtcacttcctttggctgccagcttgtaaaccaaaaccagctctcaatcaatttggaagtttattttgccaaggttaaggacatgcttgggagggaggtctgtgcctttatctaaagatgattttgagggcttcaatatttaaaagggaggagcgggctggaggggaaagagggagaacatggtcattactgaatccacacattgcacaaatagaaaaaggaacaggcaggggaatagtcaattatgtatttgcctcctgctgtgtaaatcagcacttcagtaagataaggtgaggacagagcagctacctgtggggacatttaaccttttatctgtagctatctgcttagggacatagagaaaggcagtttcttgcatgactcagctttttgcttaattttttccttttggcatagtgaattgagctcccacggtttttgttgttttgtacataagtggagagttcatttgggccagggccccgagttattttcttttcacaaatataccctttagagttcagaggaaaggctgggattagagccttctgtgagcactattcatgggattacatgagggagtggctgtgaaaagagggccccggactaagccctgggcacctgaacaagtgagaggtcaggaaggggagaaaaatccagcaaaggaaccccagaggacccggccagtgagctaaaaagaaaagtgcagaagagtgcagggaaatggtaaagaaaagaaagctttccacaagacaggaccgatcagctgagccaactgctgctgagtacagtgatgagagctgaagtctctcgcccgaaaggcaataaggcgggagggggaaacctgagggcagcgggttctctcttgggagcgggaacacggaaccatgggcagcgaggcaaatgcagcctggggagaagctctgagtaacggacgtgcgaggatgatgcttgtgcaagaaggaaatgaccgctgtcccggctccgcgggagacgaaccccggcttcccgccctcagggactagctctccagggaactgggacggtcagtgccggtcgaggcagctcctcgctgaaggaaggagcaggggacagggaagcggaatggggagcgctaggcctccaactacgtccatctggccatgtttgaagagccacaaaatggaggagggaacccctcagagcgtgccagagcggagactgctctccgtcgcagtcggggcgcttccggcagggcgcccactcccagccgagcgccctccgcctgctcctccaggattcctcttcgccctttctggggccgccccggggcgctctcagcaggatggccaacaccttccctccatccctacaccccgccgccccctggcccgtggccgcgctcggctcccgcactgctcactccaccccctacatcccagcccgctgccagagccggggagagggcgggggccgcgtgggcgaggccgtgaacagcggctgtcacgtgggccgcccaggccaataggggtgaggctttgggtcgagctcagtcctcccccggcgcctccgactggcagtgggactcagcgggcgtggaggtcgcggctgagcgagcgagccctgggcgagtgaattgtggctgtgggttgacggtggagacaccccccggagggaggcggagggaagggaggcgaggcctgcacctgcatgcttcccgcctcccactccccagcgcccccggaccgtgcagttctctgcaggaccaggccawggagctcgaagtccggcgggtccgayaggcgttcctgtccggccggtcgcgacctctgcggtttcggctgcagcagcyggaggccctgcggaggatggtgcaggagcgcgagaaggatatcctgacggccwtcgccgccgacctgtgcaaggtacgcacgcgtgcggcggggtgtggggaaactggcccyygccgcgcrcttgtggactggagcttcggctgggttttgtttttgcttttacatttcggattactccagcactgggagtatgatctccagcgatacagataaagccaaagttcccgcagactttcccggtcctctagcactcagaagggcatatgttacctagcttctgtggttccttttctgccttttctattcttgtccatttttctgttacatttgtggttcttttccttatgatgtgtrggaactctttgtatattctggatttaagtaatttgtcagtttactgtattgtggatactttctttgggtttctttcttttctttttttttaagccaaatttagcagtgggagagttgcataccaacttgaataacagtaatattaataagttctgaataacccattaccatcagaccagcctctgggtctatttcttgtcttttagctttgtttatggtttctttgttagacagagttttgtttttaagttatagttgcagtcaaatttttcttcataactttgtgtattattaggtcagttctcctcaaattttaatgcactaacagtcacctggggatcttgttaaaatgcagattatggttcagtatgtcgggggtgggatctgagattccaagtttctaacaaggtccccagtgatatcatatgcctcttttggaagcacgctttgtgtagcaaagtttttattgttttgatttgtgtgtgtggtttttttgtttgtttgcttgttttgttttgcttttaagacggagtctcactgtgtctcccaggctggagtgcagtggtgcgatctcggctcactgcaacctccatctcttgggttcaagcgattctcttgcctcagcctcctcagtagctgggattacaggcgtgcgccaccacrcccggctcatttttgtatttttagtagagatggagtttcaccatgttgaccaagctggtcctgaactcctggcctcaagtgatccgcctgcctgggcctcccaaagtgctgggattacaggtgtgagccacccccccggcctgtggtagcaaagttttaagtagtgttttagggtgtaagtatattcctgtatgtttgctgataatattgttactttttttttttttaaacggacagggtctccctttgttacccaggctgaagtgcagtgactcaatcataactcactgcagcctccaactcctaggctcaagcagtcctcctgccccaacctcccagatactaggactacaggcatgaggctatcatcttgtttttgtttttgtttttgttttttttcttgaggcggagtctcgctctttctcccaggccggactgcagtggtgctcttttggctcactgcaagctccacctcccgggttcacaccattctcctgcctcagcctcccaagtagctgggactacaggcgcccgccaccgtgcccggctaattttttgtatttttagtagagacggggtttcactgtgttagccaggatggtctccatctcctgaccttgtgatccgcccgcctcagcctcccaaagtgctgggattatagacgtgagccaccgtgcctggcctatcatcttgtttttactttttatctgcattacatgtgtagcaaggctttgctctgggtttgtgatttttcccttccccacaatcccctcaatcaaagattattttaataagtcgtaatagtggtagtactagtagcaactatgaaatttcttttagagtacttttggtggaaaggggctgtgatattaaataaacaagatggggtaattaagattccaaaaagtctgtgtcatttaatcatacttgaagaactaaatgtttgtgtgagtatgtgtgtatataggatgactcaagaaatacaataagttccctgtcctcaagagttttaaacttgactgggaaacagaacatacacagatgaaatgtgagtgatagttataaaccagtgtgttaaggatgaatattaagatgcaggtcaaaagcatgattgctgtaatatataaagtgtgttcagagcagacctttattgctcaaggaaatcttcctgaaagaggtaatatttaagcctggcttttaaagggtgtggattactaaagaaggatttactaatggtattcgactagtgttactactccctgaaataatctttgatttttttaaaagaaatatattagagaattagcaagcccttaccaggggcgtgaagggtgcaaaaggagtctgaatggcaaacagctagtctgataatgccagttgttgtcactacaggtgtacctggtgtgagtgttctgacattcagggccaagtgtatcatacttactctgcaagattaactgtgattctcttataacagagtgaattcaatgtgtacagtcaggaagtcattactgtccttggggaaattgattttatgcttgagaatcttcctgaatrggttactgctaaaccagttaagaagaacgtgctcaccatgctggatgaggcctatattcagccacagcctctgggagtggtgckgataatcggagcttggaattaccycttcgttctcaccattcagccactgataggagccatcgctgcaggtctggtgccaccttatgtctatatacctttttagggaggcttattttctcatattaattggaaattaaggatagtggctaattaaatacayttacttggtgatttgcctttgtttacaccaccagtgtactgagaattcatacataccatacatatttttaaatgggctgctgaggagatttgtgtggctatgttttgaagcacctggggaatgaacctgtgggagtgtaaagatgtgtgagtcagcaggcccaggagtttggagtcaggcatccatgttctaatatggtttcagttgctggctctggcttcggatgaaccatttgattctgtctgaccagtttcttcattcaaataaagactatgagagtaatgctagcttgggtatatagcaaatgccaggagattaatttctcactttgcaggatccagatagagagatgtatgttgaaatggctcacttgcccaataattccagggcagagaggacaatctaagggcagaagtgggagaaaagcgatagaaagctggaggagtgggaaaggctgctggaacccattgtcagtgacctgaagatgaggacagctaaggagttagccttagaagagaaagtgagatgagctcttatgctawttatgaggatatgcagcattgagagctgcagaaataattgggagtacctagcctgttcttcccactgaacatcattttggtagctattaaagttaaatattagatgatactgttctactttttactttatttaggaaatgctgtgattataaagccttctgaactgagtgaaaatacagccaagatcttggcaaagcttctccctcagtatttagaccaggtaagaatttcttgactcatctccaacataygtgtttactgtggaaaacacacattttattttcttgctattgcatgttattgctggccggggacccaattgcagtctctttaagccttcaacagttggcttagcaaaagaagttcggttccaaaatacacggagtgtattttgtgtggagtcacccagctcttggggttacacaatatatgtaggcccatggcttcatgccaaacagattctgtgtttgtctgggatttggggttaatttttgagctaacatgattttaggtgttttcatttaatggattatttaatgagggactggtactgtgctgggtgctgacatatttctgttactaacaatctcttttgttctaacaaaatgtacttttctgtgattatataagagtactttttttttttttttgagatggaatcttgctctgtcacccaggctgtagtgctgtggtgtgatctcggctcactgcaacctttgcctcctgggtgcaagcgattcttctgcctcagcctcccaagtagctgggattacagacgtgtgccaccatgcccagctagtttttgtatttttggtagcgatggggtttcaccgtgttggtcaggctggtctcgagctcctgacctcaggtgatccgcccagcttggcctccgaaagtgctgggattacaggtgtgagccaccatgcccatgtgtctggaattggtgggttctcggtctcactgacttcaagaatgaagccgcggacccttgcagtgagtgttacagttcttaaagatggtgtgtccggagtttgtttcttctgatgttcggacatgttcggagtttcttccttctggtgggttcgtggtcttgctggcttcaggagtgaagctgcagaccttcgtggtgagtgttacagctcttaaggcggcgcatctggagttgttagttcctcctgtctggagttgttcattcctcccggtgggttcgtggtctcgctggcctcaggagtgaagctgcagaccttcgcagtgagtgttacagctcataacggcagtgcggacccagagtgagcagcagcagcaagatttattgcaaagactgaaagaacaaagcttccacagtgtcaaaggggacccgagcaggttgccgctgctggcttgggcagcctgcttttattcccttatctggccccacccgcatcctgctgattggtccattttacagagagctgattggtccgttttgacagggtgctgattggtgcgtttacaatccctgagctagacacagaatgctgattggtgcatttacaatcctctagctagacataaaagttctccaagtccccactagattagctagacacagagcactgattggtgcatttacaaaccttgagctagacatagagtgctgactggtgcttttacaatcctctagctagacataaaagttctccaaatccccaccagattagctagatacagagtgctgattggtgcatccacaaaccccaagctagacacagagtgctgattggtgcatatacaatcctccggctagacataaaagttctctaagtccccacccgactcaggagcccagctggctttgcctagtggatcccacgccggggctgtgggtggagctgcccatcagtccagcgctgcgcgcctgcacccctcagcccttgggcggtcgatgggactgggcgctgtggagcagggggcggcgcccatcagggaggctcgggcagcatgggaacccaccaggggcggggtgggggccttgggcatggcgggctgcaggtcccgagccctgccctgcggggaggtggctgaggcccggcgagaattcgagtgtggcgctggtgggctggcattgctgggggacccggggcaccctcctcagcagctggcccaggtgctaagcccctcattgcccagggctggcggcgccggccagctgctccgagtgtggggcccattgagcctgcgcccacccagaactcgctctggcttgtgagcgccacgcgcagccccggttcctgcctgcgcctctccctccacaccttcccacaagcagaaggagccggctccagccttggccagcccagagaggggctcccacagtgcagctgtgggctgaagggctcctcaagcgtggcgagagtgggtgccaaggccaaggaggtgctgagagcgagcaagggttgcccgcacgctctcacctctcacccagcctataagagtacttctgctttcaaaaaagacatgtctgtggcatgaaaacatgccacacatacacaaaaagtgccctcctgaactagagggcagatcctcacactgacttaacatgctggcatttaagaatatcaagaactgaataaagaaaatgatctgcccaactgcgggtagttcatctgtctgagtcagaggttcttatgccttcctggggaggaagttatgatgccgcgaagaaattggcactgctgagttctacatgcagttgctacagggaggagtcttcatttagctttaagcgaaatacagcttaaaaatatcttacctgtattctgtacatcaacttgtgatggattgaggccagttctggttcttggaatgatatttttctctttgttagagccattttgttctaatagctgtgatgatccaatcaagaaagatgaaatggaagacagtgagatgtcaaggattgaataggacgtagaaccagaagatagaggttgaaggtaccgctttgcccctgaccaggggtaaattcttcaataactgactctgtccggataaggaggataataatgctctaccagcttcagttaccgtgttaggggatcaataatatatgctatgtagattaagccatagaaaagttaaagcttgaaacatttgttgggcagctgaaccatgaagtgaatgaaattaattcgccttcaagtggaaacatgagatccacaagccagcttttacttcacacttccaccttggagtcttgaatacctctctgtcttccttgcttgccatctgttctcttacttttgatgctgttattgtccaagatgttctctcttagaatagctggtaatgatagcacaatgcatagatgggctcagtccacagaagctaygtgaattctcccagtaacagatgaggaaattgaggctcagagatgttcagtagcttgcctaaggttgcataagctagtgagtggcagagcccagattcaaaccagatacacttcaaaagcaagcgctctcagctactgtgccggatataccattcattcagaatagcgtgggctaagcccactctgtgttgtgagacagagaacattcagactaagacatgcatgacctgtcctgtgggagccactcttcaccagaggcacttctgcacacacccrcgtctcatgcattttccctggtcaaattcaaccatttgttctccttagtgtctttgttgctgagctcatgtaaaaaaacactggagtctccagattrgttctatgtgggttcatgcttcccagatgccatcggactgtgtgttctcctcttgtccttggtcagttccctctcccatccctcacagggactggtcttgacactctctgggttttactgaatgttacatgtttatgttgaagagattgctgatrttagacgttaggatttatttggcagtgcaagagtttgtgtttctctttctttgaggatctctatattgttattaatggtggtgttgaggaaaccacggagctcctgaagcagcgatttgaccacattttctatabggsaaacactgcggttggcaaaattgtcatggaagctgctgccaagcatctgacccctgtgactcttgaactgggagggaaaagtccatgttatattgataaagattgtgacctggacattgtttgsaggtgagtctggctctctgattttctgaggttttcccagcacaatggagacttttcctgacaatgttactctttgtacttgaaccccataccttatggctccaagatacattattaagctttggtggttgatgtcctcaagagtaacaggagtctttcactgtctcttggcgccactgtcaaaaatggtgagctgtaagtcctgacatcatgtggttgtccttaggaattttaaaaaagttatatctgttctcaagattacagctagatctagcaagaaattttaacgttcttctggccagtgatctgtgaagtacataatccaaagtattgtgtgtgcctaataaaatctttaaatgcccatttgagagggtattatgctgatatcttaactgagatcctttgtgggcaaaacaagtgttcctcattttttaactgtgaataacatcttgcatctgaaaattagaaaataagaggtttcagkttctctctgctaaatccggtttagctactaagaagtgccaaatcatagaactgactctgtgctctgggtggtgtggctttctctgcccttcagagattccaggtcagggttccaggttggcttcctaagtagaaatccatttgtcaaaaccagacaccctcagttagtgaatgtttagggcatgggtttctgcccatgcataggaaaggtcttcccaagtggggcagggctccacaaagaggaggatggccttggaggctggctgacatcctgctttatacctgaacatcttgcaggcagagccaaaagccacaaccaggagagtctgtaccgaactctggtcatccaggactttcctttggctggactggaagaggggaaaggacattgggaggctgtttctcctcttttcctgcagcaggcaatggcttcactgtttaccaagtactgtttgccgtgagctggcctgagaacttccctgctrtgtaaaatattccacctcatttggaaaatactttctaagttccaaayaactgatttagaaatgagtttttaacttttttataaaaattgccagataaatatatgaatctattttagttgcaagacattcaaacaacacaatgtaacaaatgaatatttgactgaattatatagctgttctggatgttttcccctcagaygcataacctggggaaaatacatgaattgtggccaaacctgcattgcacccractatattctctgtgaagcatccctccaaaatcaaattgtatggaagattaaggaaacagtgaasgtttgtattaaaaacatctgattccactgattttaataagataaggagtcaaattaactattcgcaggcagcatccccatttgtttctcccttcaggaaaatttcaaaatcatatgtgactcagtgaacttattgactaatatgaaaatgctatgtgtaccatagaatatatgctgggagcaaggttgcattggtgttaaatctacttaaactgtctagttgatttgttgatgattagttgtggcatatacttkttttaaaaaagttaaataatcgtgtgtccgtggttttgagggaatgttgccaaccctttaggtataatcagagagactctttggcatattggccattgctgctgaaggttatcagtttttgtgtatgtagagggcctagggtggccagtagtttggaggagtgacttaattaaataactacttacagtataccctttatataattaacaatctttcagcgtgtttaaagtaaatatttgcagtgagggaaccaaggaagactgcatgtagagtcctaagccaagacttgaagaaatataggatttaagttggtagaaaggaatgggggctgggcacggtggcttatgcctgtaatcccagcactttggggggcctaggggggcagatcacttgaggtcagaagttcaagaccagcctggccaatatggtgaaaccctgtctctactaaaaatacaaaaaaatcagccggggatggtggtgcatgtctgtaattccagctactcaggaggctaaggcacgagatttgcttgaaccctggcaagaatcgcttgaacccgggaggcaaaggttgcagtgagccaagatcacgccactgcactccagcctgggcgacagagcaagactctgtctttaaaaaaaaaaaaaaaagaagaatgggatgaccaaatgaccagtgtgactgagttcagcagtgggtgaggatcattaacccctcagatgaaagaaattattggagcagtcactgtttactcgacagatgttaattgagcactaaaaggaaggatcaaaaacaccaaagagtaatgcatgtgatctgaaaatgaaaattgttggccagacatggtggctcacgcctgtaatcccagcactttgggaggccaagacaggttgatcacttgaggtgaggagttagagaccagtttggccaacatggcaaaacccatctctactaaaattacaaaaattagccgggcatggtggcacgcacctataattctagctacttgggaggctgaggcacaagaattgcttgaacccgggaggtggagcttgcagtgagccaagatcatgctactgcactccagcctgggtaacggaatgagattttatctcaaaagaaaaaaagatatgaaaattgtcgccgttgtggtggttcactcctgtaatccgagcactttgggaggctaaggtgggaagatcgcttgagcccaggagttcaaaaccagcctggtcaacataatgagaccctgtgtctacaaaagaaaaaaaggttagctgggtatggtggcacatgcctgtagtcccagctactcaggaggctgaagccagaaggatcacttgagcccaggagttcaaggctgcaatgagccattattgcatcactgtgctccagcctgagtgacagcataagactctgtctcaaaaaaacaaaaaaagagaaaattggctgggcacagtggctcactcctgtaatcccagcactttggaaggccaaggcagacagatcacttgaggccaggaattcaagaccagctgggcaacgtagcaaaatcttgksgctacaagaaatacaaaaattcaggtgtascggcgtgtacgtgtggtcccagctacttggcaggctgaggtaggaggatcgcttgatcctcctgggaggcggaggctgcagtgagccaagaatgtgccactggactccagcctgggtgacagagtgagaccctgtctcaaaaaaaaaaaaaaaagagaaaattatgtaccaggaagttcaggacaatagttcactatgtgttccaggcagagtaacttgggggatgaggtgctagggtcttgacatggaaattggactatcatttttagtcataggactaaaaatggatccagatgagcacatgaagggagagttgcccagattcagggtatgtgggaagagagagtggttaaagatacttgtgagattgaaaatatttgggaattggagaatgcttagttgagtgtggtgatgaattcaatttcaaaggaataagggcctctgcctccctttgaggcatttatactcttaacacagtggttctcaagctacatgttaccctagtgagccatttaaaaacaagtttgcaagccttaccctccaaagattcagctcgtctgaggcctccaggtgattctatgatgcattcagcattgaaaactactgttggtgactctcgagtcagagcccaggcacatgcattttagcaagctgcaccagtgattccgaccacccagacttgagaattgctcttggtagaggttggatgaacaatgttcattttgatttgggatgaaattgggaactctcacaaggctttgaagtgatgcagcaattcagtaattttgtttgttttactaagtaaatattgattgtatgattattgacgttcttttaccttggtaatttaccaaagctgtattttgatccttcgggtggtttcaccatcatgtgtaagtggtggaaataccagttcaaagaagaccaaaacaacaaagtggagcaaagattggcaaatggtttctgtaaagggctagatggtaaatatttcaggctttgcagatgttagggtctctgctgtaactaccgaacttactgtagggggaaagcaggcacagccaatgtgctaacaaataggcaactctgatgcagagcaagacttctttccccagcctgctcccactgtcagccccaggaggtgaaggcctgtgggtggactctaagagatccataagaacctttggaactatggacaatgacagatctctgtgtgtgtgcatgctttattttctggtcctcgacctgccaaaaagctgaaacttgctactatcatactactgttaaattacttgaggggtggggtgttagattctgtgaggatataaaaccagattgattttggggcatggctggattttgtacttactgaaattgaattgtgggtctttgtgacatttatatactcctgttgttttaaataggaattttatggagaaaatataaaagagtctcctgattatgaaaggatcatcaatcttcgtcattttaagaggatactaagtttgcttgaaggacaaaagatagcttttggtggggagactgatgaggccacacgctacataggtaatggaaattctccttttcctatgggaagatggcaatttggcagtttttgstgacactacttattaacactagataaactattaaatatatagcatttaattgttaaagtactaaatcctgctttctggtatactgtacctgtagcttttgttataaactatttaaaatgtctgtgtttctgtgtattgaatgatgccaccagcgttgctccagttgttcatatttacacataactccttttttcctcctaacaatcctgagaagcagaatagaacttgatgtaattatctgtagtttgtggatgggaaaacagcacaaagaaggaaatagcttggccactattccacaattaaccagtgacggtaccattccagaaataatgttttggtccatcatgcttgaccttattatttgtgtaccttctttgtgctttttcttctttgccttgaatatgtattactttgaatgttaagcacatttttctacagtaacatataaggtgacagaaaaattagacacattttgctggcaaagaagctgcaccacctagctttacttatcccctttatcagataagatgctataagtcaccaaaaaaaaaaaaatcaactttaaaaaaaaaaacttaaaaatgaaataataagcagaattgattctcttataattagcagtcccgaggttctcctgagctagataattcagtggccccgtggtaccatcaaaaaaccctgattctttgtactaggatgcaaaagaaaacaatccttgtgccttctatctctcttggtggcagcccagattgaattggggaatacatctgtagaaaaaagagaaaacagactctacttgtttcacctctctgttctcccatcctcagcatgtccacattgcctatttctaggctaatgaatggtaagaggaaggggctatcctgattagcttatagactaattaggactttcccctgacttcgagctgggatcatcttacctgagcatggctatgcagaggaagtagacactcagcccaaattgtttctctgacctgaggaagatgtgggcaatggatttggagtggcagtttatataccccctggaagtggtgctgcaagaagctgtccccagccacattgccaagataacctattagaaactgggggtaaaggaaaagtgccaacttgttattgtcagatgacttctcttttggttgacgagccagtttcttacttacagcatcttttggagtactgctagttggtgacttacattggcagcagatgctgggacactttgtctagcctccccagcatctgtttcaccctcctttcttgtgcctcttccccatggtagatggaacagtgractaaggtttagggaattttgaccatttaagtctgttttcttaatctgtctaacagagttataataaaggttaatgagatcatatatatgaaagcactcgagttaagaaaaatagtattgatttgattcacagaggagctgtctttgctcctagaaagacctgtccattcgagaccagcctgacccaacatggagaaacctcatctctactaaaaatacaaaactagccgggcgtggtggtgcatgcctgtaatcccagctactcgggaggctgagacaggagaatcacttgaactccagaggcggaggttgcagtgagccgagatggcaccattgcactccagcctgggcaacaagggcgaaactccatctcaaaaaaaaaacctgtccacagaaaaatgttaagtataatctacagttaaatacatgcatggctgtgaacagggttcaatgtgaaaaagatatatttgagtgtgtatcgttcccttggtttgcacaagtatccgcagggttgtgattcacaggctttggagacattgagtatgtgcacagttcatccacgtgctcaggatttttcaatagatatgacttgggtgggagagggaaaggcatggataagtgacccaatgaaagagatgtaatatgagagttgtgcatttttgtctaataagcattttcattttgtttattttctttttagccycaacagtacttaccgatgttgatcctaaaaccaaggtgatscaagaagaaatttttggaccaattcttccaatagtgcctgtgaaaaatgtagatgaggccataaatttcataaatgaacgtgaaaagcctctggctctttatgtattttygcataaccataaggtaagctttagagagaacagctagttagcataagcaactgtcaagagtcatgttccttctttgctgtaaaacaatgcaaaaaacaatgtgaaacaatgatggtttcttttgtgtcatgtcagagtccatccactaagtgaggttgtgttccgaggttgctgtcttggttaatgagactctggggttatcacagcatccattcccctcctccctcgggttagatctgagtctgcagggttgagtgtcacaaggtttttgattcacaaacatctcctgtataattggaagacttatatgtgccagcattaaatgcttttctgatgttaatcccagggcattgctgaataacagcctgcacaaaatggcattcacacccactgtgtgggacaaagaccccgacactgtcacataaatggttgtgatatgatggattttagtttctaacatgacgctagcttcttgttagagtggtggaactgcatcacctggttgagcagttctgccactttctgcatggctcactcattcatgtcactaggtgaccagccgctactaagagaccatggcccaaatgttttctggagagcttctgatggtaatgtatagatagtcatgtgacagcttttggagcttgtgagactattgagatacagatagctacaggtatttgaagtgagaccaaatgtgtggggctcagtaaagactgggttattaacaaaacaatggtttgacatttaaaaccatggataatgtgggcaggaaggaaccctgaagccgaaagtaggctggccagggtataagtcaggtgtggagcacttcccagcagtgggtcacccgaggtcactatagtccagacttgacgtttgccatgaacaattgtcaagggcttgctggcacccaagggtaaatgacgtttactagtcaagtgttcttgtgcttttctgagccttaggccaaacaaccatttatttcttaaaaaataggatgctaaatctaaagtcttaaatatttttacatttcataaagactaaataatacctattaatcatgtgttataatttaaagcagagataagaaagaaataataacagtttttaaagctggaatatagtctaagctgtccccttttaaagagtcttttgctgctgtgttggggagtacaactccaggttgtggctgagtaggcccagaggtttggagctgcctccttttgtgcactagatgtgtgtctgagaagttgggtatcagtcactttgctaaattaaccagttgagattgtttgtctatctggcatggtgtccccaaactcgagaattttcactgacacaaagccagaatgtgcatgctttgagcacataactgagcacacagccctctgtgtggtggggccatgagtgttccctaaggggcaacttcactgacctggacacctttggtctgtcctcagctcatcaaacggatgattgatgagacatccagtggaggtgtcacaggcartgacgtcattatgcacttcacgctcaactctttcccatttggaggagtgggtgagtcttattttctcctgcttgtagtagatatttcaaaagcaccaccatttcatgagtggattgtatgggctgctgaaatagccagctgttgcgtaccctgattgtcctctcctgagggagacctttcctggtcacccagttgactggttttcctgcttccccacccacccctccagcatagggcaaatgtcttgtcactctctttctgtcagcagcactgactgaccacagctttgttcacttcgttgattttgttatcctgccacatttaggagatttgggaaccaagaatcaggtctcaaattaattaagaagatctctcttcgtgtgtgtgtgtgtgtgtgtgtgtgtgtgtgtggtgtgtgtgtttaatgaagtagcaaatgaaaggttcggaataccagggacagaaggtagaggggttttctaatgtgcctttgttttctgctcagttcttacctgcattgttccccagccctttgttgggaggagcagcctctccttgaattgttttgtgatttgagtaaaacgggactccccctgttctagagaggatgggcagaaagaaattcattccaagtgaagctttgtggacatagcctgatccttgcttttccctttagaacatgacctgcctgcctctcccacatgtgagatgactractcagctttttatttctcctttgggacctaggctaggtgggcttttctactctctactagagctattacaaaatagccgatatgtaaacattctcataacaaaaacccaaccagaaaagccactgtcttaaagccctgttctatcctctccctttgtaataccgtcctaagtcagttgctccatgggatgcgatggcccagtttggcaggaccatctgttcctggttaaggaaaccttgtcctatgaccaaggagccttgacctatatagccacaggtccttgtctaggaggtaaacatattgccagcacccagcacagtgactgacatgagtgagggacaggcgggaagaggccaattggtaggtattgccagatccaaattggaaatggtggtggcttgtagagggtggtagcaggggagatagtggaaagggaagggggtatttttgggatcaagcagcaggattggctgatggagtgaatgttggaggagggggtgaatgagagaggatgactcctgggattttggctggagtaagtaatagttttgtagcccaaatgcttaaaagattggactctgttgtctctgttcctcagctcaccacataggatcctggcatccactgtgctagtgcagtaatcaactcggtaattgttccatatggtgtctccactgccctctaattgcaaatctaagtgacttgggttcagtccctgtcctacttgacaagatagcctgtggcatcattgactataccatcttatttaaaacaaaacaaggctgggcgcagtggctcatgcctgtaatcccagcactttgggaggccgaggtgggtggatcacttgaggtcaggagttccagaccagcctggccaacatggtgaaaccccatctctactaaaaatacaaatgttagctgggtgtggtggtgcgtgcctgtagtcccagctaccagggaggctgaggcaggagaattgcttgaaccagggaggtggaggttgcagtgagctgagattgcgccactgcactcaaacctggcaaacagagcgagactccgatctcaaaataaataaataaataaataaataaataaataaataaaaataataaaataaaacaagcaacctattatatacccacaaaaattaaaaatacaaaaagaagatgcaaaagaaaaaaacaggtttactctcttagcaaatttcaggcatataatacattattatagtggccatgctgtaaaaaaataaaaataaaaaataaaaacaagccttgacccccaaatgtaaaaggaatacaggctttttaagaaaacttggaaaagatagaagagcccaaagaataaacatttatattacccataaccccactatgtaaagataactggtatatgtcttgcacacatatgcacacacatatacacggtcatctgaatattctattcaaaaaggtatcatactatatattgttctgtaccctgtatgtgacagaatagtgtgacacttttccatgtcaatattcttgcatgtcataattttagtagctgcatacttttccatcatatgaatgtggcatatttatgtaaccaattcccagtattagatttttgtgatttcaatttttttggtattacgattcttatataatgtatctttatgcaatctctgattatttctttaggaaaaatgtctacaagtgtaattactctgttaaaagggcttatacaattttccaaattgaaaaaaatgcttttttcttctaattctcaaagtaatatagacacagtggcaaaaagtctaaacagttaaactttttaatattttggcatatagtttagatttttcttttttttttctttttatcgagactgagactccctgtcacctaagctggagtgcagtggtgtgatctcagctcattgcaacctccaactcctgggttctagcaattctcctggctcagcctcccaagtagctggaactacaggtgtgtgccaccaggcccagctaatttttgtatttttagtagagacacggttttgccatgttagccagcctggtctcaaactcctgggctcaagagatccacttgccttggcctcccaaastgctgggattacaggtgtgagccatcgcacccagcctaggtttttctttagaaatgcttctctttaagacttttgatagatatttcaagtgtctttgcagatttctgccactttatattcccatgatcagtatrtgagtgtttacttccttatatccccaattctggattattccattattaaatttctagacagaaaagggtctcatttcaatttgtactcctttgattattagtgagtttgaattttttttaccactctcatgaattttctatttatgtcctttgatatttttgctgtgttcacatcttccttattattggtatataaatagccttttttataagtaagaaaatcctcagtcctatctgtaatacatatccctttccagattttaatttttcttttaattttatctatgatttgaagcgtttatttatttagagacagagtctcactctgtcacccagggtggagtgcaatggcgcgacctcggttcattgcaacctctgactcctggcttcaagcaattctcctgccccaacctcccaagtagctgggattacaggcacccgacaccactcctacctaatttttgtagttttagtagagatggggtctcaccatgttggccaggctggtcctcaactcctgatctcaggtgatccacctgccttagcctcccaaagtgctgggattacaggcatgagccaccacatctggcctaagcctgtgtggctttttgttttttggtttccgatttggaaagtaggcttagaaaagctttccctatttcattattatataaatatcatctgtaggctgggtgcggttgcacacacctgtaatcccagcacttggggaggccaaggcacctggctaacatggtgaaaccccgtctctactaaaaatacaaaaaattagctgggtgtggcggcaccacctgtaatcccagctacttaggaggctgaggcagtagaatcacttgaaccctggaggcggaggttgcagtgagcagagagtgcaccactgtacctccagcttgggcaacagagcgagactctgtctcaaaaaaataagaataaaataaataaataattaaatattatctgtagtttccttccctccctccctccttttcttcttttcttttcttttttcttttcttttctttccatttaaccatggagttggccaagcatggtggctcacacctataatcccagcactttgggaggccgaggcaggtagatcacccgaggtcagaatcttgagaccagcctggccaacatggtgaaaactcatctccacaaaaaatacaaaaaaaaaaattagctgggcattgtggcatgcacatgtagtcccagctacttgggaggctgaggcagaagaatcgcttgaacctgggaggcggaggctgcagtgagccaagatcatgccactgcactccagcctgggcaacagagcgagactccatctcaaaaaaacaaacaaacaaaaaaaacaccctggagttcactttagaatgccatacgctgcatgatgtaataatttaccttttttttcccaaagagtaaactatgctggcaccattttttgaaataatcatccttataccatcagtactcaataaaaacacgtttgggtcattcttagggttttctcattggttgcattatctttctggtttgttttttccgtgggccagtaccacagtttcaattacagtagttgtacagttagctttataagtgacatttagtaagtgcttattgtatgccaggtactgcggttgaatccacgccttttcttttcttttttttcttgtttgagatagggtctcactctgtcacccaagccagagtacagtggtgcaatcacggctcattgcagcctcaacctcttaggctcaaacaatcttcctgcctcagcctcctgaatagctgggattacaagggtgcaccaccatgcctggctaattaaaaaaattttttttgtatagaggcggggtctcactgtgttgcccaggctggtcttgaattcctgggctcaagcaatcctcccacctcagcctcccaacgtgctgggattacaggtgtgagccaccgtgcccggtcaaatgcacgcattttagagacagacaactaataagtagtaaagccaagaaatgagccaaagttgtctggctccaaaacccacatattcaaccaatccagtagtttgctctttaggacacagtactatttcaatacctaaaagtaaaagctcctcattattactgtttttcgatgttttcttgcttgttcttatctaaatttatttttccagatgatctttggaatcactacctcctcctacttaaaacaaacaaacaaaaccttccgaaatcccctaggatttttattaaaattgatttaaacttaaattattttgggaagaatttatatctttaaaatgtggagtcttaatgggaatatgttatatcatctcttcatttatatagcccttttatatctttcaacaaaactttgtaatttccttcatgtcagttttttgctttttatttattttttgagacagggtctcactctgttgaccaggctggaatgcagtgtggcacaatcatagctcactgcaactttgaactcctgggctcaagcaatcctcctgcatcagcctcccaaatttttcccagtttcttactaccttggttatgtctttggctcgcccctcccttattctttttttttttttttttgagacggagtctcgctctgtcgcccaggctggagtgcagtggcgcgatctcagctcactgcaacctccgcctcccaggttcaagcaattctcctacctcagcctcccaggtagctgggactacaggcgtgcgccaccacgtccaactaatttttgtatttttagtagagacgggatttaacgatgttggccaggatggtcttgatctcttgaccttgtgatccacccgccttggcctcccaaagtgctgggattacaggcgtgagccaccgcacccggccccctccctcattctttaccctccctcagagttagggtttctcatggtcttgtccttgggtctcttctcacaccaggcctgcttcatgaatgattccttcctgcagcctggccttggtaaactgctccctggcctctggtcacctgtgtcttatatcacacatgccattccctctgcccagctcacactgctccgctttgtgcctgtcagtctgttgtacacacaatgaattagagaaatgaaactgtcacagagcatggctttgtggagggcagagatttacacttgcttattatcatccagctgtgcaaccttgttgccctgtcttactttccacaggctttgagaaagcaagtgggtgtgtggggccatggatgaatgaagccacatgggatggtgggaagagagcacatatagcatttagagtctgatccaggttcgggttctggctttgccacttagcagccgtgtgaccctgggcaggttaactgaccctgtaagctccctttccctctctggaaatgaggctgctgataattcaccaagtgggattgtggtgagaattatcttaagagaatgatttaactcttagcacagtccctggcataaatgagagccacagctctagaagaggtgcaagtccttgtcttgctcatggaaagcatcctgtttgacagggaaattgacttttccagggaagttggtaaggacttcctgaaaagagatacttcagctggcagagatgttcagtggggttcccaggcagcagggagtgcatgtgagctttcccggtcgttgttagacagaagtagcttgcatcatctacagtgaagcttgttttgtctgttccctttatttcaggttccagtgggatgggagcttatcacggaaaacatagttttgatacttyttctcatcagcrtycctgttkattaaaaagtttaaagagagaaggtgctaacaaactcagatatcctcccaacagccagtcaraggtggattggggraaattttttctcttgaaacggttcaacaaagaaaaactcggtctcctgttgctcactttcctgggtattgtagccgctgtgcttgtcaaggtgagtccctataacccatgagtgccattcagtctggtcctggcctgatggctgccagatgcatattctagcaggactctacattaacttgtagagtctaagacagggtcagtgaaccacagcctgctggccagctacccgtttttgtcactgaagttattggaacacagccacacccacttgtttaatcatccacagctgctttcatgggacagtgacagagctgagtagttgcaacagaggctgaatggccctcagagcctaaattattacagaaaagtttgctgatctctggtctaagagattaaaacagcgtagaacttgattgcagaattctgagctgtctgatcaaagggttagccctttgatccttttggtattggactttccttgtcacttacagctttgttcttgaatgtgcatgaaatcagcttaccacagaggtgaaggcragaactctggtacaacagctttggtgagggatattttattaggcttgagtttttttcctccaaagttcactacctgataaagtttatctttggtgattagtcattatagggatgggcttgcaaagaggccctcatgatagctgccttctcaaagcagtttgcgtattttgagatgaaagaggaaatccgtaattaaagttaagatggaatgaggaaggcaattgtgtctgtggtgccctcagccgttcaactgaggatataacattgaaaatattgaccatatcagtgaagaatgggcttggaaaaggcaatggtaatagttgtgtttatgttttgtttaaaatttgaaagggggcyggcgcagtggctcacacctgtaatcctagcacttcgggaggctgaggcaggggaatcacgaggtcaggagttcaagaccagcctgaccaatatggtgaaaccctgtctctactaaaaatacaaaaattagccaggcatggtggcacgcacctgtagtcccagctactcgggaggctgagggaggagaatcacttgaacccgggaggtggaggttgcagtgagccaagatcatgccactgcactccagcctgggcaatagagcgagactccatctcaacaacaacaacaacaaaaatttgaaaggggtttggctcatcttacagtatcccagccttagtggaattggagataccagttgcatttgaaatcatttgggttttctcagaaataccaagctgtgctgaggagaaaggccctgttgatttttctggtagttcacagactgcgttggtccagtaagcagagatgaacaccagatttcaaaacccagccctgtctgttaagagtgaggtaggaactttttgttttctttctatatgtaaggtgggccaagttggggtatgttttcaagggttttttggtttgttttttttttgtttttgtttttgtttttatttttgtttttttttgctacagttggaggcttaagggttattgaaaaaagaatgggccgggcgcagtggctcacgcctgtaatcctagcactttgggaggccaaggcaggtggattgcctgagttccggagttcgagaacagcctggccaacatggtgaaaccccatctctactaaaaatacaaacgttagctgggtgtggtggtacgtgactgtagtcccagctactagggaggctgaggcaggagaattgctttaacccgggaggcagaggttgcagtgagccaagattgtgccactgcactccaccctgggtgacagagcragactccgtctccaaaaaaaaagaaagaaaaaagaatgtttaacttacttayctctagacattttggacctgggcccagagtatcagggtgttaaaactccacttatccacaattttaaaagggtgaagtgacttgctaggaatctaagagaagtgtgcagaggcaatggcttagctgcgtccaggtgaagcatacatcatttcttggaaaagggcagctgagtgtgagcctcatttctcttccccttctactcagctctcctgggggaggtgccagctgactaattcagacttgtcaccatctaggcactgaactctttatgtcataatttaagaatatgttttttaaatcactaagtagttttgatttgttttcatttttaaaaaaakgtttgactttggaattcatggcagcaaatgtcgtgaaatcaaggtgtagtatacaatttaggggctactttctttgccttcctgaggctggaggtgtggtcggaagcttacttgggtctctggtcaatatctgtctcttttgttcttttcccaagacctcggttcctcagtttgataatgcatcttggtaggatagaatattttagcctcatggaaaatacggaggcccaggctgagtctgcattctccaatcttaccaaacccccaagaagcctccctcaggtgcagtgcagtgtgccaggcaggttcgagttcccaaagggtttggcaggcatgtttctctgtgagggtctagagaagcagcaatatataaaagaagcagcaatatataaaacctttagcagaaacaaaaaaatgtggtttgattcctggctcaatgaacttgggcaaggccttttctgagctctttcttgggcctcagcttgctcatctacagggtgagggagtaggtgtcagtgattccccaggccactttcaacccttccgctcaattctcattactaatagttgttaatatttctttggattcaatctggaactaggtagagatttggttttcttttccactttgctgcttttctgctcctttctgagcttttaatcctctttttatcaaattaccttttatttaaaataaatgactttgaatctgtactgtatatttacctgaayagtctatttattgtaattacatttttctgaaatggcttttatgtacttaatagtttccttattttgttacactcttggattttattttattaattaccttactagaattagaagggatttagagcagaagtattgtacacaaagtaaagttccaataaagcttataagctacagaaggcattgtgggagatgtgggttttaaaaggtcgagaaacataagaggttaatgttgataaatttcattaggcctttgacaactaaatatgacatttgaaccttgagattgcagcagcccttcctcagtcttcaataggaaggattaaattcagtactacttttgaattttagaaacaaaattgtataccagtttttgaattccatgtagagacttcagcttcctactgaaaatgctaggataataagttagtactctcatcttctgtctctactctgacattagctagttgacagtggacagaatatagccttcattatcacgttgtcttactcttattgttattgttgttttttgaggaagggcataatcctttggcctaaaccgtgcttcctaggcttcctagggatatgtagtccttttttgtacaatgcatgtagagtctcttcagacaggaggtgtctgagtcccagtgctgagcttgtgttgcaaggctggttgtgggtaggtttttaaagcagctgagtaaactgaatccttttttcctctctccaggcwgaatattactgaagaatgatcctgttcaacctcctagtgcctctactgaattattcctcttttaaatggttaatgaaccaataatttttaaatcataccaaaaatagtaagaaaatatgcaaacactctgtgatcaaacttaaaagtcattgccattcatcattaataaaagttgccatttcaactacgtcccaacattccctaatagggtattcagggaacctgtcttaaattgtgcttatctaaatcttggaactttgagctaggggaggagaatgtattagactaaatacaaactgcggggttgtaagggagtctcagaacctcactgaatccttcactccagttaatggcactgctcacttcctgcctctgctgccaccatcactgtgtgaagctttcaagagcttggtacttcccagggctaccggcagtcctctgtagtccagagaggtgagattagatcttcttggttccctgtgaggtttcaggcactaaaactctatgtggggaagggaggggttactcctcctccaatgggactcaaggacttgacctccaggagtaggcccctggtcagaagtgccatctcaccagtggtcttcattcttcctcattcattctttatcatcctgtgttctgtttagttgcaacaatctcttgtgactaatgtcactcaaagcatcttgtaaatcctagggcttcctggaagttagttgccaaagtcatgcaagcatcacctgtcattcttgtgttggagttatagaattctacatcttataaaacctaactggcatttaaaaaatactgtggccgggcgtggtggctcatgcctgtaatcccagcactttgggaggccgaggtgggaggattgcttgagtccaggaatttgagaccagcctggacaacacagtgagacctcatctctatcaaaaaataaaaattagctagatgtggtggcatgagcctgtgttcccagctgcttaggaggctgaagcaggaggattgattgagcctgcgaggccaaggctgcagcaggctgtgattgcaccactgcacttcagcttgggcaacagagcaagaccctgtctccgaaacaaataaaaaatactgtaataaaagtacttataaacatactaatcctctttcaggaccctaaagttgcaggttagtaggtcttcaaggacaaatctgtaagtttcttatttctgtagtgcaagtaaaatttcactttttgaaactatagagagatccctttctgattagcctacagaacttaaagtgagggaaccatttcctctcacagacaaagaggcctgggatattaggactttggggtttgagagcatcatggggcagacagatggtggatggtctggacaagaagcgagtaagccactgcggttggtcatactgaagggaattgatggcaagaggatcccctgagcaagtcagaagttactctcatcagtcgttcatggtcacaacctgaggtactctgctgagtgggcaaggctgaagaagaggcctgtggaatgcagcattacctgctggacagagcagggcaggcagttctatgccttgkagctcctgactgcagggactctgtccccacactcaraaagactcagctcactcaatgagagaatgtgatttactttatagaacgtataatcaactttgttgaataatttgttctattaaggctgtctaaagtatgtgatgtcttcatcatagtatgaagtgttgaaaattaataacgagcctagtttaggaaaaagctgcttaaaactgtggctctaagagagtaatcataaaataccttagataaaattgcactatggaattttcattgagtatgtttaaattattggcttgtctactaatacacatctgcttcaaaatgaacatatttcataaaattrgcatcaattttaatgacgctcctggtatggaacctcagatataccctattggagacaatcctttgatcataaattctccccaactataaatcattttatgtctttatcatagatggtatttgtcaactttttttttctcattttaaaattcttagctgagaagattttctcaaactttatgttctgctgtgtgtgttgggggtggtggttrgtagctatagtaaataggtttttccagtggcatcctcctacccccagttgctgatctagaacaagtgtttctgtaagcatatttgtagaacactaatcccgcaagattttacacaaaaaaatggtcctgccaccagtcctgtataccactggcttgtaaagcacatcagcaaactaaaggacccaggtcatttggaacctctgaagtgctagtgtgtgcagctcccagacttccttgaccgcggagccgtttaccttaatacctgttaaccatggaccacacttgggcaaacagtggcatagagtctggaattgcttccatgatgactttgctgtgctctgttcctacttgttttgtgcccttatttatatcatgtcactactagaagaaaaagttcagtaagaacaagtatttctcaaagtctgtgataagtgaaaatgctgatggaatgaaagaactgtagaaaaggggaagaagggtgtatggacagccactgccctggtcagggtctcacagcacctgcatctgccaggagcacacgggttgtctggacagggcccactggtccccttctcagagcttcacagaggctttatgacagacttgagcagcaggctgtgcccaggaaatgtgtaatctttaatataacagtggtttttgtgattttatctgcagtgtcccatttgaagccatttacattattaataatagtgacaatccctggactctgactcgtgcagttggctgatgtcttctgtagagcagtccaagtcacagaagaaaactccagcttgaccagaacagaattgtcaagtctgttcagacccctctgagtgtcaccacaaggaatcagccaaagttctttttttgaggagtggttcaaagtgtccacctgcactagaccccattggtgtttttgcagggcagaccgtggtgtgtttgcatactggggacagccactcctggctttctatttccaagcttctttgctagtgcctggtggctaggatcctgaccgtgagccccaccatcagtgtggctgacgccgcccccagagcagccccacggcggatgaccagctgtttcactgatagtctgctggtaggagctgaaagggcrtgggcctcctctggagtcctgaagaagtccacgtggcactcagaccttgaatacgttgtcaaggtaatgccaggggaactgcctgtagccactgcggaagcaaacaggagcaaactcagcaggtcaggggtcagagggagagctttggccttggaatcgggaaacctaggttaaccacctggctgtgtttgttacacctcacaagggacgatgcctatacagtagaaaaataactgctttatctactttacaagcaagatcagaggaggagatatgcaggaaagcatcttaaactgtgaatttcacgtgcagataatgcttactactaggatctcatgaggagtgttcttgtcaacgcttggccctgtgatgatctgtggcttcaaaagcacgtgggaaacacaattaatcatgtcttaccgtattctctcatgacaacttacgctcccagagttttagctggctcactactgccctgatcaaggattagcccaggatggatgaggtcatggagacatcatctgtgtgagctttgggccatgtgcacacacgcctggcactcaggaccagccctggggcagagctggggccatcacttcatgacatggacactgggcacaaaccagagagatgtttgtctgcctgatggggtggagagaggtagatagcaggtgcccccccaaagccaatgagtcaagccaggctggctgacaagccaggctccccacaagttaaaagttggccttccgtcttgagcagagttcagtgggggagatcatgggctcttgaatctgacgggttgatgcgcagatcttatgtctggcctttacaagttgtgggatgagggaggaaatacctaagttctttcagcctcacttcctcatctgaaaatgggcatacatctagttgcctctcaaggccaaagacttggtgtggggcctggtacttgcatgcctgctagacaatagatgttgttgtcttcctggtgcttaggacatcattttcataataatgggaagaaaaatagcttgggcttgtacaatttccaattgcatgaggcacagagggcagacaagagcaacatgccactgacatttatatgtgtaccaaagtagaagcagcggtgacagtattacctgaagataggactgctttctcaggcccaggtctggttgcagtgctctctgctctctgctgctgctgccggcctgaatgtttcttagcctaaaggagaaagaactcaattgggtcaacctgccagctcaacagttcaccccttcactgctagcctcgcattctctgtttttaaaacattgcaagctgaagcagcatatatgcatgtattcatagtcatggggcttttagaaagtatcattttaaggctgggcatggtggctcacacctgtaatcccagcactttgggaggccgaggcgggtggattgctggagctcaggaattcaaggccagtctgggcaatatagtgaaaccctgtctctaccaaaaatactaaaaaattagctgggcatggtggcgcatgtctgtagtcccagctactcaggaggctgaggcaggagaacctcttgaccccaggaggcagaggttgcattgagccgagattgtaccactgcattccatcctgggcaacagagcgatactccatctcaaataaataaatgtatcattttaaatatctgtttatccagcatcttaagtgtcaggatgactttttctgtgcacaaaggcaaaaccacaccctgataggattcagggtctttgagagaacactgcttctgtgctctgcttgcagacttgagttgtgcctttgctgtgcctgagatgcaaaggctgccctgccctgtttaaaaaggacatcaaagaggatggtgggcagggtgattttatgaccccttccaaagtcaaggcacacgctcgggggttcatctgggttcagactaatttgagttctttgcgtttgtttggttttccacagatggggctgtctaaggaaggtttttggttttgtttctgtttataactgcagagcatgcttcttatactggccaattacagtgacaggagccactgttgaggctcaggtggcccctctgtaatcccccacaaaacacctgcagcacgcctgtaatcccagcactttgggaggccaaggtgggcggatcacgaggtcaggagatcgagaccatcctggctaacacggtgaaaccccgtctctactaaaaatacaaaaaattagctgggcgtggtggcgggtgcctgtagtcccaggtactggggaggctgaggcaggagaatggcatgtacccagaaagtggagcttgcagtgagctgagatcgcgccactgcactccagcctgggcgacagagtgagactccatctcacaaacaaacaaacaaacaaaaaaaacacctgcagcttataccacactgctgccaagttctgatgtgctctgggcatttctggctgagtagtcactccacctgctggggtcaggtgcagggtgtcttgtggccagggtcagctgacccacttacctcctctgcagcaagcttccagtccagccgggcagtataagcaacaaaggcagcagttgccaggaagacacasgccagcatgcccagccagaggcctggaggagacaagtgatgatgggaacaatgtccgacgaccacccaggcctctcccgacttcctcacaccacatacccatgattctcattctgaccacaaaggtcagaaggatgcccagtggtaggccgatgatgtaatatgtgatggcattcacagcggcaccaaaggcctgcttcccagttcctctcagaactccgccatagacacactaggaggggagacagaaatgggcaagagtcaggatgatgagactaagagcaggtgtcatgcagcaggcactgtgctaagccattcgcatggcattgcttcactgagttctcacagcactggatgggtgcccttatctccctttcttccctgagggtggctgtccaagacaggtcagatcacttgtccatgttacacagaagtaactgtgttttgaacacaaccctacagtactcaggcttcactgccacaccatatggcctccctagaaagtaaaggtagaattggtggccagcaaccagttggtctgggagactggactaacttcacatgatacagaggtggtgtgttggtttcctgtggctactgtagcaaattactgcaaatattgtggcttaaaataacataaatttgggccgggcatggtggctcatgcctgtaatcccagcactttaggaggctgaggagggcagatcacttgaggtcaggagttcaagaccagcctggctaaaatggtgaaaccccatctctaaaaatacaaaaattagccaggcaaggtggcactgtaatcccagctacttgggaggctaaggcacgagaattgcttgaacctaggatgcaccactgcactctagcctgggcgacagagcgagacttggtcacacacacacacacacacacacacacacacacacacaaatttattattttattttacagttctggaggttagaagtttgaattgggtctcactgtgccaaaatcaagagcttgttccttctgaaggccctagttgagaatgtgtctctgctttttctagcttctagaattccttctgtattcattggctggtggccccacatcactctaacctctgcttccagcctcacatctcctctgactctcctgcctccctcttctaaggacccttgtatttacattgggcccacttggatgacccaggataatccccctatctccagattcttaatcacacctgcaaagtcccatttgccttgaaacactcacaggttctggggattatgatgtggacgttgaaacttgggggccattattttgcctaccatgcatggcaaacagtggttgttagcttattccatatgagacaagcagccctcacccactgctgtctgtgattatgtctcatctcaaagatgagaattgctctggaaaaagtactgtttatttcattagtctcattttcccaacgtgattccagatcttctgaactacaggcacagctcatccttggtcaggattattggccaatagatatttggttatttttattttgttcctgtgagaggtggggagtattttgtggtttgtacacatttgaacaaagaggtaatgcactggggttaggagatgtatgcctcttgaactttgtaatatggtatgtatatttctggttattatatgtcatggcatgatcttttttggctaaagacttctcccaaattatgattgatgtaccctggaccagtgtttctcaaatggggatgacaaattctgggatgtttttgttgtgacaactgtgggggtgtggtgggggaaagtgttacagcatctagtgggtagagaccaaggatgctgctaaacatcctacaatgcccaggggaccgccctccccccaccaaacaaagagttatctggtctaaagtgccagtagtgctgaggttgagaaactctgatttagagtattgtgaattaaagtggcaatttcagtggcaggaagggccagtggctttgctagcctgaggttgtgggcctgtttgggagaagccatcgaccagtggactaggcagggatttaagagggagtttgatgaggtaaaacagccaagggaatggggaggtactggtaagttctctacatatcccaagctgaccagaggctgtgcatatggtgtagcagagaccaagcctcccacatgttcctggacaatggagcctgtccacatgggctgaagagacccgtagtacccagaagaaagtaaaagccaggactcacttgaaaacagctggaactctgaatacgtctctagcccacacatggatctgtcagcagagaatggaagctttgctagctatcagaggtgttgaacacagtctctgaccagtaattggctgaacactaagctctgcagacatttttaatcctagaaagaacattttaaactagaaagctagacttaaaaaaataagaacaagggggaaaaaactgagcaagagacatcagcagctgtacattgtagaggagacaggagtcacagaatcagtctaagcaagttacttaaccaacacaatgacattccttgggtctcacatgcagcattctccaggatagacctgcggtaggccacaaaacaaatctcaataaactaaacttaaaacaatcttttttaagagatggagtcttgct

SEQ ID NO: 95489 - DNA, 22401 bp, Homo sapiens
tttccatttgcatttgtaaaatcaactcttgatggattcaaagtgaataataaaacaataaaaatcttagcagaaaattaggaattaatcctggggcaaggagtaccctcctaatctaaactaaaacaggagagttctatttagctttataaaaacttttatataacaaaatataccataaataaagtccgtggataaatgatagattcaggaaaatactagtgatgcagatggctgtaatatacaaagagctcctagacactgacaaggaaaacacaaacccttccaagaaatgggcaaatgccaatggccattgcacagtgaggaatgcaccagccactaggcggcagggaaacggcagagtgccacacactgccaggccagctggaactacaacagccccttagggccaccttggtggatagtcaccggcaacacctgtgaagactgacaaagccagcatccctgggatctaacacgcagaaatacacacgccaagacatgcaaagcggcccatggagcattgatccaaagtggaaggcaaagtggtctcccatccacggggaacattgtggttgcttgcacattctacatgcttaccactgctttcacacggccatgaggaggaatggactccagctcccggccgccccggagggagtggggtcagaagatgcagaagagggtgcatgatgaggctctgcttttaaaatgctgacagcttccagtgtgtcatgtacatttttgtgtatgtcaaataagcactgagaaaaacttagggaaaatattgtggattacagatgagacactcatattgagaaaggggcaaaccaagtacgtacaaaagaaaaagtctgagctaaacaatgtgtattatgtttgtaaaattacatttgtgtgattattgtgaagaaacaaaacttaaattttctttgcatttttcgagtaaacattatatttcatgtgtgatgagggtgcattccgtgtccgttaagatccaggacggggcttcccagaccccaagagactggcagtaccaacccaagcgtgccctggcatgtcctcctggcatgcccgctgtgtcccttccaggatggccggggtgtgggctggtctgcagaggctctgcagctggggctgcagccaggcggtgactcaggcaggttccgcctgggctaggagggccgggcattcctgctgtgaggctgcccgtgcctaactcaccatgacttgcactttgctgccatcctgcctggcaggctgacttagccaggatggccctagtacccacttcccctccagccagcactcatgccttctgccccgctaagatgccctttgtcctgactcggcagaggcttcctgggagccagggcctgggcctgggagccacagcttcctgggagcaggaaagtccaagggagatggggtgaggactggggcctctgcagcatcttaggggaggctcccccttgctcgcactcacctccgctggctgcaaacctgcagcttctctgacccaaggcactatgactggcagcagataaagagatgaagaagccccagaagtcctttcctacaagtccccagaaggtgtggacacagtggggaaattgccccgggcacagccagttctgctgacttcatgcctctccaaagaggggctttgtaacagtaacagagggctttgtaacagactgactgctcttggctgggcacggtgactggattacagctctctgtggccttcaactcctgggctcaagcgatcctcccacctcagcttccccgagtagctgggactgcaggtgcgtgccaccacgcccagcagatttttacattttttgtagagatagggtcttgcttggtcacccaggctggtctcaaactcctgacctcaggtgatctgcccgcctcttcctcccaaagtgctgggattacaggtgtgagtcaccgtgcctggctgaacactaagtcgtattatttctacctaaatatgtgtttgtacgcactaagcaagctctctttattcccccacctccccacccttcccagccctggtaaccaccgatctattctctatcttcatgagatccacttgtttggctcccacacatgagggagaacatgtggcatttgtcttcctgagtcataacacttttaaccaacggggaggtccctgagacccactgcctaattttctcctttctactctctcttttttttttgagacagggtctacctggtcactctgtcccccaggctggagtgcactggcatgattacagctcactgaagcctcgacctcctgggctcaagtgatcctcccgctcagcctctcaagtagctgggtgcatgccaccacgcccagctaatttttttttttttttttttgagatggagtctcgctctgccctcatccaagttggagtgcagtggcgcaatcttggctcactgcaacctccacctcccaggttcaagcgattctcctgcctcagcctcccgagtagctgggattacaggcatgcaccaccacggccagctaatttttgtattttagtagagatggggttttaccatgttggccaggctggtcttgaactcctgagctcaagtgatctgcccgcctcaacctcccaaagtgctgggattacaggcgtgagccaccgcacccagcctccttccttttttttattttttgtagagatgagtctctctatgttgcccaggctccttctactcgtataaagaaagtggtttcccctcccaacaactatatctaatctaaatgttccttgaaatttaagcaaactcgctattcattcattcattcattcattcaacactttttttgctagctttgggtgaatttgctgaaaatcgtcttgctaaatgattgcttttccatcagagggatggttaggtgtagtgggctgcttccgtatcttcagaggtctcccttgtgccaggatatggtgctgaacaaaagttgagatctctgcctttgtggacattccagtccaagggggaataaggagagacatagtcacacaaacaaagatatgaacgcaggttgtgacaggttcctggaagtaaggaaggttttatttgagaggtgagagaggtcagggaagctgagatctgaacatggataagagttagtctggtgcagagtggaagaaaaagtgtcccagggagcaagaacagcatgtgcaaaggccttgtggtaggaaattgcctggttaagtcaaggaatgccagcagactggagtgcagtgagaatggtgggaagtggtgcgaagtgaggctggcaaggcagccaggagccaggccaggcaggggctcacaggccatgggaggaagcttcctgacagcaagggggtgccacccaaggatgtgaatcaggggagagacatgctcaggtccttatcgtccgcatgtctctctggcagccacttggagaaggcagctgagcctgactcaaggagagtaggtagagggcaagaacagtggcctgggagagagagagtgagtgacagcccaggtgaggatgaggcattggggatggagtattaggacttgcaaagattaactcatgcttgcaatcccagcactttgggaggctgaggcgggaagatgaattgagcccaggagtttgagaccagcctgggcaacataatgagacccatctctacaaaacatttaaaaattagccaggcatggtggtgggttcctgtagtcacaaggtgggaggatcgcttgagcaccggaattcaaagctgcagtgagccgtgatggcaccactgcactccagcctgggcaacagagcaacaccctgtctcaaaaaaaaaaaaaaaaaaagaaaaaagaaaatctgaaaagcaagtatctgcaagtttctagcacaacccacactcccacacttttgccactactgaaactataaccaaaacccaaacacgcaaacaaggattttgttcttcgtagatttgaactgcttttaggctccttgctctgacgcttccaccactactgctgccacttttgatgacacccacaccacctaacctttccaggatgccctcggcccgccaggcactgttctggtcacttcgtgtactcaatgctgtgttgctggcttttgctagttgcttccatggttctcccaggggagggccgctgccacaagaagtcagctccgaatggccttcggccttgcattctgccctctactcaagatccaaattcccaggagagtcagggaggcctcatggggagcccaccccaacccatggctggcctggagaaggcacctggttgatcatctcaccaagtaggaaggggttgcctgcaaagataatcagctgctgccaccagaaaaggggagaggctggcacaggctcggtcttctcccctctcaggaggcaccccactttgcacctaccacccagtccagcccctgcacaggtgcgaggtcctgcagatgcttctttctgctgtttctggaatgtttcccattctgttagtcttatttgggggtctcgtcatttcttgcctgcattgctggaagctgcagcctttgggctagacctttctcacactgtgccctgtccagggggttctctaaaacaaaaaatagcagacatttgtctgtctgataatctcctcagcgccctgcacccccacagccagcctggcccacaggcctccgtgagcccccgccccaggagagtcattcacctccacacctcctgctggcaacagtggacacatcgcactttttcgtgacataacgttcccagcctctgtgcctttgcttctgctcttccagcccccttgctgttccttgcccaaatgcttctcactcagctcagatgatgttccctcccacggactctcaccccagcccctctagcatcctctgcctacctggttactacagtgttcacattattttgaaatttcctgtttattttgtcagtcaataaatatttattgagcatctactataaatgctgtatggagattacagcagtgaacaaatcaaattctagctgtcaggagttaagggacaggtagcaaacaagatataaacgctccagagaaaaaataatggaggaagacgacagcattgtgctattttccacagcacattggagcgtagccgtgtgggtggatgtaggggaagggggctccaggtggagagaagcaggagggccagagcacatcctcaggactcgtaggccaggaccggaaccttgtgttttcctcgaatgaaatgggaagcagggaccccatgctggtaagcagtctgcctgcaggcgggtgagggtggcgggaagcgcctggtgagaggggccgagagtctgttccacacctgcctcctccccacagcgtggtgcagagcaggagcccagcgaacattgatcagacagcgtgggaacggcttttccagactccttccttcccaagcatctctggttttcggtgaccacacagacccttggccctcttctcagctattcaacgagagagcagatttatggattggagacccccatcaaaagtccccagcctgtggctccccagggttaggatctctgactcaatggggccctgtgcacactgggggatgtgaagggcccggggcagcggtggctgggggtgcgtttcgggggagctgcatgctctcactgtggttcgtggctgagccctgccgatcttatgtaaccagagaactcagagaaccgcatctggcagcggcaagtctggaaagctggaagagctccatgccaggctgaatcaatcagcagcccccacgcccagggcaaacataggctcttttgaagattggagatgtgccctgcccaagccttcagaaacattctcgcatttcagaagtgaacaaaagcaaacagcccgggacctaatccccaaaacctgggctgtagggagcagaggtccagaggacgccacaccccacatttgaatatttttttttcttgtcacgcaaacttcctgggcaggaactccaagggctcaatggacgggaagcagggtccttaaatacgtcccctcttggctcttgccgttccaggagccccagttaccgggagaggctgtgtcaaaggtaatcctcttccctgcattccttattttttctcttgtctaggtggagtctgcactcagagccggggccctaagtgtcaagagtcctacmtcatctctccagggggtccctgcctctgggaccatcatctctggagcatcctcctggacctctggcagctctgccatcccccaaaccaggaggcagaggtcccagggatccgcggagcagggacaccaaggtggccgtggagtgagaggccctgatgggccgtcagactccatgactggaaggaaggcagcagagccgagtgctaaaggcatgagctgctgacagagatgcatgtgggttcaaaccctgacatgccacctgctaactgtgagatcagatacagcattaaacgtttctcagtctccctttcctcatctgtaaaatgcactcataaccgtttcttcttcatgggcatcactacagagcttttgtgaggatggaaggcaatgaggaggggaggaggtgtcactggggggcaaagtcaacactggcacaggtgagaggagcggggtgcaggaatgtggggtgtgaggcgacgggctctggggaggcccccagtgcatgctgcagcagctcccatttgggtgcagctgcgacgtgatggtgtccactcatctctgtgaagtggcacctttgttaacctgtctctcggggaagtcctgggaaggccgtccagcccagagaccacagttccaagtggcgatgctggggtgcaaggccaatcccgtcccacgctcaccaggctcttcccacctgggctgcctgccttggtttgaccgtacaaggctcgggagagaagcgggaccttctctcctgggttgtggtcagcaggaggggcctggcccatgggactgaggaggtcccagtgagggggctttcccagcctcctatcagaacatagggagggaccatggaagggccaggcttagagcaccctcaatgccagcaggtccctcctccctgtgcagaaagcctgggattaggggtcagcctatggggaggggaggcagaggaaggattggaagccactcgctggaatgtaggcaggaccatatatctatatacaatataattatatattacatatgatatatagggttttttaaaaaaatggaaataccctatttctgctgatgttaaaagttatgccgggtctgcaagtgggctgagtatctcaggaaggggagtaaggaactggtaacagtggcccctctgtggggcagcacctgacagctgatggagcagggaggagggaggcagacttttttctgtgcccctttgctatattttacattttgtttcatgagcatgtagtgcctatcttaaaacgcaccaaaatttaaaaaatacaagctcattgcaaaaagtcaaacattgcataagaggaaaacagatcatcaataattccacccccatcagttgtctcatcgtgtcgggggctaccgttctagtcctttcttgcatgttagagcgtgcacgcccacacacacacgcacacgcrcgcacacacacgcacatgcacacacacgcacgcacacacacacgcacatgcacacacacgcacacacacacatgcacacacacgcacacgcacacacacacacgcacacacacacatgcacacgcctggtacatctgttgttctgtaacttgttttctgtttttctttctttctttctttctttttctttttttagatggagtctcgctgaaagtaattatattacttacccgaggccttcaaataccgcttccactgacagcctcttgacttctagcaaatctcactaaccttgccttacctcctaccactaatctaataggagaactctgtgattatggctccattctcccggtcaaagtgctggagtgcaatggcccaatctcggcccactgcaacctcctcctctcagcttggttcaagcaattctcctgcctcagcctcccaagtagctgggactacaggtgcctgccaccactcccagataatttttgtatttttagtagagacagggtttcaccatgttggccaggctggttttgaacttctgacctcaggtgacccgcccacctcagcctcccaaagtgtttgctaggattataggcgtgagccaccgcgcccggcctgtaacctgttttctttcttatccccagtgcctgagacacccctggtgcagagagagcccctacaaacatgctgaatagcctgctccacctaatccctaaatactgcacagtaaacccttacgtgggtgtgacaggagtcatttaaactgtctcctttctttcggayctttgggatgtttacaatacttccctgttatagaaaacagtgatgactttcttattcgtgaatgtttaggaaaggctgtaggaccttttcgtcacagagaagtatgtttgaaaaacttttgccacatattgccaaattgcccccagcagggccatcccgatttgccactatactttcgtgtattggtagcaggaatcgcctccacacctctttgtggaaatctgcagctctctgaatccttggcgggcatgggcgtgcgtctcccaggtgtggcacgcgtggtttacacaccaagcctggttcagctctgccaagaaaccagcgctttttagaacaatggcttagccaggagggtggtgctgggtttttctttatcggcttgggtgtggaatcgcggactgcgcccctccaatctgatctggagagtggctgactgcgtgtgcagagctctgggggtgttggtctgggattgtgccatcagctttgcaagcaagtaagggagcrgaaaaggccgggaaaggccctgccgcgagyacgctgccaagagcccccagcagcagttcggcttaggactcgggttgcggcsggtgtcaccttctcaggggctagcaaggcagccrgggcccaggcgtctgagtgaggggcgggagaggaggcgaggcagaaagtggaccttccagcggaaaggccattttccccaaggccgagcccagggaagtcccttcctatagaattcaggcagggtgggaggcagggcgcgctcgtgcccctcagccagctgcaggtgctctctgtccccaggcgccatgagcaagatcagcgaggccgtgaagcgcgcccgcgccgccttcagctcgggcaggacccgtccgctgcagttccggatccagcagctggaggcgctgcagcgcctgatccaggagcaggagcagsagctggtgggcgcrctggccgcagacctgcacaaggtgctcaggctgggcggccgccttctgccagtgtcggggccatgcgatggggcgtggggggaggggctggggagagtgcgacccagagaggttcaggaaggacttggggccacctggcccctcggtcgcggagactgggcgcaccgccctcccctccgccgcgccccgcgcgcccccgccgcctcttccgccctctggccttttcctcctggcccggcctccgcgtcccgcccgcagcgtcccccatttcaacttcctgctgccccgacaccctgaacttctggtcctccccattcctcagccccacgcaggaccacttggttctccacaccaggaaccagagcagcttggcaccccggagggcatggggggctctcccctccctcccagttctcacaggggctgttccgtccctcaccctgagcaagaccagacacctctgcattcgcagccccctgctgtccccacatgctgcctggggtccagcgctccggagcccatcctcccaccgactaccctctttgctcctgcacttttatttttattttattttatttatttatttgagacagagtctcgctctgtcgcccaggctggagtgtaatggcgcgatctcggctcactgcaacctccgcctcccgggttcaggcaattctcctgcctcagcctccccagtagctgggacaacaggcgtgtaccaccatgcccggctaattttgtatttttagtagagacagggtttcgccatgttggacaggctggtcttgaactcctgccctcaggagttcctcaggaggagttctcrgcctctcagagtgctgggattacaggcatgagccacagcgccgggcctgctactgcacttttcaagaaatggctcaggacttctcatcttaaaccagaaacaacaaggaaacccattctgttgactttacagcttctgtgttgctcttcacagcccaagtttataaaagagacgcgttttccgccgtctgcatctcctcttctcacccctgctccccacaggaggccctgagcgcccagcagcccttggtcctgcatccccctccagacaactaaagggcctggctccctccaccctgcccggatccagctcccagtgcccgaatctatcccccctccccggatccatccccccctccccggatccattcccactgcctgaatctactctcccctgcccggctctattccccctacctggatccattccgttgcccatgcctggtcccttcaccggctctctcccctggggccgcaaacctacctgggcccccctctggcagaaaggggtcctctcagacccacaggtccaacggctaatcctggctctgcttcccctgggagccttctgcggctgcccccaccctgggctgggtgagtgacccccatcaccctggcagctgagcagtggggctccccactcgccccagctgcaggcgggccctggccctggaagctcactcyggctctgtcgctgcagaatgaatggaacgcctactatgaggargtggtgtacgtcctagaggagatcgagtacatgatccagaagctccctgagtgggccgcggatgagccygtggagaagacgccccagactcagcaggacgagctctacatccactcggagccactgggcgtggtcctcgtcattggcacctggaactaccccttcaacctcaccatccagcccatggtgggcgccatcgctgcaggtgcatggccctgtgggaagggaagctgggggagcaccgtcccccagcgtggagccaagccaggatgggctcaggcctgtgttaagagtcctggggtcagataagggtttgctgggtctgtcacaggaggctgtggggaccaagctgtttagccaggcctcttggtgcctgaggtccagtcaggctcaggtgtccacacctggtgatacagagagggcctgccttcccccacccctgttggggggctggagcttctgtcacctaatatgcatcagggcttccttcctagaatgggccagcgctgttctaccaaccgggcccccagagcctctctcccctttctgcttttcctccaacatctcagcaactcagagggccaggtggtgcagctctggccagcgtgtgcccgtgtgtgtccctctgtcatgtgyccgtgcgtgctcctgggtgtgccccgtgacatgtgcttgtttgctaacaactcttccatccactgtcccgaggacacacaatggaggggaggcttcaggtgtggtccttgggagggcagagcctctggtgaagtaccctgggcataggcctggctcggtgtgctctgcagggaackcagtggtcctcaagccctcggagctgagtgagaacatggcgagcctgctggctaccatcatcccccagtacctggacaaggtgagttgccctccagggcctcgtaactccatggcytcataactgagctagggccaggtctttggggggtgagaaatagtgaattcttgcagcaaggggccaagctactggtggggctgaggattgttcttagcagctgccctctctcattggggtgaacagagcccctgggccaggaaaggcggtctactgccagttactgctaccccccscccaaggtggggtgctgagcttyggggctgctggtcttggccactgcaactcacccacacttgcaagagcgaggaggggcttggtctttgctgagcctcccctctctccttgcatggaaggatctgtacccagtaatcaatgggggtgtccctgagaccacggagctgctcaaggagaggttcgaccatatcctgtacacgggcagcacgggggtggggaagatcatcatgacrgctgctgccaagcacctgacccctgtcacgctggagctgggagggaagagtccctgctacgtggacaagaactgtgacctggacgtggcctgccggtgagaggcacgggcctgctggctgcagcagtccttactctgctttccaagcacacatgactgcacctcatgctgtgggtccactctgagtaacacagacaccccctgcctcatggagcagtggtccttgcagaaacttacatgggggtaggggtggggaccacatgcacagaagacgtgtggggagtcccagaaggcttcctggagggggagaggtctaggctgagctctgtttgctgagtgcgcatcactggggaagtggtactccaagcagaggctgcagaaaaagcagctgtgggacgttcaggacacaaggaactgtactgggttcagccctctgatggggcagggcaatctgagttctggagagcaggcccagaggggagaagggccaccgctgctcggggtctggggcagaacccgtatctgcacctcstgaccctagccagggctctgaccacctccatatcccacatctgtggccccagagatgtaggggggcccgagtagcagtgacacctggctgtgcaggacaagggcgtgatcagggagcacggaggttgccctcaacagacgtcctctagaaattccccaccagtcgccggtgaacatgatcagggccattgggtctgctcggtccagtgtctagaagtgagcagaccgcttgggaggactcactggtggcaaggtcacagccgatggcttctgctgaccagagagctcaggggtctgcaaaacgagatgcaactcctggggaaccttttggatttagtccagtctgggattctcacagacgcatcgcctgggggaaattcatgaacagtggccagacctgcgtggccccwgactacatcctctgtgacccctcgatccagaaccaaattgtggagaagctcaagaagtcactgaaagtgagtgttgaccccttggcagggtgggatgagaggctgtaaggcacaaggggggcctggccccttaaccaacttctacagatttggaaacactggatttattttcttctaatataaacataatgcaagctaggcatggtggctcacaccggtaatcccagcactttgggaggtagagastggaggatcacttgaggccagaagtttgagaccagcctgggtaacatagcaagatcccatctttacaaaatatgtttttaaattagccaagcatggtggcatggtggtgcatgcctgttgtctcagctacttagaaggctacggcgaggctggagcattgcttgggcccaggagtttgaggctgcagtgagctrtgattgcaccactgcactccagcctgggcaacagaacaagaccctgtctctaagagaaaaaaaaaagataatgcacactcactatagattatttagaaaagattaaaaagcataaagaagaaaaaagctccacccagaatcccaccacccaaagacagacactgctggcctgtgtctgtgcagcctttgggcaggacgaggctctgcgtccttacccgaagyccccacctcttctccacaggagttctacggggaagatgctaagaaatcccgggactatggaagaatcattagtgcccggcacttccagagggtgatgggcctgattgagggccagaaggtggcttwtgggggcaccgrggatgccgccactcgctacataggtgcgtgacccctgaagagcacagcccacctgcccaggctgcaggggtccccagcaagttcacagcaagtgggcacagatgcttgataagcggacacgacctcsggatgggtataaattgctttcaccagggagcctgcggtagactccagcaggcaggggctgaggacagcccctgcttcaacctcagaatcccctctcccagcaaaggcccagaaagaggggcctcatctccctgcccctctgaagcagcaggagcagggacagcagaagccacaggagccccaggtrtgcccagccgtgaggggcccccagtgcccaggctgtgggtcaccagatgggaccctcttggccccgagtttgtcaaggagacaagagaattctggcagggcatcaggtggccggcaggtgcagtgcctgctcctggagacagatctcgggtccttccgtacaggttaacctatagttgtccccagtggtctgctcagatggcatccaggacgcaggtgcctagggtacctctctgaggcctcgtccctgcccttttccaagcctgggcaggtttgcctggaaaagggttggagcaggggtctaggtgcttgcactttccatccgcgtgggggtctctgcgccrtccaactctggcttgtttcctgcctcagcccccaccatcctcacggacgtggacccccagtccscggtgatgcaagaggagatcttcgggcctgtgctgcccatcgtgtgcgtgcgcagcctggaggaggccatccagttcatcaaccagcgtgagaagcccctggccctctacatgttctccagcaacgacaaggtgggtggtgggcctggggtgccctctgccagggtcctggggcccacagacctgggttcaaactgcagcttcactgttctctggctgtgtgaccttgggcaagtcactggatctttctgagctcctttcacctcgtctgtaagatcaggacagcagcatcacctgagggcactgaatgagcgatccttgcccagggccctgcacacaggcatgggggcggctgctgtcactctttgctcatgtggtgctgacagccacgcggtctgcaggaagagcaggagatggaggctaaggctctgcctccacctgctcctgtccttgtggctccaggctatacccaggcagggtcgggttgggggctggggcatcctgtgggcaggagactgaggccagtggctgggtcctggtgcaggtgattaagaagatgattgcagagacatccagtggtggggtggcggccaacgatgtcatcgtccacatcaccttgcactctctgcccttcgggggcgtgggtgagtctggrgctgagcttgctgcctccctctggrccccagggctgggcacactcacccagcaaattcaggagggaccacctcctgcagcccgggcggcagcctcccattagcctcttccatttggaccttggcctctgcgtgccatccatcagacacacttaacctgggagcctagaggttcctagaggtcacctggtgcaccggcctatttcatggaggcctgagaaaggtgacccaggccagaggtcacacagccatttagtggcagagctgggattagacccttgctgggcactcccacagtgtggatgccctggggacaccctagacattggccaccctcaggaggcccagaaaagggccacaacctggggctgggtgctgagggccataggatttgagggaaggatgggtgatggtggctggggctctgcctccctgtccctgtggttctgggatacacccaacaaggtggagagggaaacctggggcgtcctgggggcaggatgctgagccctgtgcttacttctcctccgcagggaacagcggcatgggatcctaycatggcaagaagagcttcgagactttctctcaccgccgctcttgcctggtgaggcctctgatgaatgatgaaggcctgaaggtcagataccccccgagcccggccaaggtgagagggggaaggcgctgtsggggagaccgggctgtgcgggaccagggcctggggatcactgcccactccgtgtccctttcacagatgacccagcactgaggaggggttgctccgcctggcctggccatactgtgtcccatcggagtgcggaccacmctcactggctctcctggccctgggagaatygctcctgcagccccagcccagccccactcctctgctgacctgctgacctgtgcacaccccactcccacatgggcccaggcctcaccattccaagtctccacccctttctagaccaataaagagacraatacaattttctaactcagcaaatgcaggcatatggcacttcttttgtagccctgcacccaccgacctgtcctgcctgatcccactgccccacgcagtgtggtcactgatgtaccagcaaaggcctctcatcagctggtggggccttgtgccaggaggccatgcacggtgtcagggtgacacttgtcttccttttagacttggggaggtcagctccatctctggtgtgtccagccaaggagagcctgaggaggctgggccttgtcggcacagtggctcagatatggggagctgatgccgtctcttcccagactagcttcactatctcgggcaggggccactttgtgagacgatgcagtagtcaacacaaaacgccctggtgatgtcatagtgctgctcgtgggggcaaaggacccgaggccaggcagcaccagcacccacggtgcctcaactgcatggcgttgggctgcagctggcccagagtcccgccccagaggcctgaggagccaggacagggtctggcaaggggagtctgaagctgggtgttctgggggctggttagactcagagccaggaagcctcccagcctgggcctggcaggtaaggggaggctgctgggggagacctgctgaggctgggcctgtccctcagggtcctctacacagactctcctggtatcatgcaggaaagccctcccggcttttgctgagatttccttgtgaaaacatagagttttgtgccaccaccaacaggtgtgcctggccccacctgtgcctgctcccagcaaaagcccaccctccacctggcccgtgccccgccaccaccacccccttcccactcctgaccttactctctctcctgcatcttcagtttccccttctgtcctggaccattcctattctctagtgtcttgaaccttattccaagtcccccagaccccaaatgcaaccagaaaaaccgttaagtgttacctgtgcttccttccctccagtgagggggtgggagcaggagcagagaggaaactgttttcttatgttttgttttgtttggatgtttcccgcgtgcacctgtgacttattgtatacccagagaattgagccaaactaaatcttggctgggagtggtggctcatgcctataatcccagtactttgggaggtcaaggtgggaggatcccttaagcccaggagttcaataccagcctaggcaatagagaccctgtctctactaaaaataaaaaattagctgggtgcgatggtgtgtgcctgtagtctcagctactagagaggctgaggcaggaggatcacttgagcacaggagttcgaggctgtagtgagctgtgatggtgccactgcactccagcctgggagccacagtgagaccctgtttctaaaaaaattttgaaaaccaaaaccaagaacaaaacaaaataatattttctcctaactggctccccctgcggcaactgcctcatgtctctacgctccttcccggcaagactcatctgaatggttgttctcaaacagcgcttcctgtccccactaacttccgcttgcccaggtgaccctccctcacctctgtcctacagggaagccctggctcttgaccaggcaggcacagtctcgtgcgggcagatccccagggtctcgcagccaccttgggcatctccactgccctgccacctccttccgtctgaccccaacctccctcgaacactctgttctccgggttcctggaccccacgtgctccagttctcctccctcaccagcttgtgttcccaagttagtctccagccctcctgaccttgagctcctgactcatatacccgacaactgacttgaactgtgaactggagtctcaataggaaattaacacttacgtgcccaaaggagaactcttgattttcccctctaagccactcgttttttgttttttgtttttgaggcagagtctctctctgttgcccaggctggagtgcagtggcatgatcttggctcactgcaacgtctgcctcccggattcaagcgattcttctgcctcagcctcccgagtagctgggactacaggagcgtgccaccatgcccagctaatttttatatttttagtagagacagggtttcaccatattggccgggctggactcaaactcctgacctcgtaatctgcccgcctcggcctctcaaaatgttgggattacaggtgtgagccaccgggcctggcctaagccattctttcccagtgaatgtcaccctgcagagtggctgaggccaaaacctaggagtcagcctttactcccagctttccttcaagttcaagacttccgcaagcccccaggggagcaccttcaactatcacaaaaacgtgtccaactctgcattttcaccctcacgtccctggcctgagcaccagcaaatgctttctaagtggccttctttcctccactcttgcttccctgtggttcattcttcactgtgcacccagatgatattcccaatacaaaaatctccattagggcaaagttaaaatgcaaaaataagaggcatgccgggcacagtggcgcatgcctctaatctcagtgctttgggaggccaaggcaggaggatcacttgaatctaggagttcaagaccagcctgggcaacagagcgagatgccatcttatattttataaatgtaagaaaattagctggtcatggtggtacatgcctgtggtcccagctactttggaggctgaggtgggaggatcacttaagcccaggagtttgaggctgcagtgagctgttttgacaccactgcactccagcctgggcaacagaacaagactctgtctcaaaaaatagaaaaaagagacttaattatctctgttgaaaaagagatttctctcccttcccttgtcttagagcacctgctttggaaaacatgtcattgtaagttctgtctctttgaaatgtgtgtaagtcttttcagaagctgtaataaataagactcttgtcagctttacgagccggacatctttctcaagggctggggtgtcatctctttgaaatgcacccccatcttctagttcctgtgagagggaagaagcctaatttccagtgggcatatctgtccaagttgcaaaattacctcctgtcataaagatataagaggtttgttttctggatagagcyaattagcaggtcaggcacagtggctgacacctgcaatcctagcaccttaggaagccaaggtggtaggatcatttgaagccaggagttcaagatcagcccaggcaacatggtgaaaccccatctctacaaaatatgagaaaattagccaggcatgctggtgcacacctgtagtcccaacttaggaggctgaggcaagaggatcacttaagcccaggaggtcaaggctgcagtgagctatgatcatgccactgcactgcagcatgggtcacagagtgagactccagctctaaaaacaaataagtaaataaataaaatgttatgatggcttcctgttgcacttgaggatccgtaaattgccttgcaaagcgctatgtgctctgggccctgccttactctctgacctctgccacgaatttcctggtcaacacccatggcctcctgcaagcctttcccttcctcaggactgttccttcttctcctggatccttctcatcaagcctcctccggctcaaatctcacctcttttccctattcactctcactcgcctgccttagtctttgtcttgtctgtgtatctgtttattgcctgtctgtccccactcgaaggcaagcgctgacctttgtccattgcattccctctagatctctagaggctagaacagtggcctatacatagaaggtgctatgtaaatatttgttgagtaaatgaaaaaatgagtgagtttcaaagacatcattggcgttttgttgctctaaacgccccccaaccccgcaccatcatctcatctgaaattacctgattttatcatttatttatttattttgagacagagtctcgcttgctctgtcacccaggctggagtgcagtggtgtgatcttggctcactgcaacctccacctcctgagttccagcaattctcctacctcagcctcacgagtagctgggtctacaagtgcccaccaccatgtcaggctaatttttatatttttagtagaggcagggtttcaccatgttggccaggctggtctcgaactcctgacctcaaatgatccattcacctcggcctcctaaaatgctgggtttataggcatgagccactgtgcccagcctgaaattacctgattttagatgacaacaagcttcataggatcccgctgtgggataaaacagcccagaggttttaaaccatattaaccacaaagacaacatcctaatcaaagacagtgtgtcctgttgtcctcatgcatcccaggtaagggccccacaggtaatgctctgataaatgacagttgcccccagccgaaggtgggaggaagaggagccttggctggcacatgctggcttctcaccttcaccttcacccaatgcacaatgcacccactacacccactgcacaatggccctgtgcagtgagggtgtgagctcatttgttaaaatttatttatttttattttttattttacagacaggatctctctctgttgctggagtgcagcggcacaaacacggctcactgtagcctcgaactcctgggcttaagcgattctcccccctcaacctccccagtagctgggactacaggtgtgcaccaccatgcctaatttttaattttttgtagagacagggtttcactgtgttgcccaggctggtcttgaactcctggcctcaactgatcctcctgcttgagcctcccaaagtactgggattgcaggcgtaagccaccacactgactctatttatagattaggaacctgaggtttaagaagcagtgtcactagccaaggtctccgggtgccagccacaggtgccacagctctggggcatctggtcttctctgacatcacagagcctcctcaaaacctttgcatcaggagctattgacgcagttggaaacattcagaatggaggagagaaagctaagggttcccaaggacattatctgcactttccaaactgaagaattagagcaggtgggtgagaatcataatcacctctttctcctcttcctcttcttttcatcctcgtccatctcctttttctatgtgttgttagtatgacacaatttacaatattacctactttattcataatgccccaagtctgaccttttctgaactaattctatttccaaattagatctcaatttaaaataaaacagcaatttaaaaaaattggtctagtcccaacaccatgatttaatctactgttttttctttctatgacatggattaaggaatgggctggaaaaaaatatttgcccaattatgattcaacctttccacataattgctattgtccaaaacataaagaccaaggataatcgcaactctcgtgtcaccaaggagagcaggtgacatttccggattgcacattgcaatccatgccatgctgtgcatggtgcacagaagggggcctacttctgcccaggagccacagccatagcatgccattgttgagtccattgattgctcctggtgtttagattctcagattaaaaaaaaaatgtatgtaatcccagcactttgggaggctgaggcgggcagatcatttgaggtcaggagtttgagaccagcctaaccaacatggtgaaaccccttctctactaaaatacaaaaattagctgggtgtggtggcaggtgcctgtaatccagctactctggaggctgaggcaggagaatcgcttgaacctaggaggtagatgttgcagtgagccaaggtagcatctctacactccagcctgggtgacagagtgagactctgtctcaaaacaaacaaacaaaaaaacaaagcaaaacaaaagaaaatgtagagtctctcccaaacaggaaactaaaaggcaaagtctcaagcc

SEQ ID NO: 95490 - DNA, 86168 bp, Homo sapiens
  misc_feature (1)...(86168): n = A,T,C or G
gaatgtatgtgtcatccacatggggaacatttgagtgtgagtgatgtcttcatgtatgtgtgagatacctgtgtgtacatatgacatcagagtccttcactggacattgcaaaggacgctggtggggtagggcctctttcttactgagttcacagaatgaagtgccataggggcctccaagtgctggtggccctgttggcattactgggyagagcttgcctgagaataaaatcaccaaagaaagacaaaaccctggagatagtggagcactggatctagccatacgaagctgtcccctgggctttttagctgtggaagtcagcctcacccctcctcagttagcccctttccctttacatttagctggttcaagctgagttttattgcaaaagtcctgactaatacaaatacttatgatagaatgtgaatggggaaagccttccatttactaagatttcaagcaaatgcaagatttgaatgcttcagaaggaggtacaccagccttaccccctggaggccccaggaagcaaagccaccaaggcaggcctcagcaccaccaggccccagtccttaggcctccctaggaggtgcttccagtgaagggggaaggaaaaactgcttgcaggacagtggcataggggctctccagctggggcagggcagtgtaggtaggggaggagatcagtgggcccgaagtttggcttagggtgctcctccctccagcttaagggagggatttagagaggctgagccagagatacaaggtttggagagtgtttgttatgattcgggctagaggccttggcgatgcctgtctttggcagggagagacccgataaagttgagttggggggtaatttaccgggggatcatcagtccctgattctgcactttccaattatggaaatgaaaaaaaagtcctggtgggtggggtgctgctgtgagccagcacagtgtcaccagtagtgcccaggagaaagctgttgagagtagggtgtgggcaaagggctcaaagcccagatcttggctaggtgctgccaccaggaggaggaggctgccacgggggcctgtgtgtgggccgtgccaaccttgctgtggctttggtttattgacattaccataaatatgttattctactccatccacctcaatagtgacatgaagtaggtggcattagcccatttacagatgaggaaactaacagagagaaatgacttctaaggttgtacagctaaaatggtaatgctaatgctaatatatatatatttttttagacggagtctcgctctgttgcccaggctggagtggcaggatctcagcttagctcactgcagcctctgcctccctggttccagtgattctcctgcctcggcctcctgggtagctgagattataggcatgcaccaccacgcccgcctaatttttgtatttttagtagaaacagggtttcaccatgttggccagggtggtcttgaactcctgacctcaggtgatctgcctgcctcagcctcccaaaatgctaggattataggcgtaagccactgtgccgggtctacaaaactccttctgtttttttttttttctttttcagaccaagtttcactcttgttgcccaggctggagtgcaatggcgtgatcttggctcaccacaacctccgcctcccgggttcaagcaattctcctgcctcagcctcctgagtagctgggattacaggcatgtgccaccacgaccggctaattctgtatttttagtagagacgaggtttctccatgttggtcaggctggtctcgaactcctgacctgaggtgatccaccctcctcggcctcccaaactgctgggattacaggcatgagccaccgtgcccggcccaaaactccttatatatccagagagcatatatattataaatatttaacctacctagtatagcttattggatactaaagcaggactttgttaaactcttagcatgcagtggatcatctactatggtcactgtatgaggtgggtgctttgccattcccagctgtagccccaaccctcagcactgggcctggcatgagttaagtactttattgatatttgttgagtaaatgaatggaggtaaaagtcagctagcaaggcagccagggtagctacaggcagcctgatttggacaagtaattttattttatttttaatttatttatttattttgaatctctgaaagagtttcacttttgtcgcccaggctggagtgcaatggtgtgatcttggctcactgcaacctctgcctcttgggttcaagcgattctcctgcctcagcctcctcagtagctgggattacaggtgcctgccacaacgcctggctaattttcttgtatttttagtagagatggggtttccccatgtcagccaggctggtcttgaactcctgaccccaggtgatctgcctgcctcggcctcccaaagtgctaggattacaggtgtgagccaccacacctggcccgtggacaagtaattttaaaagcccagaaaacattgactattcacttggacaagctaaaaataatggatggtgcctggtgttggtgaagatgaagagacatggatgctcttccaccttcctggtgagactgtaaattggtacaaaatttcagggaacaaaattttaaaagggcatatcctttgaccaaacaagcttacctctagaaatttaacgtgaggaaatacttgggcaaaggtagaaagacaggttatgtattaatagtaaaaagtgcccagaatgagggattagttaagagaaaataatggttcatccatatcacaatagctcataatcgctgcggttaatagaaagtggtagtcaactgtgtgccagataactcaagtggtcatcaagattcccctatgacatagatgctgttattattcctattttgtagatgaggaaacaggtatagagaggttaagaaacttgttgaggtcacacagctggtgaggagagaaggaatttggatctaggcgctggttcccaagactacagtctttcattcacagctcatatcatgatgatgtcgacctgaattcatcaacatggaatcatgcctgcaataaattgttacagggaaaaggcatattggaaaattccaagagtggctacctctccacatgggataatggcaaatatctttttaattttttcttctttctcatttgaatttttcttacaatgtgtaaatattattatgcttacaaaagacaatgaagttcttagtcccagctgctggggagctgaggcaggagaaccgcttgaacccaggaggcagaggttgcagtgatccaagatcgcgccacggcactcaagcctggatgacagagtgagactcagcctcgggaaaaaaaaaaaagacaatgaagttcctttcattttgggggaaaatagaaaaaggagaaaagaggacgggcacagtggctcatgcctgtattcccagcactctgggaggccgagatgggtggatcacttgaggtcaggagttcgagaccagcctggccaacatggcaaaactccatctctagtaaaattacaaaaattagccgggtgtggtggcatgcacctgtagtcctagctacttgggaggctgaggcaggagaatagcttgaacccgggaggtggaggttgcagtgagtcaagattgcgccactgtactccagtctggacaacagagcaaggctccatctcaaaaaaagaaaaaagaaaagaaaaaggaaaaaagctggaggatgcaggaaaggactctataggaacttccaaggcctccttggctggtgacctggctttggcctccgctgcctcctacagccaggcaagctgccatcctcttccactggggaaaaaggggtgccttgtttttcttccctgatagccagacaggcgagagcagagaggcagctgcaaaagcttcctcggtgcctcatactcatggactccatctaaaagtaactcctcacccccaaccatcatatggctgctaatattagtgctcatttttccactgaggaaacagaaacttagagaggtggatctgtccagggtcatttccacaatgaggacaggaggcaggaagcaggctccatcctagtgatggacacctaagtccctgttttttcatttgcacaaccatttgaaggagaatcctgtgttttttgttacaccatactgctcaaaaatttctatcaaactatagcaaagattcctttccttcctttaaaaaatgttgaagggaaatgtcttagacttgagtatcttgatttatagtcgatatacagcagtttagcccttgaatatggccaatgacgtgttgcagcaagctgagcacttctattacatgcaaagactctgactgcaaacatccaagtgggcaagggattatcaagtttagcaatggactaaccaaaaactgcattcgtgtggaactgaccacaagctttacattatgcttttgctcctttcttgctcattacccattgtataacaaaatatgcccagacttgggctttaataaaaaatttcttagctctcaattttttgtggtttgattggtcttagctaggtggctcttgcttagggtctttcataaagttgcagtcaggtggtggctggggctgcagtcacctggtgggtcagcttggctgaacacctaccatggcacactcctatggcctaaaccccaaggataaagagaatgagagttttgacatcagcctacaagggatttcaatagtccttggagaatggatggcggatggaagagtggtattgctataacagaacaaatgaaactacaaactaagtgcctgcagtgcgggaaactattgaggagcaagccaccccactgcagaaccctggacgcggtgatacactggagctagctcattctggttaatgagagtggattttttaaaaaattcaaggccaggtgtggtggctcatgactgcaatcccagcgttttggaggtcgaggcgggaggatcacttgagcccagttcgaggcggcagtgagctatgattgcaccactgcactccagcctgggcaacagagcaagactctgtctcttagaaaagtttttttttttccagtaatattattcttgtatggtgcaaacactatataatgctgcgctactgcccattttctttccagaaaggayaaggcactcaattttccagacatttcttgagtaccatacttgtgccaggccctgggaaacagtgatcagcaggagggacgaagagcccaccctcatggggcttacagtgtacaggggctgaggtggtgatatttgtcaaataaccacccaaacacttaattagaaatcgtgataagcccaatgaaagaaaaatacatgaaacagttttatttgggaagggagtggtttagggaagactcgaaagtgacaatggagctatcaagttcaagaaggagttagtaggggaggaggctgcaggaagaagtgcacgcctggaggcaggaacagcatgtgtcccggtagttcagggtggcgggcccaggcgggtgagaaagggcaatggagaaggaaggagaggagaccgtgcagacactgcaagtgccagaaacccgatccacactggcttcagagggtggaggggaggttcttcttggcttccataatagaaatgtccagggacctaccgacttcagattcagcgcaaactcatctgggcccggtctgtatccctccctctcttttctctcagcactttcctcaggcggttcccctcctggcatcccagcagctgcagcatcagcaggagagagtaagcctctccagtcccggcgcagggatggagacggtgtttcgtgggctccgattggctcagtagcctatctttggagcgaatcagcgagcggagagggatgaacttctctgactggccagatccagtcacatgccaacatgtgacgcgtggaatctacgccagccacagcagagaggtgggggttgtgaccggagttagatgccagcgcagaagggacgtgagcccagccgaggtaccgctgaagaggaatcaattttggtatgcagataatcactgggctcatgggtcttgctctttacaaagaggtatgtccctgtaaagttgtcaggcaaaggaaatgtttcaaacgactccatttcacgaagtctcacctaatttacaattcgttagttgagatgcttgtattcttcgtttctaaaataagacgttgaaccataaagactctagctagctctgcaacctctgatgaatatttcatgcctcattattgtgaaaaatccaaagcagaattggagagaagatgtggtatagggattaggtaagtgaagactggtgcaaagcctcctgggtcgaaattctgtccactgctttgtcattggaaaagttatttaacgtcgtcgtctcagttcccacaactattaaaatggagaggataacaacacctaccttatgctcttgtgaggattaaataagttaccgttaatatatgtaaagcacttaaaagaggaccatgtgtttgctattattatgttatacatacaataaagagtaaacattacctaagttataaagaacttaggcaatggataccaaaagtactaattcctttataataaaagaaaaaaaggcgacaaggcaaataacgataataactgataatggctgggcgcgatggctcacgcctgtaaccccagcactttaggaggcggaggcgggcggatcacttgaggtcaggagtttgagaacagcctggccaacatggtgaaaccctgtctctactaaaaatacaaaaaattagtcgggcgtggtggcgcacacctgtaatcccagctactcgggaggctgagacaggagaatcgcttgaacccgggagacgaagtttgcagtgagctgagatcgcgccgatgcactctagcctggacaacagagcgaaactccgtctcaaaacaaaaaactaacaaacnnnnnnnnnnnnnnnnnnnnccgtctcaaaacaaaaaactaacaaacgaacaaaaaactgatcatttattatacacccagaactgtgcttttagcacagttttgttttgttttgttttgtttttgagatggactcttgctctgtcacccaggctggagagcagtggcgcgatctcggctcactgcaacctctgcctcccgggttcaagcgattctcctgcctcagcctcctgagtagctgggattacaggcgcgcaccaccacgcctggctaattttttttttttktatttttagtagagatgggggtttcaccatgttggtcaggctggtctcgaactcctgacctcgtgatccgcccgcctcagcctcgcaaagtgctggaattacaggcgtgaaccaccgcgtctggccgtattgtctcatttaatcctcacaacagtcttatggaatgggtgctgctatctttgtttttcagatgaggaaacaagctcagagggttgaaatgacttgtccaaggttacaggccagtggaggcttgaacccaggtatttgtaattccaaatgtcatactctgtccacattcattccttgtaacctgcctgggctgtcacagttggtgtggggctagcagctccccagggaccaaaacaggcgcatccccgcccaccgccccgcccatcgtgccagcccgactccacccctgtggctacacccactgccccgcgccttacccactggtgggccacgcccacagcccccagctaggtgcctccgctgtccgggctctagtcccgcccccgcccctccccgcccaccggcctcgcagtcaccgcggacgccaatcttgtgcatggagtcgccattttgctcctagagaggccgccaggagacccggcgctttcttccttctgcagctgaggctgcggcggggccggggctggggtcggggccaggtaggcgggcgggagccagtggcgagcggcagcgagggctggctggctccggcattgcggggcgcaggtgcaaggggcggggagcccgcggcgccggcaggcggacgggtcggggtccctgggtggtggctgcttgggggctcactggggcgatctcgcgcccgcggcccttccatttttccctcccttcttcctctcccgccaggggtcggcgggggcgggggacgggcgtccggtgcctgggctctctcctctccctgaggcgccgctggggagtcgaaccctgatgatgggacctgtggtgagcagccctgaaagcaagcccagacccagccattctccgtccctaagctgacacggagcccctgattttaatttacctggctttgctagttacgaatatatctctcacctcctaaaggatgattttatccaactcagaactcaccccagcagagattgagggggaaccgtgatgaaatttttaagtattctgcttgatgataataatttttctcttatgttaatgttggctccgtttgggtgtttagcttttgaaaggagtatgaaaatgcggaatggggctttggggcttgaggtgtgatctctagtgtttaaaaaatttaattgcacaaatagaaataattcacccacattattgaaccccactaaagcatatcctttttgtccatattcctttcctgctgccctcgtgtgtaccattattactcagttgtgatttgagctcgttccacttaaagtcattcatagatacttttgcgtcgtgttgaatatttattgaatttctattctgtgttttacttaattactttattatggaacctttacacaggtctggtgtacttgttctttgaaaagtcttatgttgaccaccatcactgagcatatagctttttccttatttccttgggataattacccgaagtggaaataccgaatcaaacttctgttttctttctttggcactattatataaattgttttccaaacaaggcatgtttacaatagacatttttcaaaatctgggtatttgtcctattttgctctctgtatgcagaattcagcggggtgccaagtcgttttctgtgtgggttgagagacaggctgtgcagcccactgttgcataggactaactactacaaatcatgctgagaccgagctatttttgctgcttagaggctttgcagccttgagtaagtttcttcatctggaaacctagcttccctgtctaaaatgggtctcattctagtgcttgcttcactgggttgtcataagcattgtgaacactcagatgttaggcatgagttaacattgtgttggagagataagcagagcctgggatcatacaggagtggaagagtaattcggtttagaatttgcccttcaaattctcatcaatattgatattaaaaacagatttccttggagtgaggcacatcactaataaacatacataataagtttttttatttttattttttttgcagagtcttgctctgtctcccgggctggagagcagtggcgcgatctcagctcactgcaacctctgcctcccgggttcaagcgattctcctgcctcagcctcctgagtagctgggattacaggcatgcgccaccacgcccggctaattttttgtatttttagtagagacagggtgtcaccaygtttgtcaggttggtctcaaactcctgaccttgtgatctgcctgccttggcctcccaaagtgctgggattacaagcgtgagccaccatgcccatccaataaacataaatttttatactttttaattttttgacacagagtcttgctctgttgcccaggttggagtgtagtggcgcgatctcagctcactgcaacctctgcctcccaagttcaagcgattctcctgcctcagctgcgcaagtagctggggttacaggtgcatgccaccacacctggctcatttttgtattttttagtaggggtttcgccttgttgaccaggctggtctcgaactcctgacctcaggtgatccgtccaccttggcctcccaaagtgctgggattacaggcctgaggcactgcgcctggccggtttttatactttatgatgccttttagttcatctttcaatttcatttgttaatcattgtgactcattgaagtcaggcattattcagcaatcatttgtttagcctctaccgtgtggcagctgcacagggtatacagcagagaatatcatggtaaaaaatagtctctgctgcctggaccttaaattctgatggggaaatctttttaccaaggttatatctcttgtctggaaggtaaaggctgaggcccagcaaggacaagtgatgtccacatggcctagtagctggaaggcaaacccaactcttcacactcctacttcagccatctttaagtagaaggtatttacacagtagatgctttagagggaagacaacacacttcaatgtgagtcttccccatctgaaatgtggrtgagtggttttgaaatgactgctagtctgtccaaaggaaatgatctctcagtgtggtttcttcattcatgagacttaacattctaaaatcttattcaaaagaggagtatgatttgctctttaaaaggtgctaagattctctgaaaacggtgtgttttcatacatgttataaataattctcacacattctagagtaaatttagaataaacataaagcagttatagctcatggggaaaataagggagtgttctcatttcacactaaaaccttgtgctaacaagcctcctgccagccccatctcgatgattattatgtttttgaggatagtctttataactcttttcttgaagcttggtaaagaacacagccttaattaccaacaggagaaaggagaactaaaactacaagcaggcattatggccgggcgcagtggctcatgcctgtaatcccagcactttaggaggctgaggcgggtggattacctgagcttgggagtttgagaccagcctgaccaacatggagaaaccctgtctctactaaaaatacaaaattagacgggtgtggtggcgcatgcctgtaatcccagctactcaggaggctgaggcaggagaatcgcttgaaccggggaggcggaggttatagtgagccgcaatcgcgccattgctctccagcctgggcaacaagagtgaaactccatcttaaaaaaaaaaaaaagaaaaaaaagaaaaataaacagcccttatgtttgaataacttgtgaagtgaatagtcacaaaacatgactatgttgatagtcatttccaagtggatgctccccagtccactccaccatgtcattttgagggtggtcttaggttaggattctatatagaagcctatatctgaagtctagaacgtcagagaccacatgcagggtgttgcaggccattttaaaccatgagagrtaaggaaagacttcaggaaatatcctggaaaaaatatacaaaggcaggagagctatcttgaaatagtttggaggccatcctgtggaaaaggaatttgatgtttcccataaatctctaaggagagtacaagaaccagtgggcagaagctgcaggaagaggaatctcagcatgttcttttgtttgtttgtttgtttgttttgagacagtcttgctctgtcacccaggctggcgtgcagtggtgcagtctctactcactgcaacctccgcctcccaggttcaagcgattcacctgcctcagcctcgtgagtagctgggactacaggtgtgtgccaccaggcctagctaatttttgcatttttagtagaaatgaggtttcaccatgttggccagactggtcttgaacttctgacctcaggtaatccgcctgcctcgctctcccaatttgctgggattataggcatgagccacggcgcctggccacagcatgttctaaggaagaatttggaatgatgggccctcagcggatgtgggcatcagaccctggggctgttcaagcttctgttgagtggttccttggcaggattcctacagatgggctttgaacaaaagatttaggagggatgggctgaactacctctaagatctcttcctacctctaaaatactttcattctaagtgttccaactcctatcaggaatcctgctgtactttaaggagcttcttatttgaaggttagggggtgtaaaaaaaatgcccctccccccatggctgttactgtacttatatggtagataatcaagatgttagaagtcagttcataggtagcatgtccgatatgcagggcactgtgttaagtgccttgcagaaattttacagtcacctgtggggtcagttttcacagttgtatggatggcagaactgaggctaagagattttgagtattagataacttatgcaagtcctcactgtgagtttaggggaagtatttcaagatgcaaacatgagtttgactccaaatcctgtatttacaactacaggaaaattagtttgtttttatttattttcctggacctgtaacacccttttatttatttatttatttatttatttatttatttatttatttttctgagacagagtctcgctctgtctcccaggctggagtgcagtggcatgatctcagctcactgcccacttcgcctcccaggttcacgccattttcctgcctcagcctcccgagtagctgggactgtaggcgcccaccaccacgcccacctaattttttgtatttttagtagagacggggcttcactgtgttagccaggatggtcttgatctcctgacctcgtgatccacctgcctcggcctcccaaagtgctgggattacaggcatgagccaccgtgcccggcaattttttatttatttatttttttatttttttgagacgaggtcgcattcccatcgtccaggcrggagtgcagtgaagtggtgcaatcatggctcattgcagccctgaccatctgggctcaagtgatcctcccacctcattttttgatttttttgtagagactaggtctcactatgtagccgaggctggtctcaaactcttgggctcaagcagtcagcccaccttggcctcacaaggtgctgggattagcggtgtgagttgctgtgcctggccataccttttgttcttaaacacacatgtttattggttgagagatggctttagaagtatttaagatcccttccagaatgttgatgattaaacgtattctttctttcttttctttctttcttccctttctttcttcttctcttttcttttcttttctttatttgaaacggagtctcgctctgtcgcccaggctggagtgcagtggcgcgatcttggctcactgcaagctctgcctcctgggttcatgccattcttctgcctcagcctcccgattagctgggactacaggcacctgccaccacgcccggctaatcttttgtatttttagtggagacagcgtttcgccatgttgtccaggctggtctcgaacccctgacctcaggtgatccacccacctcggcctcccaaagtgctgggattacaggcgtaagccactgcgtggccttttttttttttttttttttttaattttttagatggagttttgttctcattgcccaggttggagtgcagtggatctcagctcactgcaacttctgcctcctgggtttaagcgattctcctgcctcagcctcatgagtagctgggattacaggcatgtaccaccatgcctggcttatttttatttttatttttttgtatttttagtagagatggggtttcaccatgttggtcaggctggtctcgaactcctggcctcaagtgatctgcccacctcagcctcccaaagtgctaggattacaggygtgagccactgtgcctggccgtatataatttttatggaggtcacatgtataaatgcatagaaaaagtcttawgttgtccctaccaaactgataagaaccctcacttctggggaggacctgggatcgaggctggtgactttatccttaactatcatgtttcaggtttttttttttttctgagacggagtctcgctctgttgcccaggctggagtacagtggtgcaatcttggctcactgcaacctctgcctcctgagttcaagcgattctcaagcctcagcctctagagtagctgggactataggcagccrccaccacgcccagctcatttttgtatttttagtagagacagatttcacccttttggccaggctggtcttgaactcctgaccttgtgatcygcctgccttggcctcccaaagtgctgggattacaggtctgagccaccgcgcccagccatgtttcaggtttttatagrgaggatgtgtttgtgttttacttgtataattaaaatttgagaataatgaaaaagattagcttagtttcagctcattgatgatctacacyagccttcccagaggtcccaggtgaacatacaactgtggaaatgcagtgggcttgctgagaaagggcccccctgcccacagcctgctggattgttgctgttcctcccatctagcatctccattatgtgatgaggacactcagcaatgatgacgactttttttttttgagatggagtcttgctgtgtcgccaggctggaagtgcagtggcacgatctcagctcactgcaacctctgcctcccaggttcacgtcattctcctacctcagcctcccgagtaggtgggactacaggcacgcgccaccatgcccagctattttttgtatttttagtagagacagggtttcaccatgttggccaggrtggtcttgatctcttgatctcgtgatctgcctgccttggcttcccaaagtgctaggattacaggygtgagccaccacatctgaccagcactgatgatttataagccagggacctttttatttttggcccactgccaaaatttgggtgtgaccaaaactgtcatttgggtggtcgcttaagtgtccttcaaggtgattatctagtcagccygtgttccacttgaggaaaatgaagatgagaggtcagttttagacatgacacagggcagctgaaaggccgggaaaggttttatggtaaacaaggattacaggaaaagctgggtgtagatgggtcatttattctttgtctaaggattaatcagtccttgttctcgctaatggctctgccatttttctgtgtgttaatccaggaggaattttgttgtcagagaataaaaggaggttgtccataattgactttaagcagcaatcagtaaaacattgagctcttcagctccgyctttcttgtaagtttatcatttcttcttagtggttgtgaacatcatgtgataatgtatttccataaatttaggaccctgaaatccaactgaactttctgtttgtccatatatatctaatatttaaaaaatactattaggatggaaactaatttccttcagctgaagtcatttcctttaaaaaaaattcattcaggtatatttcatatcatatggcagtttttaataagtattatatccttctaggctctgaaaattggaaaaccaagaaggttttgatgttttgtgtgacgccacctgaattagaaaccaagatgaacataaccaaaggtggtctggtgttgttttcagcaaactcgaattcatcatgtatggagctatcaaagaaaattgcagagtgagttataattgtaccattaaaatctatattcattatgtgatgctttaaatttgataatcagattagcagttattgttaaayttgaaagcagatattttataattataaaataattatatctttttttcatcatgtatcttttttttcatcatgcaagatgttcatgtagtatgtctcatctgtatatattaagggctattctttttgtaaactatcccatctccctacatattctttcagcagacatttattgagtgccttataagtgccagggattgtgttagatgctatatatatatataattatttgagtataaagcacactggggccgggcgcggtggctcacgcctgtaatcccagcactttgggaggccaaggcgggtgtatcacgaggtcaggagattgagaccatcctagttaacaaggtgaaaccccgcgtctactaaaaatacaaaaaattagttgggcgtggtggcgggcrcctgtagtcccagctacttgggaggctgaggcaggagaatcgcttgaacgcaggagggttgcagtgagctgagattgcaccactgcactccagcctgggcaacagaacgagactctgtctcaaaaaaagaacattaacatgtatattatatgaaataacttatagcttatagtttagtataattttagatatttattaaacaaatattgtacccctactactgtgtactagaccttgatctagatgttggggattatcagtgagtcaagatccatcctttttatgaaatttacattttagtatgggagccaaacagaaatcaagtcaacaaaacaaacaaggtaatttcagatgatgtcaatgctatgaagaaaactgtgtgaaagtaatgatggggcaggttgttctgctttagcatgtgtgctgaagtgcttttaaactgaagggatggtgtgtgagttgagaaacctgaatgagccaccaagtgaaggtctggaggcagarcccccccaagcagaggggacagcagattscaagcctctgcagcatgcaggaggagttcttggtgtgtctcaggaacgtgggctggagtacagagtgtccaaggaagatggctagtgaggcaggcagagcgggactgcatagtccttcctggggagacatggggttggggtgaggggctaggtaatggattgatgtaacaatttaatgttgactttaaattttataagaagaataactttattttattttactcttatcgatttacgagtctccttraatagtaaagatactgggtttcttctattactttttcagctttttccccctttctcttctctaggcggctaggggtggagatgggcaaagtgcaggtttaccaggaacctaacagaggtgagctatcttgggcatgtggaacattgacctttttgtgaaatgtggcatattggctcygtccttcatcctttactattgaaacratttgattcagttgtacatttccattagcaagaagtcaggcaggcaaggtagaacagagtggttttttagctctcactaataccagctagatatctaaccctggtgcaagtcatttctggggcttgaactgcagttctgagacttcattcagtaaaagctgcagacatatttgaaccagctggtcaactgaatgaacatgagctcaactgttgcttaaatttatgtcaccttaggaaggatgagtaaatcctgtcaccttagacaggatgactaaatcctgtgtgaccgcagttttagttagtctttatttgcacctaagctgccttgggttagacttcataaaatattgttaagaaatactttttgctaattgatacatgtcattacataattctcccaagttgtaaaaagaagtgttatttaacctttgtagrtccaggtgtgctggctcatgcatctaatgccagcactttgggaggctgaggcaggcagattccttgagctcaggagttgagaccagcctgggcaacacggcaaaaccctgtctctactaaaaatacaaaaattagccaggagtggtggtttgcacttgtagtcccagctactagggaggctgaggtggaaggatcgcttgagcccaggaggtggaggctgcagtgaagtgtgatcataccacagagtgagaccctgtctcaaaaataaataaataaataaatagaaagtgatctttgtaatttctttagcaatggtggatatttgaaattattttaggccaggcgtggtggctcacgcctgtaatcccagcactttgggaggccgaggtgggcggatcacctgaggtcaggagttcgtagaccagcctggccaacatgatgaaaccctgtctctactaaaaatacaaaaatttgctgggcttggtggcaggcgcctataatcccagctcctgggaaggctgaggcaggagaatcgcttgaacccgggcggtggaggttgcagtgagccaagattgtgccattgcactccagcctgggggggaacaagagcgagactttgtctcaggggaaaaaaaaaaaaaaagaaattattttagcaggagcgatggacagcttgcatgggcttgagagttacacaccttatccttgacaagttatttaacctttctaaactataaataaactgtaaattagggctgttttgaggattaagtgggataacttgtgtgcctaccagtttttggcacacagtaggtgctcaatatatacttattcctgttccttttccactagaagatttaaaaaaacattttttttttttttttggtagaacragggtctcattatgttgcccaggcttatctcaaactctgggcaaaagcagttctcctatttcagccccccaaagtgctaggattacaggtgtgagccaccaggcctggcccctctacaggattttatcaaatatttacatattataaagcctacaggaggctttgataaaaaggcacaagttttgctgttcccatgtttatctccgttcctgcctcttttctgtctcccaagatccctatgtggcgtcagtagggaaaaagtataattaaactctgcaaggagagtttggasaagattcttcctctagaggggattgaatgatgttctttgtctggagtctaggagggaaggtgaaagggagaagcagtggcataagactccaggagactggtccactctccaagtttctgaataaagggagagaaaatacttggtgtttattgggaaggaaggaagtaatatttgtgaatttcttactgttaccagatactgaaaaactgagttcaggagttcagggattgatgttaggtacgaggtccagtttgaatccagatctccctgactctaaagctcattttcttttcttttcttttcttttttttttttttgagacagggtctttctgtgtcactcaggctggggtgtagtggcatgatcagggctcactgcagcctctgcctcctgggctcatgtgcttctcccaccttagcctccccagtagctggtactacaggtgggcaccatgctgccaggctattttttttttttttttaaatatggagtcttgctctgtcacccaggctggagtgcagtggggcaacctcggctcactgccacctccgcctcccaggttcgagtgattctcgtgcctcagcctcccaaagtgctgggattacaggtgtgagcyacacacacacacccagccataatttttttttttttttgatacggggctttgccatcttgctcaggctggtaaagctcattttcttaacatcataccacatttcttttgtaaacttgtattctgttttttccaacatttttttttctcttatcctcacaatctgttcccattttgctackttttttttgkgtgtgtgtgtgtgtgtgtgtgtgagacagagtcttgctccattgcccaggctggagtacagtggcgcaatcttggctcactgcaacatccgcctctcaggttcaagcgatactcctgcctcagcctcccaaataggtgggcttacaggtgtgtgccagcacgcccggctaattttttgtgttgttggtggagacgggctttcaccatgttggccaggttggtctcaaacttctgacctcaaatgatcatccacctcagcctcccaaactattttcctacatttttaatgaaaatgttcaaacatataaaaaagttgaaagaatagtacagtgaactaccgcctagcttgaacagttaacattttgccatatgaatatgtatgtggcgaaccatttgaaattaagtgcaggccgggtgcggtggctcactcctgtaatcccagcacgttgggatgctgagctgggtgaatctcttcagccygggaggtcaagactrcagtgagccatatttgcaccactgtaccacagcctaggcaacagggcgagatgtgtcccaaaaaaagaaaaaaaatgtaagttgcagacagttaatccttgaatacttgaccatgcatcctctaggaataattactttcacctaaataaatatgataccattatcacatttaaagaaattaactacaggcagggcatggtggctcacacctgtaatcccagcactttgtgggggtcaaggtgggtggatcacttgagaccagaagtttgagaccaacctgggcaacatggcaaaaccccatctttaccaaagataaagaaattagccagggttggtggcacacagctgtaatcctagctacttgggaggctgaggcaggaagatcacttgagtccgggaggtggaggttgcagtgagctgggatcacgccgctgcactccagcccgggcaacagagcaagaccttgtctcaaaaaaaaaaaaaaaagaaaaggaaaagaaaattaacttaacaattaaggacaattctttttttttctgtggcctcaagtgatctgcccgccttggcctcccaaagtgctgggattacaggtgtgagacaccgcacccagcccaacaacaattctttaatcatctaatatatggcctatattcacatttccctaattgtcctaaagggtcttttattttttatttttttgagatggaatctggctttgtcacccaggctggagtgcagtggtgcgatcttggcttactgcaacctctgcctcccaggttcaagcagttctcctgcctcagcctcctgagtagctgggattataggtgtgtgccaccaagcccagctaatgtttgtatttttagtagagacgaggtttcaccatgttggccaggctagccttaaacacctaacctcagattatccgcctgcctgggcctcccaaagttctggkattacatgtgtgagccaccgtgcccagcctaaagggtcttttatagttgttttttccaacacctccaccccaaaccaggattcttagttcaagggatttttttttaaaaatatctctttagtctcttctattttagaacaatcccctcacctcttccgttttcttcctgtgacagtgaagaggttgtcttgtagaatgtcccattatggatttgtctaattgtttctttatgactgatcacacatattttgagagtagggatattaggtcttatttatctttgtttctcacaacatacaatgttttgtacctaatacattctgaattgataattgatgctgattgaatgagtatataattttcctttttttttttttttttttttttgagacggagtttcgctcttgttgcccaggctggagtgcaatggcacaatctcggctcaccgcaacctccgcctcctgggttcaagcgattctcctgcctcagcctcccgagtagctaggattataggcatgcaccaccacgcctggctaattttgtatttttagtagagacggggnnnnnnnnnnnnnnnnnnnnnnnnnnnnnnnnnnnnnnnnnnnnnnnnnnnnnnnnnnnnnnnnnnnnnnnnnnnnnnnnnnnnnnnnnnnnnnnnnnnnnnnnnnnnnnnnnnnnnnnnnnnnnnnnnnnnnnnnnnnnnnnnnnnnnnnnnnnnnnnnnnnnnnnnnnnnnnnnnnnnnnnnnnnnnnnnnnnnnnnnnnnnnnnnnnnnnnnnnnnnnnnnnnnnnnnnnnnnnnnnnnnnnnnnnnnnnnnnnnnnnnnnnnnnnnnnnnnnnnnnnnnnnnnnnnnnnnnnnnnnnnnnnnnnnnnnnnnnnnnnnnnnnnnnnnnnnnnnnnnnnnnnnnnnnnnnnnnnnnnnnnnnnnnnnnnnnnnnnnnnnnnnnnnnnnnnnnnnnnnnnnnnnnnnnnnnnnnnnnnnnnnnnnnnnnnnnnnnnnnnnnnnnnnnnnnnnnnnnnnnnnnnnnnnnnnnnnnnnnnnnnnnnnnnnnnnnnnnnnnnnnnntcgcaccactgcattccagcgtgggcgacagagcaagactccgtctcaaaaaaaaaaaaaaaaaagttaccatgctcggagtggtacagcactcaactgtttgtatatataaggggtgagaattatacatttacttatttcaagtcagaaatgtaattctctcttaaagctgtgttttaaaaagtgattaatggcagtatgtgtattatcccttgtaacatctaaagcctactgagtcttataacagtttgagttgccatattctattacattagggaataatacagatttttttgtgtattttgaaaaatttgaactatatgcctttccctctcttctttttccttttcctgccagaaacragagtacaaattcaagagtctgtgaggggaaaagatgttttcatcatccaaactgtttcgaagtgagtatccagcaaaagtgttgctttctgggtttcagtttaggcatgagtgtttaawataatgatagatggctagccaggaagagttataatagtcttaaaattagtatatcttaccaatttagaatttagaaaactaagttttctgacataactgctgacttttacatgttctttcagtgtttttccttctttctttctttttttttttgagacaaagtcccactccttcacccaggctggagtgcagtggtgcaatctcagctcactgtaaccacctcctcccaggttctagtgattctcttgcctcagcctcccgagtagctggtactacagttggcgccaccacgcctggctaatttttgtatttttagtagagacggggtttcaccatgttggccagactggtcttgaactcctgacctcasgcaatctgcccgcctcggcctaccaaagtggtgggattacaggtatgagccaccgtgtccagccactcagtgttcttaacgggtggaaataaccaagtattggagtagaggctcttttttttttttttttttttgagacagaatttcactcttgttgcccaggctggagtgcaatgacgcgatctcggcttaccgcaacctcagcttaccgcaacctctgcttcccaggttcaagcaattctgcctcagcctcctgagcagctgggattataggcatgtgtcaccacgcccggttaattttgtgtttctagtagagacagggtttctccatgttggtcaggctggtcttgaactcccgacctcaggtgatccacctgcctcagcctcccaaagtgctgggattacaggcgtgagccactgcgcccagcctggagtagaggctgttaatgataatagtatacattaagtttcctaacaattaacagccagaattttgtaaaacttgcagggaagcatttctagttccctcctctccccaaaagaaacagaggctaggggaggagacctttcttagttggggttctttaagcttttattgcatataaaagtgatcattatttactgttttattacataaattagctgagaggataaaaaactgtactgaaggaatgtgtattcctgtctggtgtgacctttgacacacctgtgttctggaaattgtttggtcacatatgtttaagctaggtatagaagattcaatgcagcaaggctgtctctggcactctggaagggagggtgatcacctggagccctactttttttttttctttttcttttttctaagaggtagagtcttgctctgttgtccagtctggagtgcagtggtgagatcataactcactacaacttcaaactcctgggctcaaactatcctcctccctcagcctcccaagtagctgggactacaggcatgcaccagcatgctcacctcgttttttcattttttgtagagatggaggtctcactgtattgcccagctggtctcaaacttttggcctcaagtgatcctcctgccttgacctcctatattgctgagattccagcaatatagaaggtgagcctatcacacctggccttaaagccccactttccattgtgtgtttgtccacaaatgtccctaaatgcttctgtgtatgaagttcttcgctcagaacaatttttaatgtctagaaatcagtttgtctagtgcattattttttagcttagagagtctgaaagttgctgcatgcttaatttgtgtatatacatatataaaaccaacgaaagggaaaaagaaggccatttcgggagactttagtcttggaacacacatttttttcacctaaattttgaacattttctctcctggtctttggtttattgggatgaagtcacaaaacccccatctctcctgggaagaggagtggcaggggagacctgtccttgcatcctatagccctggcaaacgggtgtgctctgaaggaggaagggtgtggagggcctttgccacggtgccctagcttcaccttctgctgtgacacccaggattctcagcagagctggaggtgggggcacggagcgccaactgcccctgctgctgctgtcctctttcccctttcccacgtctgccaccaaaccagggtggaagtggaggactcacctgtgcccacatcttaaccctttacctccagcatcggggtagggaaggggcgggcacagaacaacttaaacggcttctggctccttggtttctgtgtctgtggtacttttatgtccttacagacaagtgtgattccattggataaatgcacagaggttgtgtggattacccaaggggatgggtaggcattgagggcacccctggacttagaatttaggacttcagaagggtgactgctgatccttctcattttcaagtccttctggttgtttatttttgtacatttcaatacttatcctgtgcccctgtcttttgtcagtttcatattcytctaatcagaatcactcagcacccctttcattttctctccgtgtctcattttgcattgttccatacctgacrtaagcttgtgttaactcgggttctcagtcttgtccatgttgcagagtctggacgtcatggtcttctttgtgaaataccatgaaataacatttagtgttgagggccagatgtggtggctcatgcctgtaatcctagcactttgggaggtcgaggtgggcatatcagttgaggccaggagtttgagaccagccaggccaacacggtgaaaccctgtctttactaaaaatacaaaaaattagctgggcatggtcatgagcgcctgtagtcccagctactcaggtggctgaggcacgagaattgcttgaacgcaggaggcagaggttgtagtgagctgagatcacgccactggattccagcctgggtaaaagaacaaggctccatctcgaagtaaaaaaaaaaaaggctgggcgaggtggcttacacctataatcccagagctttgggaggccgaggcgggcagatcaggagttcaagaccagcctggccaacatggtgaaaccctgtctctactgaaaatacaaaaattagctgggcgtggtgatatgcgcttctaattccagctacttgggaggctgaggcatgagaatcgcttgaacccaggagacagagggtgcagtgagccaagatggcgccactrtactccaggctgggtgatagagtgagactctgtctcaaaaaaaaaaaaaaaaagcctgtaatcccaccactttgggaggccccaggcgtgcagatcacctgaggtcgggagttcaagaccagcctgaccaacatggagaaacgctctctctgctaaaaatgcaaaattagccgggcatggtggcgcatgcctgtgatctcagctactcgggaggctgagacaggagaattgcttgatcctgggaggcggaggttgcggtgagccgagatcatgccattgcactccagcctgggcaacaagagcagaactccgtctcaaaaacaaacaaacaaaaaaatgatttagtgttgtcagatacatcttatacttcattttactacagattagtgctagcactaaaaataaaagagaaatttaaaattaagaaaattccatccattaactgaagttttcctgtatttcaaacaagactgtccttatctgagttcagtaatggaaagccttgttcctccactcttatccttcccatagaatacttttctgaaaatctttttttttcctaagttaattaacagggtgaaagtctcttttaactcatcagatgtcagacttgttgtatagtgacagagaacctactcacctgartgttctgtgtttccattcactccttctttcattaacaaatacttattttgaatgtctacaatatgtgaattacagttagttacacgtatgcaggatgcctccatgattaaaacagagaaagtccttgtccttgtggagtttatattccagtggaggaagacataaagtgagcataataaagacatagattatctagaaggtgatgaatggtttggaaaaaaataagacagcatggtgagatgatagtggtgagagggcagagagaggcagacagggtaggcctcattgtggaggtgacatttgaacagagactagagaaggtgagggagagtcaggtgactaggtggggagaaaagcattgcaggcagtgggaacgcctagagcaagccccttagcggtgtgagctgctgtgggaggactgaacagggtcaggtgtggccaggcaggaggggaggggcagatcctcaagtttggactggagttgtaaatttgagagttgccaccatctatgaagctgtgaaattagatgagaagcccaaaggacgagagggaacagaaagagaggacacatgagcaagtcctgggacgtgaggctggggagaagaggaaccagcaaaagaaaccaagggtggaaggaggacaccagagaggggcattctggaagccaagtgaccgtggacatggccgcatggaggccactgatgacctttatgaaaacaaagcttcactggactatttgggagagactgagagtagataaattggagatagtgtaagatgtacagcaaaggggagcagaggggagagtggttatgagtcgtgttaatggaagtaacagaatgtttgtggccgatgggttatcagtggtggaggcaggagaggagagagaattccttacataggtgtgccatttggagggattaattttagggccactggcatggaaatttcctctgactgatgactgagggcaggccgactcctggggcacagatgcacatagtgggagcttgtggacacgctcctctgagagtacttaagtagggtggtcagttgagagcagatgatgggggatcttatggaggcctgagaaaagaggaatttattggttggtttttttctgccttgcaccttaggttgtataaaggcatgagtaacacactgctgacactttttggaacagggaatactgtgttgtagatcccttgatgagatttgctgtgtctttgttacagggacgtgaacaccaccatcatggagctcctgatcatggtgtatgcatgtaagacctcttgtgccaagagcatcattggcgtgataccctactttccttacagcaagcagtgcaagatgagaaaaagaggctccattgtctctaaattgctggcttccatgatgtgcaaagctggtaagaatggcagatgtttcacaattaattgggggcctgggagttttatttatttattctctcttttttaagacagggtcttgccctgtcacctaggctggagtgtagtggcgtgatcatagctcactgcaacttgaactcctacagtcaagcagtccaccagagcctcccaagtagctaggactataggcacataccaccctgcctgctaatttttaaattttttgtagatactgggtcttactatgttgttcaggctggttttgaactgctggcctcaagggatgtttctgctccagcctcccagggtgctgagattatagtcatgaaccaccataccctgctggagttttatttttaccttagaaatatcaaagtaatggctgggcacagcagctcacgcctgcaatcccaatgctttgggaagctatgtgggatgatctttgaactcctgggctcaagtgatccccctgagtagttggaactatggacatataccaccgtgcctgcctagataggcatatattggaaaagatacatattattctgtgtcaggcattttcaggtaacaacctaagtatttttcctgtgtttctaaataaccttcatagttgttattgggtatktgtgtcaatatatttgtgtttgtgtgtgtgcgcgcttgtataagtgtatatgattttatttatttatttatttattttgagatggagtttcgctcctgttgcccaggctggagtgcaatggcatgatcttcgctcaccrcaacctccacctccccggttcaagcgattctcctgcctcagcctcccaagtagctgggattacaggcatgcgccaccacgcccggctaattttgtatttttagtagagacagggtttctccatgttggtcaggctggtctcaaactcccgaccccgcctcagactcccaaagtgctgggattacaggcgtaagccactgcacccggcctatgatttttttattttaatttttattctgtttatttattttttgagacggagtcttgctccgttgcccaggctggagtgcagtggtggcacctcggctcactgcaaccactgtctcctgggttcaagcgatttttgtaccttagcttctctagtagctgggactacaggtgcctgccaccacactcagctaatttttgtatttttagtagagatggggttttgccatgttggccaggctggtctcgaactcctgacctcaagtgatccacctgctttgggctcctaaaattctgggattacagacacaagccaccatagccagcctgaatgtatatgattttagaaggtatgtatcacggagcatttgcacagagtgaatagaataaaagtccccatatcactgcattttaagacaggtacttaytgtagaataaacctttttttttgtttgttttttgagacggagtcttgctctgttgcccagtctggagtgcaatgacgtgatcttggctcactgcaacctccaccacccgggttcaagcaattctcctgcctcagcccccagagtagctgggattgcaggcacacaccaacatgcccaactaattattattatttttattttttatttttgagtctcacctgtcatccaggctggagtgcagtagcgtgatctcggctcaccgcaacctccacttcctgggtttaagcgattcacctgcctcagcctcctgagtagctgggattactggcgcccaccaccacgcctggctaatttttgtatttttagtagagacgaggtttcaccatgttggccatgcttgtctcgaactcttgacctcaggtgatccaccttcctcagcctcccaaagtgttgggattacaggcgtgagccaccacgcccagcccagaataaactttctaagatagtttttcagtaaaggcaaacgtaaaacaaacatttaaaaactaggcagggtgtggtggctcacgcctgtaatcccaacactttgggaggacgaggagggcggttcactggaggtgaagagttcgagctgtctcttatacacatctcaaccnnnnnnnnnnnnnnnnnnnngatcacctgaggttgggagtttgagagcagcctaaccaacatggaaaaaccccgtctctactaacaatacaaaattagccgggtgtggtgacacatgcctgtaatcccagctactcgggagtctgaggcaggagaattgcttgaacccgggaggtggaggttgtggtgaaccaagatcatgccgttgcactccagcctgggcaacaagagcaaaactccgtctcaaaaaaataaaaataaaattaaaaactcaacccgaagcaacctcaggagcctaccccattgtaaacactatgacaggcagctggtgaggagagcaggcttgcctgctgaatcttcaggaaagggcccatcttctctaccagccttgcttgatgggcctccagacttactttcctgttcttttgggcaagtaatgctttaaacaatttttcatactgaattttccttacacttttctggtgatcgttacaaaggtggtgaaggttttctgttttctccaatttccaggctggtgcagtttgtcttgatatctttttttttccccatgggtctcagtcctcttgcccgggctggggtgcagtggtgtgatcactgctcactaccaggaggtagccttgacctcctgggttcaagtgatcctccgaccttagcttccagagtaactagggactacaggcatgcatcaccatacctgactagttttttgtatttttagtagaaatggagtctcaccatgtggcccaggccattttcaaacacctgggctcaagtgatactcctgcctcggcctcccaaagtgctgggtttacaggcatgagccaccacacccggctgacttgttatcttaagactggactttgccatgcctgttaaacttcaagaagatttgatctgctctaatataatttttaaagactcttctgtattactgttatctttgctatattatgactattttttatttatttattttttcgagatggagtctcgctctgtcgcccaggctggagtgcagtggcatgatctcagctcactgcaacctccacctcctggattcaagtgattctcctgcctcagcctccctagaagctgagattacaggcacatgccaccacacttggctaatttttgtatttttagtagagacggggtttcaccgtgttggccaggctggtcttgaactcctgacctcaggtgatccgcctgcctcagcctyccaaagtgctgggattacagctgtgagccatcgcacctgaccaagactttaaattgatgtgaaaatcaggcatctcacagtactaaaaaaaaaaaaawtttttttgaaaaatacaagtgctgagtttttttgatggtagaacaattttgtctttttttttttgagaccaagtctccccctttcacccaggtcggagtgaagtggtgcgatctcggctcactgcaacctccgcccccccaggttcaagcgaattctcctgcctcagcctcccgagtagctgggattatgggcacgtgccaccatgcctggctaatttttgtgtttttagtagagatgaggtttcgccatgttggccaggctggtctccaactcctgacctcaggtgatccacccgcctcggcctcccaaagtgctgggattacaggcgtgagccaccgtgtccggccttattttttatttttttgaggcaagatctcactctgtcacccagactggaatgcagtggctcaatctcagctcacttgcagccttgaccttctgcactgaagcgattctcccaccttagcctcctgagtatctgggactacagatgtgcgccaccatgcctggctaatttttgttttgtagaggcggggttttgccatgttccccaggctgatctcaaactcctgagctcaagcagtttgtcagccttggccttcaaagtgctaggattacaggcgtgagccactgtgcccggccatgagagcaattttttttttttttttgagacggagtcttgctctgtcacccaggctggagtgcagtggcatgatcttggctcactgcaacctctgcctcccggattcaagctattcttctgcctcagcctcccaagtagctgggactacaggcacacgccaccacgcccagctaatttttgtatttttagtaaagatggggtttcatcatattggtcaggctggcgttgaactcctgaccttgtgatccacccacctcgccctcccaaagtgctgggattacaggcgtgagccacagtgcccggctggagagcaattttttaatagtaacttattgtatatagtattttatgtagtacctattttatacagtgcaacttgtttttaaactgtttataggctgggtgcagtggctcatgcctgtattcccagcactttgggaggctgaggcaggaggattacttgaggtcaggagttcgagaccaacctggccaatatgatgaaaccccttctctactaaaaatacagaattatctgggcgtggtggcatgcacctgtattcccagctactttcaaggctgaggtgagaggattgcttcagcctaggagttcaaggctgcagttagctatggtcatgccactgcactccagcctgggtgacagaatgggatcccatcttaaaaaaaaaaaacaaaaacaaaactatttattgcttgtgtctgctttattttcaaaggtctaactcatcttattactatggatttacaccagaaggaaattcagggcttcttcaatattcctgttgacaatttaagagcatctcccttcttattacagtatattcaagaagaggtgagctagctcaaacttttttattttaacattctgattaaggttgaaagatgtatttccatttccttaggatacccctaaaggattaaaacttgatgtattgtacttaaagtaccattatactttatagctataatccaacgcattttagaattctgaatctgcagtttgtttctttagataagctcttaaaattgctttttcttttggacctcaagtacctagaattggactagatatgattgtaatgagtaatttactctcattactagtctatgcttgatcctggttctgttttatgtatccatctatccatcctgtctctctgtccatccagttataatagccagcatccatgatcccacctcccagcaagaaaactagagtcatcatcataacttagagctgctcatgggctccttctctgtcctatccccctgcctccttccaccctagggaaccactgtcctgaagcggtgctgaatctgtcagatgctttttctgtatcagtggagatgatcattttttttccttcattctgttaatgtggtttattaccacccttgaatcctgggataaatcagatgtttaattttaatatagctacatttgtttttctttgatatgagttagcatttttgtgacttactatttaagaaagcttttaaaatgttaatttatactgtacttagctattttgcttttagctgtttttctttcttttttttttttttttggtggggggtgtgatggagtcactcccaggctggagtgtaatggygcaatctcagcccactgaaacctccacctcccgggttcaagcaattctcgagtagctgggattacaggcatgygccaacacagctggctaattttttgtatctttagtagagatggggtttcaccatgttggccaggctgatctcgaacgctgacctcgtgatctgcctgcctcggcctcccaaagtgctgggattacaggcatgagccaccgcacctggccttagckgtttttcttatataaattatttctctctttaataacttttctagataacttctttttacagtactgtatttaaaagaagataacttctttttacagtactgtatttaaaagatggcagtttataggtttctgaggaacttctttctggtaagaatacagggcttccccattctccagcaattgttataagtccttatagagaaaatgaatttaagtatttttgaaagagaaaaatgtaaaatattctgctttttttttttctttaaagttacacacaagaaacataaaaactctacgccaggcgcagtggctcacgcctataatcccagcactttgggagtctgaggcgggtggatcacttgaggtcaggagttcagaccagcctagccaacatggtgaaaccccatctctaccaaaaatacataattagctggatgtggtggcgcgtgcctgtaatcccagttacttgggaggctgaggcaggagaattgcttgaacctgggaggtggaggttacagtgagccaggattgtgccacggcactcctgcctgggtgacagagcgagactatctcaaaaaaacaaaaaagaaaacaaaaatactctaacaaattaaaaaaataatagagactttaattttacctgaaaaattttatgtttttttttgagacagggtctttctctgtcacccaggttggagtgctgtagtgccatgatagctcactgcaaccttgaactcctgggctcaagagatttctcccacctcagccttctgartagctgagactagaggtgtgccaccacacctagctaatttttaaaaaatatttccagagtcagaatcttgctgtgttacccaggctggtctcaaactcctggcctcaagcgatcctcctgcctcagcctcccaaaacagtgtgattacaggtgtgagccactgtgcctggcctaattttacctgaatattattctyagttgagagagaaggtgagataaaattggcaaatgtcttgatagggaaggatgaagaggtttaggcagagagagagtgagagggtgagcattgaacgtggttcagttagcaaccagccgcatggagaaacctgtcattttggaagaaatagagcagtcgctatagacttatgtgggttgctgtcgacatcttgttgttttaggggatgtttccattcaggacacaggcatgttgtgtgccagtgtctcaaggcacaaatggcaattgcacctcttaagggatgcccggtgggtgagcctaaagaacgaaggctggggcacccttgtgctggttgcaaggtcaggctggaagcctaacgctagtcattgcctgtagtgcaggcttctacctgaggatgacactgccttctacttgaaaaaatccccattttagtttcattgttgagaagaagtcagggctgagtgtggtggcccacacctataatcccagcactttgagaggctgaggaggttggatcagttgagtccaggagtttaagaccatcctcggcaatatggcaaaaccctgtctctacaaaaaatataaaaattaaccaggtgtggtggtgcattcctgtggtcccacctactcaagaggatgagaagtgggaggattgcttgagcctgggaggttgaagttgcccaggtggtcgaggctgcatcaagccgtgatctgggcgacagagtgagattccatctcacaaaaaaaaaaaaaaaaaaaaaaaaaattaatatgtgggaactcagtgttaaaaaggaatttttgtgtattgcttttttcttttttttggagacagtctctctctgtcactcaggctggagtgcgattttggcttactgcagcctccgcctcctgggttcaagcaagcatatctggctaatttttgttttttgtttttttttgagatggagtttcgctcttgttgcccaggctggagtgcaatggcatgatctcggctcacagcaacctccmcctcccaggttcaagtgattgtcctgcctcagcctcccgagtagctggggttacaggcatgtgccaccacacccggctaattttgtatttttagtagagacagggtttctccttgttggtcaggctggtctcgaactcctgacctcaggtgatctgcccaccttggcctcccaaagtgctgggattacaggtgtgaaccaccgcacttggcctaatttttgtgtttttagtagagatagggtttcaccgtgttggccaggctggtcttgaacttctgaactccagtgatctgcctgcctcagcttcccaaagtcctggtattacaggcatgagctactacacctggcctgtattgcctttttatagtatacgtatcttgtctcttttgttttcgtgtgttagagcctcttaaagcaggggatagatattcatgtttcactgaatctaaggtgctgtcagtccaggcttacattattttacgtcaccaagaaagaagaaaacactgctaattatactgtggcactgtgccttcttgtcacttagtgatcctattctgcaggttttgatgctgacgctttctccatctcttgtgtttgtcactggaatttaagcaccttctgccagagtcagaaggaacattctggtactaggatgctcgttgccttraaatttttgccatctatwcttttttttttttttgagacggagtctcactctgtcgcccaggctggagtgcrgtggcgcaatctcagcttactgcaagctccgcctcccgggttcacgccattctcctaggcctcagcctccccagtagctgggactacaggcacctaccaccacgcctggctaatttttttgtagttttagtagagatggggtttcaccgtgttaaccaggatggtctcaatctcctgacctaatgatctgcccgcctcagcctcccaaagtgctgggattacaggtgtgagccaccgcgcccagccaacttttgccatctcttctgagggcgtctgacagtgtctgttgccttccgctgcactgctggggatgtgtcaggcagtccttttcacagtttgacctactggtagggatcttcctttcttaagtttcataaagcatttgattgttgccttgcaagaaaatgtggaattgtatcatttttccagtgatgaatatttgattcatgaatatcaaattatactctgatggtctcttcctgtgtctttctgcatacatgataatttttcttttcttcttttttttttttttttttttttttgagacggagttttgctcttgttgcccaggctggagtgcagtggcgcaatctcagctcatcacaacctccgcctcccaggttcaagcgattctcctgcctcagcctcccgagtagctgggattacaggcatgggcccccatacctggctaattttgtatttttagtagaaagggggttttccatgttggtcaggctggtcttgaactcccaaactcaggttatccacccgcctcaacctcccagagtactgggattacaagcgtgaagccaccgtgcccggcttgataatttttcattttaatgaaaaattttaatgaaaagaatcatagtaattctttctggagacattttaaatgggttcaaacaattctcctgggttcaaacaattctccggcctcaacctcctgagtaactggattacaggtgtgcaccaccacgcctggctaattttgttttgcatttttagcagcgagggggtttcaccatgctggccaggctggtcttggctcagatgttctgcccaccttggcctcccaaagtgctgggattatgggcatgagccaccgtgcctggmcatctttgggaattttttttaatctgttaagtatttcatcccttctatttcttttattattttcctttgggaactattrggtcctgaaaattttggatctagtctctataacttttaaaaacttattttactttttgcatacttatatatagcattctggggaaattccttgtcttgatcttccctggtttgttcttaaagttgtgtttattctgctgttaagccagccagctactgggtttctttagaccataataacttcttccccctagatttatttttggttctttttcataataacttgttctttcttgttgtatataatttcccattttaacctccgtagagacaatagacttgtttttgttagagtcctttcttttaggtcctttaattgttattaactgttttcttggttctgtcttttcttggctgggtttggtaatgtttgatgatgtttgatgagacaaggaaatacatgaaaaagtttagaaagactgccagcaaaaataatgaaagtgcccaaatggaaatatattttactgccttacttcctgagagtgttggataaattaggctttcctgtagatacagctgagccatgtgattatgccggaggcaactgtactaaattattcaaattaatcattttttgttcatttgctaagtagttattatttagtgcttgttgtatggtaggcattgttttatacatgttgctaggtgttattaactgctcatattaaaattcattggtgtaattgtgagaaaaaagcaatgagaatatagttaatatatttttttaaaatagtgctgggccgattatcctttaacaaattggttgcttcaacatgttatgactgcgatatgttaaatagccatttgtttggactgcagtaatttggaatttgacagtcagcttgtattcagattgaattggatatccttgtactttgaaattacatgtaattaggattcttgttgacgagatatatagaaacatctttacactgcatcattagtatttgctggcagagataagagctaatcaccaattatccctacttttttcctaaaagaagtctgtgtggctcacaagttagtaatattttttcataggcaggttcctttcttcattttccaaaggagaattttactttgaactttttctttttttggaaaactttcaactagcyaagcatttttgggtctgttggaattttcctttttgttgacatgcagtaatacctgacttcttgtctgtcacagatcccagattacaggaatgcagtaatcgtggccaagtctccagcctcggcgaagaggtaggtgggaatctcacaacctctttctggatctrcttctaaggattgtatccgtgatgagttccaggcattctaatttgaacttcagtggttcccagcgatatctcttatttttcttccatggactggtattttaagattgttctgtcaactccatttattaagtaaacattttaatttcctctcttttttttccaatcccactctatgattgccagacatacttccttttttaagttatcttccacttacactttcttttatttttattattattattatttattttattttatttctttattttttgagatggagtttcgctcttgttgcccaagctggagtgcagtggcgcgatctcggctcaccacaacctccacctcctgggttcaagcgattctcctgcctcagcctcccaagtagctgggattacaggcgtgcaccaccatgcctggctaatttttgtatttttagtagagatgaggtttcaccatgttggtcaggctggtctcaaactcctgacttcaggtgatccacctgccttggcctcccaaggtgctgggattacaggcgtgagccaccacactgggccttatttttatttttaatagtagaaacagagttttgccatgttgtccaggcaggtcttgaactactgaggctcaaacgatccacccacccgccttaccctcccaaagtgctgggattacaggcatgagccactgcgcctgacctcaatcatatttcttgaccaaagcaatccagttctggggaatacgatctagtgttttccccagacccagattgacaatcacatgtcagtctttgagtctggcgtttacagtactggcgaatatttacagtactagcagacaacttcatagttgtttactgccccttatttgaggaactcagaaattgattaacagaattttatccagctgagaggccagttatttgtatatgttaaaggtgacattttacaaaattgacacaacctgaggtgtaccaaagggggagccttgagagtcagtagagtgagttacatgtaacctggagtaactgatgtgtcactattgcatacttaaaattatatgtcggttgagaggatttcttatactaccagtgttttgtggagaagccactccactggagagggaaagaacaaaatcacttgtaggaataaagcctttttcctaaaaaagcccttttaaagttattttccagttgaatacctttgatcactggattgttgttgagtcctgtggaatgaaagaaagtgtagggtgcctccaccctgggctcgtgggctggcagtattgaaggatggaggagaacttgcacacagtaagccattgatttcaaaagtatttcacataagtcattgacgttatgaattaagaatagcactttaatatgtagacttagtatattaaataaaataaattggcatttgagataaaaccattacatggctgtgttcttgtggctgactttcccaacccagccgggcctgtgttcacccatgtgtccttcaagaagttgtatcacctgatctcctcttgtccatttgattaaattgtaagaaacagactgaattttagaatgtaaacatttcaaatagcttttccaaacatttcttcaaaggctgaattaattttacttaataatttttctctgatatacatgctttaaaaaaatgtaggtgaaaaatcacataatatacaatmattttaaagtatagaattcactggcatttagtgcattcacaatgttgtgtaaccaccacctgtctctgttttcagaacattttcgtcttcccagaagaacatctagtacccattcagcaatcattccttatcccttcaccttctgtccctcggcagccacacagtatgtggccctctgtgtctggtttctttcacttagcagttttcaaggttcatctatggtgtagcatgtagtatctcagtgttttgttgtcgctgttattgttcgagacaaaatcttactctgttgccgaggctggagtgcagtggcacgatctcagctcactgcaacctccgcctcctgggttcaagcaattctcctgcctcatcctcccaggtagctggaattacaggtgcrtgctaccacacctgggtaatttttgtatttctggtagagatgaggtttcaccatgttggtcaggctggtcttaaactcctgaccttgtgatctgcctgcctcggcctcccaaagtgctgggattacaggcgtgagccaccgcacttggccagtacctcagtccttttgatggctgagtaatattgcattgtatgtgtatactagtttgtttatccattcatctgttgatggacactttttttttttaccgtttggctattatgaataggactcctatggtcagtcatggattagtttttgtgttggcataagttttcatttttcctttcttgtggatatatattaggattggaattgctgggtcatatggcagtttcgtttatgttttgaggaactatcagtctcttttccactgcagctgcccattttacattcccaccagcagagtatgagggttccaacttctccacatcttcaccaacacttaattctctgagttttttcattataatcatcctagtgggtgtgaaattctaccttatcgtggttttcatttgcatttccctaatgattgatgatgttgagtatcttttttttttttttaatgagacagggtctcagtatgttgctcaggctgggctcaaactcttgggctcaatcaatccttctgcctcagcctgttgagtgtgtgtgtgtgtgtgtgtgtgtgtgtgtgtgtgtgtgtgtgtgtgtatttatttatttatttatttttttgagacagagtctcgctctgtcacccaggctggagtgcagtggcgcgatctcggctcactgcaacctccgcctcccaggtttaagcgattctcctgcctcagcctcctgagtagctgggattacaggcatgcgccaccatgcctagctgttgagtatatttttatgtgctttttggccatttgtatatatttggagaaatgcctgttcacaccctttgcccatttaataattgggttgtctttttgttgagttataagcactctttatatattctacatactaaaccttgttagatacatgatttgcagatattttctctctttctgcagattgtcttttcactgtcttgatggtgttctttcacacaaaaaggtttcaatgctgataaagttcaatttatctttttttttttttttttttgagacggagtctcagtctgttgcccaggcttgagtgcagtgtctcagctcactgcaacctctgcctcccgggtacaagcgagtctcctgcctcagcctcctgagtagctgggattacaggtgcccgccaccacacccggctaattttttgtattttttagtagagatggagtttcaccatgttggccaggctggtctcgaactcttgacctcgtgatccgcctgccttggcctccccaatcaatttatcttttttgtttgttattgcctctgcttctgatgtcatgtctaagaatccattggccaggtgcagtggctcacttctgtaatctcagcacttcgggaggctgaggcagaaggatcacttgagcccaggaatttgagaccagccagggcaatatagtgagacctcgtttttaagaaaaaaaaaaacattaactggatgtggtggcatttgtctgtggttctagctacttgggtggctgaggtgggaggattgcttgagcccaagaggtcaaggctacagtgagccgtgattgcaccactgcctggctaatttttgtgtttttagtagagacggggtttcgccatgttggccagactggtctccaactcctgacctcaagtgatcttgacctcaartgatcatcccaaagtattgggattacaggcatgagccaccgcacccagccaccatagctttttaatttttttgagatggagtttcactcttgttgcccgggctgcacaatcttggctcactgcaacctctgcctcccaggctcaagcaattctattgcctcagcctcccaagtagctgggattacaggtgtgcaccacttcacctggctaattagtagagatggggtttcactatgttggtcaggctggtgaccaacctgatctcctgacctcaggtgatccacccacctctgactcccaaagtgctgggattacagacgtgagccaccatgcaggcctctatagcttttttttttcttttgagacggagtttcgctcttgttgcccaggctggggtacaatggcacgatctcagctcaccctgcaacctccacctctcgggttcaagtgattctcctgcctcagtcttctgactagctgggattacaggcatgcgccaccacgcctatctaattttgtatttttagtagagatggggtttctccatgttggtcaggctggtcttgaactccagacctcaggtgatctgcctgcctcggcatcccaaagtgttgggattattggcatgatccaccatgcccggccctctgtagcttttcaatagtcttttttttttttttttttgagacagagtcttgctctgttgcccaggctggagtgcagtggtgcaatcttggctcactgcaccctccgcctcctgggtttaagcaattctctgcctcacctcctgagtagctgggattgcaggcacctgccaccatgcccagctaatttttaatttttgtatttttagtagagatggggtttcaccatcttggccaggccagtcttgaactcctgacctcgtgatccacccacctcagtctcccaaagtgctgggattacaggcgtgagtcaccacgcccagccttaatagtcttcaagttgggtattgtcacacctccaactttgttcttcaatattgtgttggctattttgggtcttttgcctctccatataaacttcagaatcagttttttgaaatacacaaaataacttgttgggatttagattgggatttgcattaaatctgtagatcagattggggagaactggcatcttgacaatattgagtcttcctatccatgaacatgggatatcattttttaaaaattcatctttgatttctgtcatcagagttttgtagttttccccatatagatgtgtactttttttttttttttttttaaagagaaagtcttgctctgtttacccagactggagtgcactggtgccatcacagctcactacagccttgaatttttgggctcatggcaatcctttcatttcagcctcctaagtagctaggactataggtgtgcaccaccatgcctggctaattaaaaawatatatatatattttttgtyagagacrggggtctgactgtgttgcctaggctggtctctaactcctaggctcagcctcccagtgttgggattgcaggcatgagccatcacttccagcccatattttgttatatttatgcctaaataaatatttcatttctttgggtatcccttaattttttagacattgttttctttagttctgtgaacatatttatgatagctaatttattgtgtctagttattctgacattgggctttttcagagatcgtktctgttgactgcttttttactgtgtatgggccatgtttttcttttttttaatgtttaaaaaaacttattactttattattttaatttaatttaatttttatttttattttatgacagagtcttgctctgttgcccaggctggagtgcagtggcatgatctcagctcactgtgacctctgcctcctgggttccagcgattctcctgccttagcctcctgagcagctgggattacaggtgtgtgccaccaaacccagctaatttttgtatttttagtagagacgggatttcaccatgttggctgggctggtctcaaaactcctgacctcaggtgatccacccatcttggcctcccaaaatgctgggattacaggtgtgagccaccatgcctggccaaaacttcttactttaaaaaagaatacagaaacaagatcttgctgtgtttctggactggtctcaaactcctggcctcaagcaatcttcctgccttgggcctcctgaagttctagaattaaaagtgtgagccaccatgcccggcccatattttcctttttgtttgcatgccttgtacattttagttaaaaacaacattttaaattatgtaatgtgaaaaatctgagcatcagattctacctccaccaattcccagtgtttgttgttgctgttgtttctgtgatatgtttgtttagtggccaccctgtgccaattctgtaaagtctgtattctttgtagcattcagccactgaagtctctggttggttagcttactggccagctaatgattggacagagatttcctgaaatgccttgaagcaataaatctcccactctcttcaaggtctgtgtgtgtgtgtttgtgcatgtcttcaattctcccagcagcttacaactctgccttagcctttacttcttggttgcacagagccttaaggtcagccaaggttcaaggttaggggcttttcaggtccttcctgggtaagcgcatgttctttacatgcaggaataagcttttcaaggcccatgtggccatctcattccccagattttccttttttttttttttttttttgtctagccccttgttttactcaactggtattgtcacttcaggcggctgcagtgttaaacagttgctgttgattgctcatctactctggggatgggactattcacacagagtgactctaagtttgatcatattctccagccctgagtctcagcaagctgccagataggcataatagtgayggttacctgagaatgggcttcttgagaagctccaaacctgttcttttcccaccagtggttgctagtcttctgtttctcatggccaccatgattatgaggtttccaatttttgtcttttgcagaactggagagagaggcatgggaataatggaataatgggaatggggcaagttaaaacacacacagtttcttttttttgagacagggtctcactctgatgcccaggctggagtgcagtggcatcattatggtttactgcagcctggacttcctgggctcaggtgatccacctcagcctcccaagtagctgagaccacaggcatgcagcaccatgcctggctaattctcatgttttttttgtagagatggggtctcactatattgcccaggctggtctccaactcgtggcctcaagtgatctgcccatctcagcctcccaaagtgttgggatgatagtcgtgaaccagcatgcccagcccaaagtttgctctttaacaagattcagctgtttttcttaaacactcctcagattgttgcaagctgttggttaacttccacagttatgtaaaagttaatttttgcaaaattttttagagtttttctttctttcatggaggagcagattttttagggtccttattctgccattctagagtggtgcttctctatagtggtgttgttgttgttgttgttgttgtttagacggatttttatacttgtcacttaggctggagtgcaatggtgccatcttggctcactgcagcctccacctcccaggttcaagcgattctcctgtctcagcctcctgagtagctgggattacaggctcccatcttcacacccagctaatttttgtattcttagtagagatggagttttcactatgttggccaggctggtctggaattcctgacctcaggtaatctgcctgccttggcctcccaaaatgctgggattacaggcgtgagccaccacgcccggccctctatagtgttttgaatatcaccttatatagctgttttaatagttgttctaagtattttattacatatacaaaacatattacaatatactgatgtcattttatcagcctgagtgaaatatagaagtcatacctctctgtgtctctttactccccctgtttttaatatatttgtcttaaatatttctatacatacatttatagcagtatcaggctgttagaatttttgcttttttttttttttttttttttttttgaggcagtgtctcgctctgtcaccaggttggagtgcagtggtgcaatctyagctcttggtaacctccgcctcccgggttcaagtgattctcctgtctcagcctcccaagtagctgggactataggcgagcgccaccacgcccagctaatttttgtatttttagtagagatggggtttcactgtgttggccagggtggtctccatctcttgacctcgcaatctgcccaccgcggcctcccaaagtgctgggattacaggcttgagccaccacacccagccagaatttttgcttttaaacatcaaacataatttagaaaagtcagaaatgaagaaaagcttattatatttacaggtatttttgtttccttcttccttgctgatattccaaagtttagtttattgtttcctttctgtttagagtacctccttttgccgcttttaaataatagttctgttggtaacacattttgctggttttccttcatttgagaatgtctagagttccttttcrttcttgaaggacatcgttgctgggtataggattctggagtaacggttcttttctctcagcacctgaaaagtttttgtgtcactttcttttggtcactgtggtttctgatgagaagttggttatcatgaattatttttcaagattatttctttgtctttagttttcaaaagtttaattatgatatatmttgagattgctttgggtttatcctgtttggtgtttgctggacttcttgaagctgtgggtttatgtctctgaccaatttgggaagctttcagccattgtctttttgagtacttttttagtcctaccgtctttctcctctttttctgggactcttatgacataaatgtcaggtgtttgtttgtttgtttgtttgtttgtttgagatggagtttcattcttgttgcccaggctggagtgcaatggcgtgatcttggctcaccgttgcaacctctgcctcttgggttcaagcgattctcctgcctcagcctcccaagtagctgggattacaggcatgcaccaccacgcccagctacttttgtatatttagtagagacggggtttctccatgttggtcaggctggtcttgaacttccgacctcaggtgatccacccaccttggcctcccaaagtgctgggattacaggtgtgagccaccgtgcccagctgatcttttgttacaggtccatgggattctgtttatttttattttctagtcttttatatttttattttttagtgggtctcactatgttactcaggctggtcttgaacccctgggctcaagtgattctcccatcttagcctccagagtagctgaaactacaagcacatgccaccatgccctgccacagccattgttctctctgttgtccaaattggctaatttctgttgtctgtcttccagttcactgattctttccttgacctccattattattttcactgtaacttccattctgctgttgagtatatccaactgagttttttttttttttttttttttttttgagacagggtctcacctctgttgcccaggctggagtgtagtggtatgatcacagctcactgcaacctctgcctcctaggctcaagcaatcctcccacatccgcctcccaagaagctgggactacaggtgcatgccaccgtgtcttgcgaatttatttttggtatttttggtagagacggggattttaccatattgcccaggctggtcttgaactcctgagctcaagtgatctgcccacctcagcttctctaaagtgctgggattacaggtgtgagccaccacccccagcccaactgagctttttaatttggttattgtattttttaagttctaaaataagtttttggttctctttttttgagactgagtctcgctctgttgcccaggctggagtacagtggtgttatcacagctcactgcaacctccgctccctgggttcaagtgatccttatgcctcagcctcctgaggagctgggattacaggcatctgccaccacgcccggctaatttttgtatttttagtagagatggggtttcaccatgttggtcaggctggtcttgaacttctgacctcgtgatctgcccgcctcagcctcccaaactgctgggattacaggcgtgagccaccgtgcctggctgctaattttgtatttttagtagagacggggttttgccatgttggccaggctggtttcaaactcctggcctcaagtgatctgcctgcctcggcctcccaaagtactggaattacagtcatgagacactacgcctggccttgggtctttttttataccttctatttttttgtcaatactttctttgtttagacttcttgttttttatttcacacatgctcataattgctgcttgtagcacttttctgatggctgctctaaaatctttgttatacagtttcagcatgtctgtcatcttggtgttggcatctgttaattgtcttttttcattcatattgagatttcactggcctttagtgtggcgagtggcttctgattggaatctggacttttagatattgtgtgtgagactctgggtctcatttaggccttctgattttgctggcttctcaggactctggcagggaaagtggtggtgttggggctygtttctgctaggtaagggtagaagtcgagattcaccaccaggccttgtgtggaccacctaaggtggtccttgttactcatgggtggaaatgctccctccatgtcctccgctgacgccaaggaaaagtagcatcattctcattgggtggtggtggaattcctgactccaccaggctgcctctgataccactgcaatggagaggggaggggcacctcttwactgctgagttgggggtagaagtccagatttcactctccactgactctggcagttgctccttactgctgagtgagggtgaaagtcccagctccctgtttggccttctgtgaaaccaccccattgggtttggggtgcctcattatagcctgacaagccaggaagtacaggctcacccctcaaccttcactcatgcggcggaaatgtggcggaaatgtgggctgtggctttcctgcctgtgtggctagagtaaggcagttattgtctaaatattttctcactcactaggttgcccttttcttagtcctttgactagggagagccgacctttgttggagcttttcttgtctttgcccactggcatttttgggtcgcttcttctccagctacaaatctgggataataaggcaaaaggaatgcccaaggaagccaccaccgtgacgttgctcaggtcctgaggtcccttgctagtctgccttctctctaccttttagtgtcttctcatttttttttgagacggaatctcgctctgtcacccaggctggagtgcagtggcacgatcttggctcactgcaaactccgcctcccgggttcatgccattctcctgcctcagcctcccgagtagctgggactacaggcgtctgccactatgcctggctaatttttgtatttttagtggagacagtttcaccatgttagcaaggatggtctctatctcctgacctcktgatctgcctgcctcagcctcccagagtgctaggattacaggcatgagccactgcgcctggccagagtcttctcatttttgtttgtatgtaacatccaggggttttagttgtgggtggcagaaggagtattaataatccttcctagtggaagcagaagtgacaatgttttgatacttttttttccttgagacaggttcttgctctgtcatccaggctggagtgcagtggtacaaccacggctcactgtagcctccatctcctgggctcaagagatcctcctgccttagtctcctgagtagctgggactgcaggcatgtgccaccatgcccagctggttttttccttatttttgtagcaacgggatctccctatgttgccaggtctggtctctaactctagggtacaagtaatcctcctgccttggcctcctaaagttccgggattacaggcatgagccactgcatctggccttgatacatttttttttctttcccrctaaataccagaagaacatgatgaattttctgttgactttcccatctgggtggacttttagtaacctctagagtcctcagtttacttctgtcacccacstgttcacagagggatggatgtagtagccttttgctcagtttctttggcttttgtcagtgatgtttgtcattcatctgttcaaatgtttattgagaacctattttgctggggctgatgaggcctaggaagatgccctgtaggaatgcatgtgtagcgtcagatgttttttatctatgttatgttatttgatctttgcaactttggaagtcagcagttataatctctcatagatgaggaaacagacccacagagatgaaggaaccaaggtagttccaccaaatgttgtttccttgaaggtagtggggcaactatttacttccaagaatgttttctataccagtgattaggggacttgagtgttggccaratatgattgaaattgggccaggtgcggtgtcacacctgtaatcccagcactttgggaggccgaggggggtggatcacttgaggtcaggagtttgagaccascctgaccaacttagtgaagccctgtctctactaaaawtacaaaattagcggggcatggtggcgcacgcctgtaatcccagctacttgggaggctgaggcaggagaattgcttgaacctgggaggcagaggttgcatttagtcaggattgcgccattgtactccagcctgggtgacaagagcaaaactccatctcaaaaaaaaaaaaaaaaaaaaaagaaattgacttgcccccctccactcagtctttaccgagtacatatttgagtgctgctgtgccagccatcgtggatgtggtggtgaccagtgcaggcagggctgtgttcccatggcacttgcagactgccctcatgtgctctttgactggtaggtcagttgggtagattggaacgaaagacccagtctctttttctcccagtttcagtaattgaatccacatagatcatactacattaaatgaatgttttagaggctgggcgcattggctcacccctgtaatcccagcactttgggaggccgagatgggtggatctcctgaggtcaggagaattgcttgaacccgggaggcggaggttgcggtgagcccagatcgtgccattgcactccagcctaggcaacaagagcaaaactccatcaaataaataaatgaatgaatgaacgtgtgttttagtatggagatgagtgctacaaaaggttcagttttatatggaacaggtagtaaaataacacagtcaaggcttaggagtttggtctgtgagtttaaggtattgtgagtgggctaggctcgatggctcacacctgtaatcccagcactttgggaggctgaggttggaagatcatttgagtccaggagttcaagaacagcctgggcaacatgttgaaaccccatctctaccaaaaatacaaaaattagccgggtgtggtggcgtgtgcctctagtcccagctactcaggaggctgaggtgggaggatcacttcagcccagtaggtggaggttgcagtgaggtgagatcacaccactgcactccagcctgggtgacagccagaccctgtctcaaaaaaacaaagtaaaataaaaaggtattgtgagcaagagctctgtcgacatggcatcaacacagtaaagtcagttctggttgtcttatatcccgtagctatgtggtggtgattttcttgtgttctaatgtcctgataaacacattcacccagacttcgagcaggagatggcactttctggctcagccacatgcaaattctgatcctattatttctagttccctcctccaagtttttcatttggcagccaaccttagaaaatagctgtaatcaatgtagaagtcagactggggctgacttttatcagtcaggaaggtattaaattagcagtccaagacttgggcttccacttgtgccttagccagtctttgtgagaaccttggtcaaggctgtctctccaagcctcagtttcctggggataacacctgcttggcttatcttacagagttaataagcatcaaagaacttactgaaggactttataaattaaataccattatgtagaatggtggtggttagtgcctttatttatttattttttgagacagggtctccctctgtcgcccagtctggagtgcagtggtgtgatctcggctcactacaacctccacctcctggattcaagcgattctcttgcctcagcctcctaagtagctgggattacagacgtgcgccaccatgcccagctaatttttgtatttttggtagacatggggtttcaccatgctggtaaggctcttctcgaactcctgacctcaagtgatctgcctgcctcggcctcccaaagtgttgggataacagacgtgagccactgttgggataacaggcgtgagccactgygtttagtggttagtgcctttagaatcctgaagttattgatgaataggtcgaagtscagagctattgttttggagttgtttgacaatgagcagttgttttgactaaaagggatcatcagagaaagtgttgcttttgtaaggaacagaacttgcttgaatgagttgtttgaaattgttttctctgaataactgagtgaataggaaacaaaaggatagctgaggccctgtgtcttgttctttctcacccatgatgtaaattaactcattatcgtacaatcaggatcaagttgctttagaattcctctctgtcagtgcatgaaacaaaatgacacagagaaaccatcctgattgattttggaattagatgggaatgcaaagtatctgattaagttatatggagtatccagaaactcccattgctgtgcaggtaataattttatttatttattattttacttatttatttttttgagacagagtcttgctgttgtcgcctgggctggcatgcaatggcacgatctcggctcactgcaaccttcgcctcccggattttagcaattctcctgccttagcctcccgattagctgagattacaggtgcctgccaccatgcctgggtaatttttttgtatttttagtagagacggggtttcaccacgttggccaggctggtctcaaactcctgacctcaggtgatccacctgccttggcctcccaaagtgctgggattacaagtgtgagccaccgcacccggccatgattttatttatcttaagagcattgtgctttgtagaggttggtataattgaaatattattctaggaattggcaaacctccacagatcccagatggaaaagacttccttagaggataactaacaggtcagtcatttggccaattttgtttgcaaagccaatcttgaatttcaaggaggaactaataatctatgtgatgccaactcttttgaagactctgccccattgttctgtctgaaatttttttctcttgagaattttttttttttttgagacggagtttcgctcttgttgcccaggctagagtgcaatggtgcgatctcggctcaccgcaatctccgcctcccgggttcaagtgattctcccacctcagcctcccaagtagctggggattacaggcatgtgccaccacacccggctaatttgtttgtgtttttagtaaagacagggtttctccatgttggtcaggctggccccaaactcccagcctcaggtgatctgcccgcctcggcctcccaaagtgctgggattacaggcgtgagccactgctcctggccactctcttgataattttttaaaaactattttgattttttttgtaaggatgaattcaaagttatatgaatactraatcttacatcttgggatatttatcaaatgttattaaaatattctgtgtttatgatgctccctcttttcccttaggacaaatattctgtcttacacacacatagataaatatattttactgacttcactgtttttgacctgaacagtcttgctcctgtgaaggtttatcatcttttccttggaaatataaattacattcctcatagataggaccagaccaataaatgtttacttacgtgtgtctgagattgtttgtttgtttgtttgtttgtttrtttgagacagggtctttctctgttgcccaggcaggagtgcagtggtgcaattatagctcagtgcagccttgaccttctgggctcaagtgattctcccacctcagcctcccaagtagctgggactacaggcgcgtgctaccacgcccagctaatttttgtatttttagtagagacagggtttcaccatgttggccaggatagtttcgatctcttgaccttgygatccacccgcctcagcctcccaaagtgctgggattacaggcgtgagtcactgtgcctgggccagctaatttttttttatttttgtagagacgaggtctccctgtgttgcccaggctggtctcaaacccctgggctcaagccattctcctgccttcgtctcaaagtgctgggattacaggtgtgagccatcacccagctttaaaaagtatattgaaaataggatgatttaagcatgarttttttgtgtgtttgtttgtttgtttgttcgtttttcagtagagatggagtttcaccatgttggccaggctggtcttgaactccttgtcccaagtgatctgcccgccttagcctcccaaagtgctgggattacaggcgtgagctgccgtgcccagccaaatttaaatttcttgaaataattgctaacactgtagcaaagctttcctttgttgtgtagtgcatataggaaaccaggttgatgtgaaatttctaacagctcataagagtctacatactaatagtatttagtactttctagtgccctgctcttcatatgtcatgtaaatgccttggctgtatctagtatagatagtactagtgggattcagtataatccttaattttttgtttgtttttagtaattcttgtaagcagttagttaagaacttgttttgaatttttggtgctggtaagccaagactgcgagaacttgttggattcttaaacacttgaacatttaccatgcattaggtgctgaggatggaaaaaagagtaagactcagcatggcccccaggaatcaggagtggctgtattaatatcagacaaatcaaggcaaataattttgccatggttgaagaaggtcttttcctaatgataaaggggtcagttcttcaagaggacaaaacagttctaaacatttataaactaaatgacagtgtttcaaagtatatgaagcaaacactgataactgcaaggagaaatagatatatccataatgatagtgattccattattcttctcttagtaattgatagaataaggagactgaaaatcattaaggatgcgggagacttgaacaaccccttcagcctgctggatctgactgacagtcatagcacaccatccagagagagcagaatgtagttcttttttagtataaacacaaagatagatcatattcttgtgagccataaaataagccccaaattgataattatgcaagccatacaaaatatattctctgaccacagtggaattaagaataattctaataacagaagtatctttggaaatgtcctgaatatttagtaactaaataacatacttttagataacccataggtcaaagaagaagtcaaaagtgaaattaaaaagtatttagaaccaaatgaaaatgaagacacaggccaggcgcggtggctcatgcctgtattcccaacactttgggatgccaaggccggcagattacctaaggtcaggagttcaagaccagcctggccaatatgatgatgaaaccccatctctacaaaaaatacaaaattagccgagcgtggtggcacaccctgtaatcccagctactcgggaggctgagacaggagaatcacttgatccagaggtggaggctgcagtgagccgagatcatgtgaccgcactagccaagatcacgccactgcactccagcctgggcgacagagcaagactccatctcaacaacaraaaaaagccagatgcggtgggaagaagctcctgcaagaggccacggagccagcgacgggaggccttgaagccagtgacgacccactcagccgagctgccgctttcgcagcacgccaaggacactcatgaggaccatgatacttccactgagaatgcagatgagtccaaccatgaccctcagtttgagccaatagtttctcttcctgagcaagaaattaaaacrctggaggaagatgaagaacttttaaaaatgcagacgaaactgttctgatttgcctcagagaaggatctcccagaatggaaggagtgaggcaccggcaacgtcaagctcctgaaacacaaggagaaagggaccatctgcctcctcatgcggagggacaagaccctgaagatctgtgctaaccactcttcacgctgataatggagctgaagcccaacatgggtagtgaccatgcctgggtctggaacacccacgccgacttcgccaacgagtgccccaagccagagctgctggccatccacttcctgaatattgagaatgcacagaaattcaaaacaaagtttgaagaatgcaagaaagagatcggagagaaaagaaaggatcgggcaaaaacgatcatgccaaaaaagtggcggaaaagctagaagctcttttggtggaggaggaaaccaaggaggatgctgaggagaagcaataaatcatcttattttatttccttttcctccctttcctttccttttcaaattttaccctgcccctccttttcggtttgtttttattctgttttgtttttacaagggatgttatataaagaactgaattcaacattcaaaaaaaaagattaaagcataaatcaatgaaatagaaaacaaaaaccagaaaaaagctaaaaagctgattctttgagaaaatcaatgcaattgataaacctttatccagactggttaggagaaaacaagacacaaattacctaccgtaccaagtgttggtgaagatgtggaggaactggatctctcatgttctgctcatgggactgtaatatggtataaccactttggaaaacagtgtggcctttttttttttttttttttgagatggagtctcgctctgtcgcccaggctggagtgcattggcactatctccactcactgcgagctccgccttccaggttcacgccattctcctgcctcagcctcctgagtagctgggattacaggtgcctgccacccagtccggctaatttttttgtatttttttagtagagacggggtttcaccgtgttagccaggatggtcttgatctcctgacctcatgatccgcccaccttggcctcccaaagtgctgggattacaggcgtgagccactgcgcccggcctatgtggcctttttataaagagttaaatatacacctactatatgatccagccattccactcttaggaatttatcaggagataagaaagcatgtggctggacacgtaattccagcactttgggaggccacggtgggcagatcatctgaggtcaggagttgaagaccagcctggccaacatgacaaaaccccgtctctacaaaaaatacaaaaattagccaggcgtggtggcacgtgcctataatcccagctacttgggaggttgaggcaggagaatagcttgaatctgggaggtggaggttcacaccactgcactccagcctgagcaacagagtgagactctgtctcaaaagaaaaagaaagaaagaaggaaagaaagcatgtgcccatacagagatctgtgtatgaatgttcacagcagctttgtgacagccaaaaactagaaacaaccggaaagctcagcaatacataaatggatacactgtgatatattcacccagcagaatattactcagcaatgaaagggaatgaactattgatatgttattccatggatgaatctccaaaacatgtgctgcgtaaaataagacaaaatggccaggcgcaagtggctcacacctgtaatcccagcactttgggaggtcgaggtgggtggatcatttcaggtcaggagttcgagaccagtctggctaacatggtaaaaccccatctgtactaaaaatacaaaaaagttagccagatgtggtggtgcatgactgtagttctggctatttgagaggctgaggcaggagaatcgcttgaacccgggaggcagaggttgcagtgaactgagaaatcctgccaccacacttcagtctgggcgacagagcaagactccatctcaaaaaaaaatcagacaaaaaaaggcaactttatgatttcacttacgtgaaattctagataggtgaaactatagtgacagaaagcagatcagctgttgcctggggcmasacttagtgaaaaatcactaaggggcataaggagatgcttgtggtgatgacgttccttatcttgattgtgctaatgcttatatgggcacatacagccttcagagctcatgaaattatatactttagatatgcacagtttctcatatctcagttttacctccctaaaactattaagaaatttgtgcttaatactttggtgagcattttatgccctttgccccatgtagttggttctcactggtaggtaggcaggcaggtagaattagcagctttaggtgagacagagctgagcggaggttccttcactcagtcaggctctcccggccagtggcttgcagaccaggccaggctgctgcccttctttggtgctgctgcagagggaagtgtttggcatgtggggtctctacagttagtcctggtttctaagagtctaaggctgttttattctctcttttctttagtcctttgggagacaacattctacttatgttctcttaatgttttgtcccctaggcattagcagaaccaagggctgcatgagttttgagcttgtgtctggtgttttccctcagggcacagtcttttgctgagcgcctgcgcctgggaattgcagtgattcatggagaggcgcaggatgccgagtcggacttggtggatggacggcattccccacccatggtcagaagtgtggctgccatccaccccagcctggagatccccagtaagtgtgctgctgcctctttcccactttcctctgattttaaggctgactacactgttgtctgtgtggtttttttcctcattcttcgttttttttttaagttggcaaaaactcattaacacctttcttggccagatagtagcgaatgcatttctgattaccttgtaaattgtaaggccgtttagaagcagtctgtccttctttgcaagacctgtgaaaatgtttggactattgagacagttgcaatgcttcagggaagtccattcattcattcagcagtatatactagagtgtagtttaacataagcaaaaagctttttatatacaaagttattgactgtgakgtttttaatgcaaaatattagaaaggtttaaatggtttaccagagtgtagggcttggtaaattataytgtgtcagtacagctaattatgcagccctttgaaataatcaagactatctggaaacgagaaaaatatatggaatatatatgaacaaggcagaatataagattgtatacctatttgtcttagttcaggctgctgtgatgaaataccttagactgggtaatataaacaacaaatttattgctcacagttctagaggctgtgaaggtcaagataaaggcgccagcactgaccccgtgatgggccgggcacggtggctcacgcctgtaatcccaacactttgggaggccgaggcgggtgaatcacctgaggtcaggagttcgagaccagcctgatccacatggagaaaccccctctctactaaaaatacaaaattagccaagtgtggtggcgtatgcctgtaatcccagctccttgggaggctgaggcaggagaatcgcttgaacccgggagacagaggttgtggtgagccgagatcgcgccattgcactccagcctgggcaacaagagtgaaactccttctcagaaaaaaaaaaagataaaggcrccagcagatttggtgtctgtcgagggcctgttcctcgtagatggtaccttcttgctgcatcctcatgtggtggagaaaggtggaagactccctcaagcctctctgacaagggcactgacccccttcgtagagcagagtcctaacaaactagtcacctaaaagccctacctcttaataccaccacagtgggttccagcatgaatttggaaggacacaaaaattcagaccatagcattttgccccggcccctcaaaattcatgttcatcttacgtgcaaaatacattcattctatcctaatagcccccaaaatgttaactccgggtaagtcttaacttaatttcagcatcacctcaaaagtctgaagtccaaagtcccatctaaatatcatctaaatcaaatatgggtaagactccagctctgggattcactctgacgcacgtttctctccggctgtgagcctgtgaaatcaaacaggttgtatgcttccaaaatgcaatggtgggacagacattggatagacattcccattccaaaaaggagaagtgaggcccagtgtggtggttcacgcttgtagtcccagcgttttgggtagccaaggtgggagggttgcttgaggccaggagttcgagaccaaaagggagaagtaggaagaaagaaaggagtgacaggtcctgaccaagtctaaaacccaaccagacaaacaacattaaatcttaaggcttaagttgactcaaagccccgccttccacaaaaaytggggcaggggttggtcttgcaaagctctggatggccccactcccacagctttgctgggagcagcccatgcagcagctctcagtcactggattctcatgcctgcatctctcaggctggagttgcactctagtggttctaccagtcttgggtcttggggtggtcttgccccacaactccactgggcattgccctagtggggtctctctggtggccctgcccttgtgacagttctctgcttgggccctggcactctttggggcatcctttgaagtctgggtagaggtagatgtgcccccacagctcattcactctgtgcactgtggagatggccctgcacggacaccactgtggtttgttgcctgtgccttccagaggggtggcccgagctatagttggacctgcttgagctatagctggagtgggtaaggagtattctggaatgtgggaagtggagccttgaaatcgttctgcccccaagaccctggcattctaggcttatgatgagatgggcagtcacaaagatctcagaaatgcctttggggtcattgagtcactgtcttgatgaatagcgtctggttctttttttttttttttttttttttttgagacaaggtctcactctgtcacccaggctggagtgcagttgtgcgatcatggctcattgcagtctcacctcctgggcccaagcagtcctcccacttcagcctcatgagtagatggaactacaagcacttgccaccgcacctggctaatttttgtattttttgkagagacaaagttttaccatgttgcccaggctggtcttgaactcctgagctcaagtgatccacccgccttaacctcccaaagtgcttacaggtgtgagccaccactcctggccgtctggcttctttctatccatactaatctccttatcaaatgtttgcttggtggctgggcgcggcggctcacacctataatcccagcactttgggaggccgaggcaggtggatcacgaggtcaggagatcaagaccagcctggccaacatgatgaaaccccgtctctacaaaaaatacaaaaattagctgggcatggtggtgcgtgccttaaatcccaactactcgggaggctaaggcaggagaatcacttgaaccagggagttggaggttgcagtgagctgagatccaagactgtgccaccgtactccagcatggcaacagagtgagacaycatctcaaaaaaaaaaagaaaaaagaaaagtttgcttggctacacacttggagttctgtcctgaacatgtttttgctttttttttttttttttttttttttgagacagagtcttgatctgtcttccaggctggagtacagtggtgcgatcagatctcactgcagcctccacctcscgggcccaagccattctcctacctcagcctcccaagtagctgggactatagatgtgtgcaccaggcctggctaattttttttttttttttggtagagacggggtcttgctttgttgcctaggttggtcacaaactcttgggctcaagcaatcctccctccttggcctcccaaactcttgggcttataggcctgagccattgcatccagccttgcttttacattctttacaagatggccaggctgataattttccaaatatttaagttctacctcccctttgatgataaatctcatctttaattcatcttcttggattttagtataagcagtcaagagcagccatgcaccctcttttgccaaagattctatttcactgcccttttttttttttttgagatggagtctcactctgtcacccaggctggaatgcagtggtgcaatctcggctcactgcaacctccagctcccgggttcaagcaattctcatgcctcggcctcctgagtagctagcactacaggtgcacaccaccacacctggctcatttttgtatttttaatagagatgrcattccaccatgttggccaggttggtctcaaaactcctgaactcaagtggtccgcctgcctcagcctcccaaagtgctggggttacagacatgaaccactgcacccgaccttttttttttttttttttgagacagtgttttactctcttgctcaggctggagtgcagtggtgtgatcacagctcacagcagccttgacctcctgggctcaatcgatcctcccacctcagcctcccaagtagctgggactgcaggcatgtgccaccatgtctggctaatttttgtattttatgtagagatggagttttgccatgttgcccaggttggttttgaactcttgggctcaaagcgatccttccacctcagcctcccaaagtgctgaaattacaggtgtgagccaccatgaccagcctactgtctgtttttctactagcattgtgatcatgaccacttagatcatttctaagaagattgaggctttctttacagctgttttcttctgagcctgtcttagtctgttttgtgttgctataacagactatataagactgggtattctataaagaagacactttatttagctcacagttcttcgggctggtaagttaaagagcatagcatcacatctggcagtttctggtgagggccacacactaggttgaaacatggtggagaagaaaagtgagcaggcgggtgcagagaaatcacatggcaagagaggaaacgagagagyctgggaagccaaactcatttttataacaacctgttctcatgggaactaagtgccctgagagcaagaactcactcacccccataggaaggcattaatccattcatgaaggatctgcctctgtgacccaaacatctcccactaggccccacctctcaatagcgcacactggggatcaatttttttttttttttgagacggagtcttgctctgtcgcccaggctggagtgcagtggtacgattttggctcactgcaagctccacctcctgggttcaagcagttctcctgcctcagcctcccgagtagctgggactacaggtgcatgccaccacacccggctaattttttgtattttagtagagatggggtttcaccttgttgcccaggctggttgaactcctgagctcaggcaatctgcctacctyggcctcccaaagtgctgggattacaggcgtgagccactgcgcctggcccaaatttttaacataagttttagtggagacaaactacatccaaaccaaagcagaactctcaccagagctcccctttacggtctgtacatagcaatacagtctttttctagccttttcctcttccagcctctgcccattacccagttccaaagccactcctgcattggtgggtatttaatacagcagcaactcacttctcagtaccaatttctgtcttagtttgttaaggctactataacaaaataccttagacttggtattttttttttttttttgagacggaatttcgctcttgttgcccaggctggagtgcaatgacacgatcttggctcaccgcaacttccacctccacctcccgggttcaagcgattctcctgcctcagcctcctgagtagctgggattacaggcgcgcaccaccacgactggctaatttttgtatttttagtagagacagagtttctccatgatggtcaggctggtcgcgaacccctgacttcaggtgatccgtccacctcagcctcccaaagtactggaattacaggcatgagccactgcacccggccagactgggtaatttataaacaacagaaattcattgctcacagttctggagactgggaagtcctggatcaaggcaccagcagattggtgtctgatgagggctcactctgctcctgaggtggcaccttgttactgtgtcctcagatggtggaaggagcaaggcagctctctgtaagggcactaatcctgttcatgaaggcagaggccttgagccttaatcatttcccaaaggccccactgttaatactatcacattgggtattaagttccaacatagcattttgagaggacaccatcttcagaccacagcactctctttgtctatgcaaagaccaggaggaaataggaagaatgaatgtagttgggttggggtggtagagttatgcatgaatttgtttttgtgtttaagaaacttccccatgccttaataacatcttcttaattaaaaaaaaaaatgccacctttgagttgttggggaagaaccctaaccccctgccctcatagattcagtgtttggtggcatatggactaaactggcaaaagacagatgaggaagaggaaaggcagtttaatcacatacatacagatgtgtgtgattaaactcttttgtgagtcacaaaaatgtgactcgaagtggttacaatttggggcttatatagcatyttaataggggaacaggaggggcagaaaaggcccctgtgggaaaacagatgacttctttttttttttttttgaaacgctcttttgcccagcctggagtgcagtggtgcaatcatggcacactgcaacctcggcctcccaggttcaggcgattytcctgggtagctgggactaccggtacatgccaccatgcccaggtaattttggtattattattattattattattattattattattwtttwttttwtttttttttttttttttttttttttagtagagacagggtttcgccatgttggccaggctggcctcgaactgactgcawgtgattcgcccgcctcggcctcccaatgtgctgggattacaggcgcccggccaagatgactccttaataggggaagaggaggagggaggggactgatgggaagtgggcgctgaggagaaaagatgggagagaggctagtttttgacagcgtctgtttaggtgtggtctggacttcttctggtcttaagcgatamgagtcagtcttccctggtgttcccagggaggagatttatcacagttgagttctttggagttattttgtgaggctctgcttttcagcatataagggacttcaggaactcaaatgctttcagctcaaaataatttttaggtcacagaggtatattctggactgttaggtttttgccttgcccaggagtttgctcatttataaatagagggaaaaaaaaaccagagaaggaactagtgtggttgggatagccatgcacrcagctgggattccagctatactttgtagatcccaactgaggtggaaagggaaggccatctgggcaggggttaaatctcctaaggggtgggggactgagcttgagtttgcatctggctccatcacttatcagctgtgtgttcttgggcctgttgtttttctgaaaaagagcgacagcaagaggccatcctcagagtggacccatgataggccaagatggtggaaagcccaggacgagccctcaggacccagcactgcctgccttatgtgagtgagataggactgcagtggtgagacgttcagtgatgggccatggtgtggccaggaagacactagcctgactaccaggaggcccctggagggaagagatggactaagatagcagtatctgyggggagccaaccaaggaggactttgaataccagtaaatacactcgtgtcctagaaggcagcccacaaaggctctcgatccgggccatttagtgttcagcaggccaggcctgcatctgtgtttgggatagggctgcaagtgcagaggccagatccgggaggctgatgaagttgagcaggcacatgggaggagagcttgatctcttgggctatgctgtccagtcgggtggccacyggctacatgtggctcctgcacactgggaacggggtggggagcagtgggagtgtgaaggacacacccctaatctgaaaactttaatgtaagtatctcattagtgaagttttattgactctgtgttaaaatggtaatattttgatatgttgaatcaaatcaaacatgttattaaaattaattttacctttttttgtgcttttgtaatgtggctactagaaaatctgaaattgcatatgtggctttcatttctgttgtgcgttattgctctaggggttggtaacaatgggaatgaaagtgacagagcacattgagaaatgttaaaaagacgatgggagggaggccaggtactttggcgcactcctttaatcccagcactgtggaaggctaaggtggaaggtttgcttgagcccargagtttgagaccagcctgggcaacatagcacaaccccgtttctacaaaaagtttaaaaattagccaggcggctgggcgcagtggctcacacctgtaatcccagcactttgggaggccgaggtgggtggatcatgaggtcaggagttcaagatcaacctgaccaagatggcgaaacgctgtctctactaaaaaatataaaaattagccaggtgtggtggttcgtgcctgtaatcgcagctactcaggaggctgaggcaggagaatcacttgaacccaggaggcagaggttgcagtgagctgagattgtgccactgcactccagcctgggcaacacagtgagactacctctcaaaaaaaaaaaaattagccaggcatggtggtgtgcctgtaatcccagctacttgagagtgaggtgaaaggatcacttgaacccaggaagtcgaggctgcagtgagccatgatggtgccactgcactccagcctgtgtgacagagtgagaccctgtctctaaaaaagatagcaggagggaatgaacatttttagtgtattagtctccagtacagcccttttaattgagtgatgattttccactttatagataaacaggatcagaaagagaaagcgacttccctgcagtcacatagtgacaagctggacatgtctgactaaaacctgtgctttttccactgtgttcttgggtctcttggacttagtaatggggatttaaggaggaggaaggcagtgagatagagccagggttcaggatttggggctgggagggtgttaataaagcgtttggctcaggacctcaaagccttttgcttgtgtgtgcatttctcacagcctcacgtgcccaggctgttggtgctggggggtaggcctggggctgccgctccctttcagaatccttgcctggcctcagaggggcttgtgtctaggaacctcagcagaaccctgcaagggctggctgggaccattggtgagatgagccatgcccgggagcatggaagaatatatgttcctcttcagtcctgtaagcacatgggctgtgatgaggaacgcgttggcagtctttagatgaacgctgcttctttggaacttgctgggtgttagcttttggtgtggcctttgggagtggactctggactgcagacactgaactacaggtttcccatctggaaatgagttcataggactggatgatctctatgttctttctaatatttctttactcgtgggatctttatgtttcattcataattttaattataatgtttctatgtttatgttttgactcaagtagtgatcactacaggccgtctttgggaatgcagtagaattttagtttcatagatcctaaatatttgattgtttttatacatttgatgattggacaccctacatagaatacttttttaaggtactagcaaataatatatgaagggaaaagaaagcattcttcctgtagcatctcgaatataaagattttkttatttagtattagattttaaaaattattttgtatcctctgatttcttatagatgaaaatatgcctactaaaaaacaatgaaaatactttttcagaatataagcactatatataatatttgaaaatattatccataaaagttagaagaaaataataattagtgcttgatgccactattcaaagacacaccactttaatttggtgagcctctttttggtttttcacccttattttcataaagctgcgatgcatgcttcatacataattgtgcatgttgctgcctccttctcccagctgcccgacgtgtcatctcaggtcaccagaaactttgacaggaaacagcaatttcttttttttttctttgagactgggtctcactttgtcacccaggctggagtgcagtgacaatcacggctcactgcaaccttgacctcccaggctcaagcgatttgtccacctcagcctcttgtaaacagcatttttatggctaataacccatcgtatgaatgtggcttagactgcccaaccacagcctaatttggggtttttatgttttcttctgttctttgcccttataatgtggcaggaaatrtatgtggataaaacacttttcccatactttggcttatttcatttcaagcttctaaaagtgagattaatgagtcagaaggtatgaatataaggctttttgtcaaattgatttcctagagggtgattcattatactttttcaccggcattgaggtcaagtgtcctgggagtaggactgttgaaaatgtaaaaagtcacttcagttctggaatttatcttgctttgctttgttttgttacacttttttgccctctcctgatgctcacctggggtcacacattgcctctggttgtcatatgtctttcatctctttcaatctagagcagtggttctcaattagggagtggatattgtctcctagaggtcatttggaaatgtctggagatagttttgattgtcagaatcaagggggtggctactggcatctagtgagtagaggccaaacatgctgctaaacttctcacagtacgtagggtggtcccttgcagcataaacgtgtctggcccaagatctcagcagttgaaaagtcccaatctagaacagtattttaactttttctttttgtgacattgccttaaaagaaaattgaagtcaaagtcacataacatagaattaaccattttaaagtataaaatttactggctttcagtatattcacagttttgtgcagttaccatttctttctagtttcaaaacttctcattaccccggaagaacaccctgcacccattaagtagtttcaccatgcccccatcccccagcccctggcaaccacttacctcttttctgtttctgtggatgtttgcctaatctggacacttcatataaacggaatcatataatatgtgggcttttgtatctggcttctttctttgagcatgtttttgaggttcatccatgtgatagcacttgtcagtacttcattgcttttggtggctggataatatttcattgtcagcatttgaaaggaatttgggttgtttccacttttggctatgctgctctgtatattcatgtatgagttttctgtgtggatagatgattcatttctcatggtctatacctggtatcggaattgctgcgtcacttggtgtatgtttaactttttgaggaactgccagactcttttttcacagcagctgcaccattttatattcctaccagtaatgtacaaagatttcagtttctccacatcctcatcaacacttattttctactttttattgtagccagcccagtgggcataaagtggcatctcattgtgattttgataaacatttccctaatggctaatgacttcatttgtatatcttctttggagaaatatctgttgaaatcctttgcccatttttgaactaggtttgtctttttttgttgaattataaaagttctttatatattttggcatatggcgcatatatatatatataattttttttttyttttttttttttgcgacagggcctcactctctcacccaggctggagtgcagtggtgcagtcgtggctcactggagccttgacctcccgggcccaagtgatcctctcacctcagccccctaagtagctgtgactactgtcatgcaccaccacgccctgctaatttttgtatttttttatagagacagggtttcgccatgttgctcaggctggtctcaaactcctgaactcaggcaggcaatctgtccacctcggcctcccaragtactgggattacaggcatgagccaccatgcccagcctactttatatattttggatactagactcttaccagatacatgatatgcaaatattttctgccattctgtaggggktttttttacttttttatttttatctatttatttatttttatttatttattttttgagacagagtctcgctctgtcacccaggctagagtgcagtggcatgatctcggctcactgcaagctccacatctcaggttcacgccattctcctgcctcagcctcccaagtagctgggactacaggcgcccaccagcacacttggctaatttttttttttttttttttttttgtatttttagtagagacagggtttcaccatgttagccaggaaggtcccgatctcctgacctcgtgatccgcccgcctcagcctcccaaagggctgggattacaggcgtgagccaccacgcctggcgtggaattgctttctcaattccctcttttgattgttcagtgctgctgtgtagcagctgattttgtgtgttgattttgtacttggcaacttggctgaattcatatattattagctttggtaggtggatttgtggattcttgggtattttcaatatgtaggaacatgtcatctgctaatagagatagttttacttttcctttctgatctggatgcctttcatttcgttttcttgtctaattacccttgctagagtatccagtatgatggtgaatggcagtggtgcagtgggcatccttgtcttgttgctgatcttaggggaaagcttttggccttcggccataaagtatcaagttagctgtgggtttttgtagttgcccttaatcagattgaggaaattcccttgtattcctagttggttgaatgtttttatcttgagatattaacttctttaaagttttgttttactttttaatataaaaattttggtgtgtgtgttttattccaaccagtgctgattcctaaagaaaagcccccaatcacggttgtgggtgatgttggaggaaggattgccatcatcgtggtatgtagacctcttttattattaattctagtatttgccattgttattctgttgattgattgattgattgattttattacagagactcactgtcgcccaggctggagtgcagtggcacaatctcggctcactgcaacttctgcctcccaggttcaaacgattctcctgcctcagcctcccaagtagctggaattacaggtgcctgctaccacgcctggctaatttttgtatttttagtagagatggggtttcaccatgttggccaggctggtctcaagctcctgaacttaagtgatccacctgcctcggcctcccaaagtgttgggattacaggcgtgagccactgcacctggccaatttatttgttaattctgggcatataaaggcctaaggatagtagtatggccagataattcttattaaatttgtgccttgtgctaaatgtttgctttggcccagaaattggaaaatgctattgtttattttaaaattgctaactactggctgggcgcgttggctcatgcctgtaatcccagcactttgggacgccaaggcaggccaatcgcttgggctcaggagttcaagaccagcttggacaacatggtgaaacccygtytctacaaaaaatacaaaaattagctgaacttggtggcacatacctgcagtcccagctacttgagaggctgaggcgggaggatcacttgagcctggggctcagaggttgcagtgagccgagatcatgccactgcactccagcctgggtgacagggtgaggctgtktytcaaaaaaaaaaaaaaaaaaagtcatcctgtcataacatgagatattgttctgtgatcaaagtaaagtacaagctgggcacagtggctcatgcctataatcccagcactttgggaggccaaggcaggcagatcacctgaggtcaggagttgaagaccagcctggccaacatggtgaaaccccatctctactgaaaatacaaaaattagctggacatgttggcgcacacctgtaatcccagctacttgggaggctgatcttggagaatcgcttgaatctgggaggcggaggttgcagtgagccaagattgtgccactgcactctagcctgggcgaaagagtgagattccatctcaaaagaaaaaaaaaaagtaaactacaaagttgattataactgtttgaaacatgcatcctttcacacatcataagaccagtgcacaaaaagagtgcacttcatgcctgtatattttaaagaatagaatgaacactgggtacccgctagctcacttgaggcatagatcatcaccaggtacctagaggcctcctctgggcttaccctggtctctttgcctcagaggttgtcactgatgtgaaagctgcccatcttgatcctgtagtcagccatragggcttgtggccttaaatgctgcctttttttcttgtctttgatgtttatgtaaatgatgtctttgtgtactttgggactttcttgctcaacactgttattgaaatttacctgtgtagtggcaggaagttgtacttcattctttttcactgctatgtgttgtgtctttggtataactgctacacaactgattgaggcaatggtactgctttgaacatcctcgtgcctattttctggtgcaaaagtgtgagagtttcaaggtgcctgggagtggggttgttgggtctgaaggtatgcacatttttaactttacaaggtgctgccaaattgtttccaaagtggtcacacccatttcccaagttccatagtgggtgccccacattatccccagtgcttgataattttgtacgcacccttttcaggttagaaaatctctctggggccgggcacggtggctcacttctgtaatcccagcactttgggaggccgagacgggtgtaggtcaggagatcgagaccatcctggctaacacggtgaaacctcgtctctactaaaaatacraaaaattagccgggcgyagtggtgggctcctgtagtcccagctactcgggaggctgaggcaggagatggcatgasaggcggagcttgcagtgagccgagatcgtgccactgcactccagcccrggcgactgagcaagactctgtctcaaaaaaaaaataagaaaatctctcacgtcaccctccagggtaatagctgtccattacttattccttagttggcaaagtctatagtaacaaggtgctgtggattcagtagcacctttccccccgttctagtgccactgcattatttatttatttatttatttatttatttatttatttctatttttttttttgagacaaagtctcgctctgtcacccaggctggagtgcagtggcgtgatctcagctcactgcaacctccacctcctgggttccagcaattctcctgcctcagcctcccaagtagctgggactacaggtgcacgccaccacgtccggctaatttttgtattttttttgtagagacggggtttcaccatattcaccaggctggtttcgaactcctgacctcgtgatctgcccgccttggcctcccaaagtgctgggattacaggcgcaagccactgcacccagccgccagtgcattttttaaaaaaacgtttttattttgaagtaattatagatccacaggaagtagggggcaatacacagggacatcctgtgtattcattacccagcatcctccatcttgcttaactatagtacaataacacagactgaaaattctcrgtgccacagccacagaggtccttcagacagcaccagttgtgcatgtagtgagtgtgaktgtgtgtgtgtgtgtgtgtgtgtgtttgtgtttgtgaatgcagtcttaccatgggtagctttgtggaaccaccaccacagtcaggacacagaattgctccttcactgcaaggcaccctcatgcttcctttcatagctacactgacatccttcccacccaatctgcaaccccttgtgtctttgtccactttgtgctrctgtaacacctgagactaggttgtttataaagaatagaagaaatttattctctaacagctctagaggctgtaagtccaaatcatggcaccagcatttggtctggtgagggccttcttgctgtgtcctcacatggcataaggcagaaggacaaaaaggaatgaactttccttcagaaggccaggaaagaggttaacccactcccacaagcctttttatagcgacatgaattcattcctgatggtggatccctcacaacctaaacactttcccaaagaccccaccacccaacactgttgcactggggaataagtttccaacacatgaattttggagggacaaaaacattcaagccacagcactggcaaccactgatctgtccyctgtctttctaattattatttcaagaatgtcatataaatggaatctatggtatataaccttttgagttttgtttaacctaccatgattcccctgagatccatccaggttgttttgtatattaatatgttattcctttttattgctgggcagtatcccatggtatagaggtaccagagtttatttgttgaaggacatttggatgatttccaggttggggctattatacataaaactcgctatgtacattcatgtataggtttttgtgtgaacagagttttaatttctctgggataattgcacttacaaatgcagttgttggtttgcatggtagttgcaratatactcttataagagactgtcaaactgttttccaaagtggctgtaccattttactagtaggacttttaaagtagcgtgtgtgtgtgtgtatgtattttttttgaggtatggtctgggtctgctgcccaggttggagtgcagtggcttgatcacagatcactgcaacttctacctcctggctaaagcaatcctcctgcctcagcctcccaagtagctaggactacaggtgcgtacctccatgcayggctaatttttgcttttctgtttttgtagagactgggtttcgtcatgttgctcaggctggtcttgaacccctgagctcaagcaatcctcccacctcagcctcccaaagtgctgggactacaggcatgagccaccacgcctggcctttatatgtatatttttgatcatagtaacatcagtrtgcaattaaagagtaataatatgtatgtaaaataaagacacgaatatttattcaactctagacaacgtttgatgccataatgggtttaaaataactctgggagcctgggaatctagtctctagattggaaaccactgaactgggtattttattattaaaaacaataatcattattattttttccattgtaataacatgtaaaaaaacatatttcccatatgctcagtggagaaaatttggraataaggaaagtagcaagaagaagtggggggaaagaggcacccataattctattacccagagtcaaaaacatcttttaacactttttctgtgcattaaaaacaaaaaaagaaaattatacctccatcatttctggtgtgacctgcattgtgacagcacaatgttggccagttatggtgcagaaaacagtgctacccctgggagcctggagtgtggtgggagatagctccaatagtggcaggtgctgtgcaggaagaggctcgtgtgaaagtactggagggctgccatggggcacggtgatggggacatggggccatgccgtctgcacaaggccaagtggaagagcagatttttcacggtaaatgtaggcagaccctttttttttcctggttgtctaacctattattgtagaagtgctcatatacattcttttccatctgtgctttggcaggatgacatcattgatgatgttgacagctttcttgctgcagcagagaccctgaaggaaagaggtgcatataagatctttgtgatggcaactcatggcttgttgtcttctgacgccccccggcggattgaagagtctgccattgatgaggtaacagggtctgggtgtgtgtgggtacagctgcctgggcttttggcacatcttgatctttagttacagagagtcaggacaagactgagatcttttgtggctgagaaacgattcaagggctgggtgcagtggttcacgcctgtaatcccagcactttgggaggccgaggcaggtggattacctgaggtcaggagttggagaccagcctggccaacagggtgaaaccccgtctctactaaaaatacaaaaattagccgggcgtggtggcacacacctgtaatcccagctacttgggaggctgaggcaagagaatcactggaacccagagggcagtggctgcagtgagccgagattgtgccactgcattccagcctgggtgacagaatgagactcttgtctcaaataataataataataataataataataataataatgtgtacaactcattggtttttagaatgttcagagttgtgcagtcattaccatagttggttttagaacattttcttcttcctagaaaggaaccccatacccattagctgtcacttcacattttctctcactgccattagtccctgggaaccactaatctgctttctgtctctctagatttgcctgttctggacatttcatataaatgagattatacaatgtgtggtcttttgtgtctggctgtcttcactcaacataatattttcaaggttcatccatgttggagcatgaatcaatacttcattttatgatcaaataatgctgtgttacatggatagtccacattttgtctctctcttygtatttcatgttgatagaaaaaattttttttctactttttaacttatgaatggtgctgcagtaaacatttgtgtacaagtttttgtgtggacatgtgttttctcttctcttggatacgtacctaggtttagaactgccaggtcatacagtaacttcatgtttaaactttcaaggagctgccagactgtttttcaaagcagctgcgccattttacattcccacagccgtgagttgggggggggctccagtttctctgcatccctccagtacttgttattatcttttttgccatacctatcctagtgggtgtgaggttatcaaatcttaacctaagaaacacaggctgggcgcggtggctcacgcctgtaatcccagcactttgggaggccgaggccggtggatcatgaggtcaggaggtcgagaccatcctggctaacgcggtgaaaccccgtctctactaaaaatacaaaaaaattacttgagcgtggtggcgggcgcctgtcgtcccagcttacttgggaggctgaagcaggagaatggcatgaacccaggaggcagagcttgcagtgagctgagatggcatcactgcactccaggctgagcgacagagcaagactccgtctaaaaataaataaataaataaataattgaaacattgacttgagacatagatccactgtgttttcctgtcgtggcaagcctcagatttgagaagctgtcacatttccagatcaaaccatgaagctayttggctttctgatgctgtggttttttttcttttgcttcacaggtggtggtcaccaatacaattccacatgaagtccagaagctccagtgccccaagattaaaactgtggatatcagcatgatcctttcagaggcgatccgtcggatccacaatggggagtccatgtcctaccttttcagaaacataggcttagatgactgagttttccttyaggaaaactcccgagggccaaactggaaacataagagtgactgctcggtgggatggatttcacaggaaccgtcatgcttgttcctccctctcccctgtaacctcacttcttattgwttcctaagaagatagaccaactttttatgtcggtttgggtgtttgtgagtttggggagcaatttttataaaagaaaaactttattctcctcttttgaaaaggtaagacctcgttttagttktaactgtttaaaaaataacacttggaataagatttgtaagctcacaaagccttcttccaaagttgcttgagccaagtgcttaaaaagttaataaaataaaatgatctgtatgatacctgcaattgaaaagccgaaaagattatactgtcaagtccagtaaatgacatttttagagatgcttttgtagacaagcatatggaatatgtgattgtatttattttctgcaactaaaaaaggaataaaaacttgtgtttgtgtgtttttctaaaactttgtgttttggcaatcgttttrtaactaaaataaaatgaaagctaaatctacacgctgtgaatgttgaaatgttcatcagcttgttttctcttctgcagctttgtgggggatgcagtagcctctcagagatgtgatatcctctgttctgacaatttgtccaaggccctgaaagttcccgatgtgtagtcatttgattgaggagggggaggagctggaatctcagcatgcaaggccacaggcagcagagaagccagtggtcaccatctgccattggtcttggtgtggctttgcctctcttccgtggctggctgttctccatcatgctctagggagatgagatgctgggggatgcatcccaaagggcaagtgacatgacccttgttgctgtcaagggtctaatatcatctgtcttttttttttttttttttttttttttgagacggagtctcgctctgtcgcccaggctggagtgcagtggcaggatctcggctcactgcaagctccgcctcccgggttcacgccattctcctgcctcagcctcccaagtagctgggactacaggcgcccgccactacgcccggctaattttttgtatttttagtagagacggggtttcaccgttttagccgggatggtctcgatctcctgacctcgtgatccgcccgcctcggcctcccaaagtgctgggattacaggcgtgagccacygcgcccggcctcatctgtctttagagtttaggaccctgagcttccccagagtccattggagtggcctcccctggagcactggcactggggtttacacacccctgtcctcccactcagcctgacttatggaggaatatgtagacttgctcataaaaactaatttttcttcctccccaaacaccttaaacctttgctttctgcttgtctgtgttagaatctggaataaaatagtttatttagcacaaaattaggatcagtcaccagccacgctggccttctctgtgctccacagagagcagcgtggcccgagggcttgccccagtaggccagggccttgtttgtgcagaagcaccaagggctctgcttctggaagctgcccaagtgttccgtgggctcttgcacactcagcagtgccacccctcacacctagtttacttgaggaaacagctttgagggaaaggtgttcattctctccccaagtttccaaatccagttaatgatagagctatttactttgaagaagtgtccttgctttctgtgaacctgtccctagaaatggggcctctcgatcttcggaatgaattggcttagggcatgggatggtagctggtggcttctttgccagtgcagctctgtcagttgcaggctggagaccacccagtttccacatttggaagaagagctttgggagcaaggtgtcaccacccatgagagtggagcctgcctgtggtgccaggacctcccactgttgctgtgaaatgagctgaagaggcttcagtaaatctcacagctccagcctctgatgggtttgggttttttcttaccttctgccgtttggatgctgcctaaccatttgctactatagatgacggttgaagttgccatgtggtttggctttataacaagtgacaggcacttcctgaacagccatggggcatyccctggggtggctgtgctggcacagtggccctcccatggtttgggaatggtggtgctgcactagcacggaggacaggttctgctctgggttccttggagatgcagtgggctctcaagctccttcagtgggaggtttcctcctgccactgtgtccagtgagctttgacctctggtttttcttggcatgtcatccttcatgaagaaaagtcatatttacagaagtgaatggaaacatgttttatgggagtgttttcctctgggtaatgaacttggctaaagctaggatccttcacacccacagagactcgaaggtctgccctgagttggctctggaagaacatgaagatgagtgctgggaggagccacgggtggggcatgtgccaggggatggctgacagggctgaggcccaggaaagacaactggcagatgatggtggaggagagtggagtgccacgtcctggcccgccgggctggggcaggaggatggaagccttcaaggggcaagtcaggttctgtggtgtggtggggagtgctgggggactctcagggcttcaggagtgcccagtaaggacacccaaacccctcagccatcctcttccctgtctagaggaggccccagatacagtttctccgtgtgttgtaggcttttctttggccagagaagccatttaccctctagactactgtctttgctagagacagagacaatctctgtggccagagataatggggaagtgaacccagaaattctatgacagaaaacaggctgatcgtttccagttctgactgtgacgtcatcacttgacagactcgtggttaaagcaatgctctcgaggcatcaagaacacaggatgccactaaagggcatgagtggatggacacataccagttccaccacactgtgtgccagggacattaatcttttggctctcactgtttattacctctaaggctgaggagggaggatcgcttgaacctgggagatggaggttgcagtgagccgagatcgtgccactgcactccaacctgggcaacagagcaagaccccatctcaaaaaaaagttgtagaattcaacacctacttttaacagatcaaccagacaaaagatcaataaggaaagagatcacaccgctgtactccatgctggtgacagagtgagactctatctcaagaaaaaaaagtctgaaatgctaaattttatgttgtatgtattgtgtactttataaaacattgttggaagaaattaaagaagagctaaataggaagacatcccacgatcacaggttggaagtcttaatatcgttaagatgcaatactccaaagcaacctacagattcagtgtgaatatctatcaaaatcccaatggcattttttagcagctatagaaaagcccatcctaaaattcatatgcaatcaccaagggcctcaaatagccaaatcagtcttgaaaaagaacaaagtttgaggacttgcacttcttgatttcagaacttaactacaaagctataccaatcaaaaacagtgtagttctggcataaggagaggcatataagccaatgaagtagaatcaagagttcagaaataaatactatagtcaattgattttcaacaaaggtgccaagatctcagcaggaaaaagaacggtgattttggggggttctttttcattttttgttttgttttgagacagagtctcactctgttgcccaggctgtagtgcagtggcgcgatcttgactcactggcactatctcggctcactgcaacctctgcctcccgggttcaagcaattcttgtacctcagccttccgagtagctgggactacaggcatgcaccaccacgcctggctaatttttgtatttttagtaaagacggggttttgccatgttggccaggctggtctcgaaatcctgacctcaagtgatccaccccgctcagcctcccaaagtgcaggaattacaggtgtgagccactgcatccagccaagaatggtgtttttaacaaatggtactaggacaactaaaaatccatacacaaagaatgaagggctaaaactataaaacttttagaataaaacacagggataaatcttcatgaccttcgggttggcaaaggattcttagatatgacaccaaaagcacaagcaacaaaataaataatagataactggatttcatcaaattaaaacttttgggcaccaaaggacactatcaagatagtgtaaagacaatctaaaagtagaagaaaatattttcaaattatatatctgataaaggtcttattcaggatatataaatgtacaattctacaacaaacagataaaaaaccaatttattttttgagacaagttttggctctgtcacccaggctggagtgcagtggcatgatctaagttcactgcagtctcgacctcctgggttcaagcaatcctcttacctcagcgtcctgaggagctgggactacaggcatgtgccaccatgcccagctaattttttgtattttttgtagtaatggggtttcaccatgttgcccaggctggtcttgaactcatgagctcaagcaatctgcccacttcagcttcccaaagtgctgggattacaggtgtaagccactgcacctggccaaaaaaaaaatacatatatatatatatgtttgttttttttttgagacagagtctcgctctgttgcccaggctggagtgcattggcgtgatcttggctcactgcaacctctgcctcctgggttcaagcgattctgctgcctcagccccctgagtagctaggattacaggcatgcactaccacgcccagccaatttttgtatttttagtagagacggggtttcaccatgttggtcaggctggtctcgaactcctgaccttgtgatctgcctgcctcggcctcccaaagtgctgggattacaggagtgagccaccgcgcctggcccaaaaacatgttttaaatgggatttgaataggcattcccacaaagaaagatatacaaaaagatatacaggcttggcatggtggctcatgcctgtaatcccagcattttgagaggctatgggtgaatcacttgatgcccagaattcgagaccaacctggccaacgtggaaaagcccggtctctactaaaaatacaaaaattagccaagcatggtggtgcacgcctgtaattcaagctactcaatggctgagacacaagaatcgcttgaacccaggaggcagaggttgtagtgagccgagattatgccaagacacgacaacagagtgagactcagtctcaaaaaaaaaaaaaaaaaaaaaagaacaaaaagatatacaggcattcatacaaaaaatatatctaaatggaaagatgctcaacatcattagtcattatagatagtacaaacaaaaaccacaatgagttacaacttcatacccatttgaatggttatgctacaaaacaaacaaaaccagaaataacaagtgttggcaccacttgcagtgttgcacacctgtagtcccaactactcaggaggctgaggtgggaggattacttgagcccaggagtctgagaccagcctgggcaacatagtgagaccctgccttgtaaaacaaacaaacaaacaaaaacaagtattggcaagaatatggaaaaattggagccttcgtacatacactgctggtggaaaggtaaaatgatgcagctgctgtggaaaacagtctggcggttcctcaaaaagttaaacataaaattaccagatgacccagcaattctgctcctgggtatattccaaaaaaaattacaaacagatacccaaataagtacatggacatacatgttcagatgcactattcacaatcaccaaattgtggaatctcaaatgtccatcaatggatgaataaacaaatcttagtatttaatgcctgtaatcctagtactttgagaggccaacacgggcagatcacttgaggtcaggagtttgaaaccagcctagacaacatggttgaaacctcatctctaccaaaaaaaaaaaaaaaaaattagccaggtgtggtggcaccaacctgtagttccagctacttgggaggctgaaatgggagaatcacttgaacctgggaggcggaggttgcagtgagccaagatagcaccactgcactccagcctgagcaacagagtgagaccctgtctcaaaaaaacaaaacaaaacaaaacaaaaaacagtatttacatagaataaaaaggaatagattactgtatgagttacaacgtgcacaagcttctaaaacattatgctaagtgaaattaacctgacacagaaggtcacatattgtgtgattccatttatataaaatatccagaatagccaaatccataaaaacagaaagcatatatgtagttatcaggggatgagtagatagatatgtagctgatg

SEQ ID NO: 95491 - DNA, 24083 bp, Homo sapiens
aggccatctcactgatacttaaggcagacctcagtgtcttttggatgacatgtcatgtgaccctgaagggatgggatgatcagcctcctgttggcttttgaatcacagggacattttgctcaggttggcttcctttacaaagcgaaatccaaagcctctgaggaactcagggagtttccacattcatgaggatgttcacagaatcctaggtcatgggctatgtgaaaggaaccctccctcgcttttttttaaagtgttctgttgcccaggttggagtgcagtggtgcaatccatagctcactgtaatctcgaattcctgggctcaagtgatccttctgcctcagcctcctgagtagttgggactatgggcaccaaccactgcacccggcatttctcttgctttgggcagaggctcgtagttgagaagaaagaattgttgaaagaatggagcagaactgctgaaaacggggcagggcatctcaggaggctttttttttttttttttttgagacagagtctcgctctgtcacccaggctggagtgcaatggcgcgatctcggctcactgcaacctctgccttctgggttcaagtgattctcctgcctcagcctcctgagtagctgggattacaggcacccgccaccacgcccagctagtttttgtatttttagtggagacgaggtttcaccaagttggtcaggctggtctcgaactcctgaccttgtgatccacccacctcagcctcccaaagtgctgggattacaggcatgagtcaccacgcccggccttgggaggatttttatagcagtttgaccattgttgcacagcttcttaggaagcaagcatcttaccctgtcagatggcaccctgttcatttccagctaccatgggcagccaattccagagcaggatggaaggctggtggcctctggctaagacttgctaacctggggacagggtaagttgaccaactcatcagggtttgcctgggactttgctggttttagcactgaaagtcacatgtctcaagaaccccctcaatcctgggcagaccaggacaggtggtcacctaatacaagctgtggtgcagtctgcctggaagcacagagggaacaatgtcctggcttcacagtgagacctgggcaggttactccctctgcctataaaatgggggcaggaatatacaatgcttttctctcagacttgatagcagagctgaggccagactcccttagttctttgttttgcccagaatagtcccacatagggaagaatctgccacatccattgtggactttttggtgtattttcagaaggtgtgtggtgactgaaacccatctccaacatcacatctttctgcagagtagtttggtgctgtttgaaatggtggattttccaagtaacagaaacagtgggcctgggtagattagggagcttggcttcagaggccagggtgcatacttgggtgaggaagtaaatctgtaacccaggagccaccctgacaggtgctcagccagaggaaggctgtcctgagaggcagaaatggccatgtcccctcaccctcctctgctcagctgcctttggctcagctgctgttaggggagcagcaggagacagctgcaccttgggggctgaatgaagcctggaggagggggacagaatgtgaggcagttcctgagggaagctcaggctgacactgtgggtgtcgcttccttggcacacccactgccggcaaagtcatctagttccagaggtctccacagtggctgtttctgggaatttgggtcggtaggtctgagaccaagcaccagctttctagagatggtgtctagctggagaagctgactccacaggtggtggcggcttggtcattccaatgtcaatttaatctaaggcattactctggtattctctgtcctcccatctctctacacctattacacatgcacactccaaatcctttggagggaaggcatttgaaatagtcacagttgacagttactggtttgatgttgataattttcttattaatggagataatagctaccattcatttagtgatcatgttaagtgcattagtgggttttcatagtaacctatgagtggatttattctccctatttcacagatgaagaaattgaggctcagagtttgttcatcaaagctggaagcattttaaggagcagtctgtcccagggagtcaactatatggtatagaaacccttcttctatagccacgtctccctggaaaatacttctcaatatttcagcagcacctttagatatcaagaattgtgaagggaaaggttttagtgagagtaacatctgtgtctttgtatgtgaaccacggggctgggaggtgggtgtgagcttgtgagcagccaggatgaagggcaagtgaagggtcaatgaagcgcagagcctcaaggcttgtctgggctctaaaatcagaatggaaaactaatcaatgagtccttttagtcaatccatattgatcagccatctcctgggggcagaggcctggacacccagaaaaacatcacatcacatgtttgctgatttgaagtgagcagaggttaaaagaaaagacatastccctgcccttgaggagcttgtggtgaatttggtagagaaaagtatacagatgggtcacttgaaagggtgtggacatcaaaggacaaagcaaagtccaatgaaatgagtcagcaaagcttccagcatggaggcatatggagggtaaaagccagggaaagacagattttggctcagtatagtgaagactttggtaacttggcagcccaaaggttgaagggcagttgttagaatcagtgaatttttggccatcggaggtatgtattcgagcagaggctgggaaggcaggggagccttcagacatctggtgagtagtcacattaggaggtttgtaagtcctttccaaccctgagctcctatggccctgccctgttcacggagggtgttggaaggactgtctgccctatcagagtggctggcttctagcaccctgccagctctggaactgcccctctttgcagccattcagcaggtgccaggaaacacagtgttccccagccttgccacccacaccttatgcctgcccccaggatcatgggacacatggcagcagctgggggaagatttgggcttaatgtattttggtttattgcctttgtccaccacagaccttgttggacagacttgctgaggtttccttgaaagacacaacccagtgatagcctttggtccaaggactctctgactgtatcgtcagtgactcatctatctcactggggaagggatgtacaattagttcttgcgccactttagggaaacttagctactgaaaggcagaagtggccattgctagtcatgcagatctgaaatcctgatttcctgtggtaattgctctttattatcggctttgaacctgggccctgggatggcccacatgcagcctccttgcttaggtcctgtgccatacaacctgcacctatgggtgggcaggaaagacctagtggagggggccaggacatatcatgttggcctgacctaagcaacggagcccaagacagcaggctagagctatggtggctgagctgagtttcccagctagacactcccctagacacttggctcagataccatgccctagcagtgcctggggagttgtactgtagtcaaggccatcaatgcctggtgggatgttgaattttgagggagaactagcgctccaagagttaagccatgctgaagcagagttggccaggccacctgctggctggagatgaggaagagcactcggtaaatcgccagtgactgacgcaagggctgctgtatcttggccctgcaggtattagaccctgcctccatcacacagaatgtaagagctagacttgggagaagtccagtcttctctttcagtgggggaaacagaggcccagagagggcaagggactttcaggcagtgagataatagccaagttggcatgggacttgtgcccaggccaagttctctcagagctctccgaatgctgcagtaggttagcatgcagggcttgtgcaggtgggatggctcaaagtcagtcttcagcttttatttcacccagcatgcctcatgttaggcctgtggtacagtgattagaaagagattagaccccaatattcttggcttagagctaagttccgtggtcccaggacttgcttggggcctcactttcctcaaggcaagctggtaccaacctgctgcctgggcagcaggtgccagagaagagctgggattccagccacagctgaggatgagctggttgggctgccttttgaaatgtgtctgtgtccacacttggaattcagctgaggccacggggaggggcatgttataatagaggaaaacaagggtttctgctggggcctgtcttccctgatgtaggctttctccttaccctaggccacaggactctggaagcacgcaagaggtattcttagagtgcatacatgagtattggaggcccagggctttgaacagtggggctttgtatagtccaagcttgacatttggggctgatggtagcagcagctgctgcttctgcagacttccaactgccattggtttctctctttatgtctttgttttcctgagtacagcttccgatcccctgatctaccccaggtcttttccgggagcctctctgtacctttagaggttccctttcagggaacccaagctgctgcccccatcctacacgtcctcccccttcactcagatcctgggccctctcctgaatcactgcatgtccaacctttctccagcacctcctgctgctgccttgttctcttatcttcctccaaggcctatagtagcatacagcatatcctccttcccccactgcatccacttttagaaggccagagctgtaaggaagcttagaaatcatctagtttaatcccctcattttcaggtatggaaattgagaccctgacaggtgaagtaagttgctcaaggccacccagctaggaaggtttctcctcaaccggctggctcatgaacaccctgccatcttccagtccaccagtgccaaacagccaataacatctccagtagcagccccattgtttttctcagcctgatcttacctgctgccccaggccctcttccctcccctggctgagttctgactggtcccaaccagtgctactggttcacaggtcagactgaaatacagcaggcaggcctctggcacttctaccaacagagagggccgtgcctgtgggtctcagttttgtccagagtgtattcaggcagaagccagtcagcctgccattgagagaggggtcttgcgggtcaggaagggacatgcttctggaaacttccacaggagcctgaccagctcagaccctacttagctcagggaatccctcaccaacaccccactcaccaagcatctgccttcccctagctgctgctctgacctttctgagcctctaatgcctctaaagcttctggggcatctgtcccctcggcatctcacctgcttgtcagaggaagagtggcccagctgggcctgggtcacgcctgggttggcctctcctgaggccctccccactgtcctcagccacaggcaaggctacaccgccctgttaaagccactcagcctctcccttctatccttccagcagatgatccctggataatttgtgcagcaaatcctctttaatctgtaatctggggtactgcatgaagggaacctgcctctaacctgccccttcacagctcgggtggaggtggagaatatctgacattcccctttaggaggtgtagtgatcagtaacttgggcatcagccggattcactttgtgaaaaccttgttgaatccctgcggtaactaatggtttctctccaactcatgcagcaactccccctcccttccaaaggcgtctccttctggggatgtcaggtgggccgttcctttttctttgggaactggctcaagcccccgcggtgcttctggagctgagtaaaaaagagccaggtgtccagtgcagcccggggacgaggagctgaggctccccgctctgtcctgggtgactctgcatactctgcgcatccgggggtcgcgggctgcgaggccggcccccagctgggcaccccgacccacttcgcgccggcaccgctagcagctgaggtacaggccccgccccggggccgactcgctccgcccccgccgccgggcccctcccgcagcggtccgcactcggggaggcgggagggtgacggcggtgctgcgaggtcggcgcgcagctccgccgcgggtcgctcgggcgctgtccaggcggagccggccccgcccgggctgcagccatggtaaggcaggcaggcaggcgggcgggcgcggggcagggctggggtgcgcagggccggtcgctcccgggcggctgcaaggggacccgcggcaccgcagccgcggctgtgcagggtgggaggcgccgtcgccggccccgggcacaggctggcactgctgccgggcggcggtgcgtcgctgctcccaagtttttccctctgagcagccacggagtgggcgccaacccctgggtgatgcctgcgctctaggacgaaggggtgggtccgtgctgagggaggtgcccgctggtggagacgcgcttgttgggctggggaaggcgcatcagtaataagcggaggtgagggtccccatcctcgcctgggtcagcttttacctgagtaacccctcctcacccacctaccctgggcacaggggccagtaccaacttcatttggaaaacgcagaggaggcccacaaacactgcctgcctcaccaggagggatggtaagacgcttggcccctccttccctcagcctgacaaggggcagtccctggccctttcccaaagggaccccagagagggggaggcccagcccaccatcctgcccggtgggattagctatatccttctgcccctgggacaggaaccatgggaaagcttcctcctgctgcatctacccgctccctccccaccagccaggtccctctgcagtgtgtgggggtgggggcacccatccctgccacctgcctgtagtgggaagagaaacagtaaccccagccagcctccctggaggtgcccaggtaggaagtttttgatgcttggctctgaagatgtaatctcttctcctgacattgttgccagagcctgccacaaataacrtaagggtgtcaggacctctaggccacacaccgtcctctcctctcagtctggaagccccacagcctttgccctctgcattgggggacacaaactgtttacagcagggggggatcactgaccagcctgtggggcgggatgttggctgtgggcagcctccagaagggagctccctgggccccctgggatcagaagctttcaggtttggtagggccaaccttttgggctcttgtctctcaagctgtgtccaggcagaggcccaagccttggccaggaagtcttggtgaccctgtgaccttcccccaacgggggttcctgagagaggcctgtccttattcctttcccccacttctccccacatggtggatggatggactgattgttctagggatggaagcctagggaagcactgattgtccccagtgccaagcccagcaggkgctagaggggctttttctgccacacactaacttcagttcagctgaggtcttggtgctttcggcttgtcygaggccacactgttcttctctaattaaagacacacccccctccaccccaaccaccatcaccaaagtccccatcctcaggcccctgccctcaagccagccaagttcttaggctgactggttcagatcagactcctctatgagggtctctttgtcaaaggaggtcagtgtcctagctgctttgggaatcagtgggggagacccccccaacccagstatgccagggggtttaaatttacatgtgaaaagaatgacaggccaacattaatgaccatcctgtgacttgggatgcaccttctcttctcaggttcaaagcagcttaaggtatctatcatctgggagtgctttctctccccagcctcgctgggaggcaaggaagggccattcacaactgaacattaaggtcctcaaattaagacactatccagactcacaaaagatgtttccacccaaccagaaacagtggacccctgacccctagttgagtgcacacttccaaccaggccccttaatttatctcccacctaaatggcagctctgaagcttctgggctgccagcctcccattgccttgaacccgtgctcctcagagaccaagtgctaacagctcccctgttgacactatggaagccatggagtgatctaattgatacaggttgctataagtcagaggtcaggtgtcctagggtaaggggagtccctggagcaaagtcttctctgtggctgatgctccctgcagggaaatttaggagcagatttctgaaacagtgacgttcctcacaggaaaaaaaaaaaaaacaaatgaacacttgggaagaagtgtgggaccattcccacraaaacctatatgggggagtataggacatctcacctactccagcactgcttaaagttaaggtgaaagagagactgggggattgaaatcctttgggaatgggtatcctaggtggctgtcctcatgtgctgatgggccaggtcacttggggatagctcatagtcctcatacaggccacagtgtccttgggggttaacaggagaggtcaaatrgatcaaaagcctggctgcaaacagacattgggaggttggtgctgtgcccaccagggtaggcagcaggcaggcgtcatgggacagccaatcagaggaggaggggactgcagaggaaccaagtgatcctgctgcagctgagctgtccttggagggtgggagccaagggaaggggaggagaagaggggtggggaaggacattccacaggcttttttggcccctgccagagacagaagggggtcaaagagaaagggaaaggagcaagccaggaagccagacaacaacagcatcaaaacaaggctgtttctgtgtgtgaggaactttgcctgggagataaaattagacctagagctttctgacagggagtctgaagcgtgggacatggaccgttcactgggatggcaagggaattctgtccctgaggacaggactgaagctggggtaaggtgctgctctgggagatgggtggacgtgacctgtcttccccctgccttggctgggattggggctcaaagtcagaaaatgatttggtcactggcagagctgggagtggggatggacaggcaggaggtgaggaycctggtgtcctgactccttgtctagagcccctgtggccccctccatgcggatgagcagccagggctggcagagatgaggatggtgctgggttcccggaggctctgctggaagatcatgggggctagggatcttcattagggccttcctttctcccttccctgcccctccactcagtgctcctgggaaaccaggtgaagcacagctttctctctcccacccttgtcctgacccccagaccaacggctgggtcattgtggatttgtgcagagaggcaggatttcctggaattccccagacttattagctgccagacaacacgtcgtgctgcccccagtcccaccccttctctgttgccatgtaattaattgtctaagctgggacacttttgagagtgaaagggcacaattaatcatgatgccaggacagcaggcatagactgggatgtatggtcaccactggacctcacaaatgtcataggtgagaaaagccttgggttaggcttgcctcaggatagcctcttctggtcacccagcctccatctgctggttctagttttgggctaaggggcctcttttcctcccctctgtccaggcgagcactggagactatggctataagcaggtgtgaagacttcagaggcaacagcctggcagtagctcctagcagacttttccctctaacctccctatctcaacctcttccctctggcatacacctggcagtatgcatatctgcctccctcaattcttccctttgcaggaagactgtggctatcttatcttcctcactctagctgggactccacagtggtctggggtagtccccactggcttggctaaccctcagagagtgagtcagcctctgcagccggcccttgtccattgtctgggggtggcacgtgggtattgtgaggcagagctgagcccagcactgccaggcaccccacgaaggaggctgacccccaaaggagaggagaayctttagggtctagagctgacaatgagagttgggggaaacagttcctcttctgagctgaggatggggtagaacaggcttctacagaggagtcagtccattctctgccttccactccctgtgggtcatggttcaggccaggccctctcgtgcactgccggctctgggcagagggggtaaggagacaactcagggtgcttccccttatatgtccctcacagttgggggctgtcagaagctctggaggcccagcctttcccaggctcttccatcctccctcacctggtctctcccagctgcctcccacccacagtcagcatccactggcgggtttactcttctctcccagggcccagggtcagatttgggtgtggctcagtgtctggagtaaggggtaggatcaactatactgagcgctgggcagtgaaccctgggaattgagcaccagcagtagaatctgtaccccagtcccccagctcaccagtagtgacaggaggtacagaaccccctgctggttgacctgcctgatgcagtcagctttcttctcccmtrcctacttccctcatgtccctgccccattctgatgcactgtactctccttttgggtttaatgcctctgtctgctctatcttaatcagtctggccttacttcctggcctgagacagtccctggctaggccagaaccccaggaaaggcagcctcaaaaaacatgctgctgagaaggagaccagaactggagttccttagttcccaagagcagttgccagggctctgggggtgcccagggctcttcctggaccctgggacccttcctggcatattggattggggaggcttgtgagcaggtgagggagggatggtgagcacttcctctgtctyggctgcagtttctttttcttctaaccacaagtgctttccctttccctcttgccttctcctgtcttctgtctccttcctcattcttcccttccggctcccttcccggcaccacccatctattctacccaccccgcttcccccagatcaagcgtttcctggaggacaccacggatgatggagaactgagcaagttcgtgaaggatttctcaggaaatgcgagctgccacccaccagaggctaagacctgggcatccaggccccaagtcccggagccaaggccccaggccccggacctctatgatgatgacctggagttcagacccccctcgcggccccagtcctctgacaaccagcagtacttctgtgccccagcccctctcagcccatctgccaggccccgcagcccatggggcaagcttgatccctatgattcctctgaggtagagcctccagccctgcctttgcctttcagtgggctgctgcaggaagaccgggggcagggagyagagtgtgtgtgtgtgtgtgtgtgtgtgtgtgtgtgtgtgtgtttgtgtgtgtgtgtatctgggacctatttcagtcctgtgtcagccctagctccaagatatctgcccccaagggcactggaaatttgcagtttcagcaagggcaggaggcccagctggtggcctcagatgggaactcacagaagtctggcactgcttttttaaggctggggcaaaggcctgaaagggagagaagattggcgctgggtgccggggcccctttggctcctcaccgtgatgcattctgccttcctgtctactaggatgacaaggagtatgtgggctttgcaaccctccccaaccaagtccaccgaaagtccgtgaagaaaggctttgactttaccctcatggtggcaggtaaaaaaggggcagggctgggttgggcagggtgtgtttcaggtggggatggtgtgtgtgtccgtgagtgggaagggagtataggtcgcagggagcaagcagcgagtggctgtactgttttgcaaaacagccaggagtcattggcctgtgagagtgtatgtatgtggggtggggtgggggtgggggttcgaattggttgcaaagagcatctgaccaacagtttcctagcatttgcctctttttgtgtgaccctgggcaatctcttgctcccccaagccaatctctgtgcttcctcccagctctaaaatgctatagtttggttagtctagttccaattagataagaaagcagtcccccctaaaccttgatccagtggagttgctttttggctatagatcttaccttctgatttggtgcctctgtcctctctcctctcaggagagtctggcctgggcaaatccacacttgtcaatagcctcttcctcactgatctgtaccgggaccggaaacttcttggtgctgaaggtaaggaaaggagaggacaatcaggcagacttgccttgggaaattaaactcactccagagtctgggggatggggctctcccccacatgcaggaaaccatggcctcctagagagactgacagcagctctccataggcctaactgcctggcagcccaccagccagctccctaaagatttgggtgctgaagcagggcagagaccagagtcttgctctctgaatgagtctctgacccccaaggattccaggaatccaagaaaaaaaccgggagcagagaagaggctggggccagagccaacagccaccggcatttcctgtgttgggaaatgtactccttgctggttcccagagaacagtcccccagacagcttgggagtggagaagggggcagtgtggattaggcagtctgagcaacaaggctggttggggtgggcggttcatcctgactgggcaggtccctgcccttgccctggcctcagtttcccctttctccagagaggatcatgcaaactgtggagatcactaagcatgcagtggacatagaagagaagggtgtgaggctgcggctcaccattgtggacacaccaggttttggggatgcagtcaacaacacagagtggtatgtctgagtaagcacaatcccagctgcccctgagccacccttctccatacacaggtacacacgtaggcccagatatatccatacttatcaggaggaagcggtctatgaccttgagcatgtgacttcccttactggacagccatctcctcctttataaagtaagagggaaaggattggaatagatgatttttaatgttccttccaattctgccctatgattctataatggggtagggacataagaaagaagaggctgaggcggaagtatcacttgaggccaggagttcaaggccagcctgggcaacatagtaagatcccatctctacaaaaagttttaaaaattagctgggcatggtggcataggcctgtagtctcagctactggggagggtgaggcaggagaatcacttgagctcaggaggttgaggctgcagtgagccatgattgcactactgcactatagcctagaagacaaagcgaaaccttccaaaaaaaaaaaaaaaaagataagaaagaagagccttaaaaacaaacacatgtgaagtgtgaaaacatgtagcacagagttgattacatagtagatgccgaataaactgtcaccctttttcctttcactagcaacattttaggtgccgcacacaatcttgttgaagggctgggcatgtatggagggagggtaaaggtgaggaagaataggcaaaagggaaaaatggtggaactttgtttaaactccaggcaccctctaggctacctgccgaaagaaaagctggatttaccacaaccccctatcattcgggcttttttatttttcaggcactggagggacccccctccagctaatggtcagtaggtctgaccgttacctccagcttaggtaatggtcagacctaagtgagtagatgaagagggaaatggatgagattgacaggagaaaaggtggtagctttgatgaagaagttaggcaggcagtgctaagagccctagacagagagttcaaatcttgattggcatttagtaacttcatgatcttgagcaaatgatctccttcaatcaatttacctactgtctcttaccttccataatactaataatttcatttgccaggcacctcacagtttaaagtgtacctccatatatattcattttgtcagacacttatttaattaaaatataccagcccttaccacctctccaattgatttgaacatcacccaacatgatgcatgcgcactgaaaagtgtaaagggctatttacagcatactcaggaattttaacaatggtaattgcaggaccagcaacataatttgttgggcccagtgcaaatgaaaatgtagggccccgtgttcaaaatttttaagaatttcaacatggcaacggcagagcatcaaatcagctagaatgtgagcacatactagatgtccagcctgtggtggacattttaagggattcagaacaagcatgaatgattcctatccctgagaggcttatagtcaagtggcaacagggaagcaggggaggtgggggcagttctctaacatgtttcaatcagatagcaacttaaattagtaaatgggtcaggcaatgtgtagtggcaagtgcactgagctgtaggggttcaggtgggtagagaatttactagctaaatgacctacagaaagtccttttcctttccctctccttcctccttkcttttttttttttttttgagactggttctcactctgttgcccaggctagagtgcagtggcctgatcaaccacctcccggggctccccsggctcaggttatcttcccacctcaacctcccaagtagctggtactacaggtgtatgccaccacaccaagctaacttttttgtattttttgtagagatgggggtctcgctatgttgcccagtctggtcttgaactcctgggctcaagtgatcagcctaccttggcctcctaaagtgctaggattacaggcgtgaactaccacacctggcctggagcaaatctgttagctgctctggatttagtttcttcatgtatgaaatgagagtgatgatgatcataatgcataatgtccacctgtcagggcagtgaggattaaacaagataatagaagagcaaaggatatgaaaattgaggttcttggggaaatttatttatttatttgttttgctttgtagtgaagagaaggggagagcagtgtgtattggtatagtcaaaggagacttcgtggaagagatggttcttagggccttgaaggatggagtgggtttggagaggtagaggaaagggtagaaacacatgagcaaagaggctctgaggttacactggaaacctgacttagggtttccctggcttccagttggtatttgcctgcagccaccttgctattctttttttcttcttcttcttctttttttttttttttttgtgacagtctggctccatcacccaggctggagtggtatgatcttggctcactgcaacctctgcctcctgggttcaagtgattctcctgcctcggactcctgagtagctgggactactcaggtgcacaccaccacgcccagctaatttttgtatttttagtggagacagggtttcaccatgttggtcagggtggtctcaaactcctgaccttaagtgatccacccgcctcggcctcccaaagtgttgggattacaggggtaagccaccgtgcccagcctattcttactgctttgtttgatcacctgggccctttccctctcatcaagctagtatttattaaacttgcctgagtactcagtctaattttgtatcaggacatgtgagatacaccccaccccattcaggaatttctctaaagatttagtaaagcaagccagggaataacagtgtcttaaaaacactgctcagggagtgggctacttctctgtagtcccagagctcactaggtggctcccactctcacagtttctctgcttgtctgtccctgccccagctggaagcctgtggcagaatacattgatcagcagtttgagcagtatttccgagacgagagtggcctgaaccgaaagaacatccaagacaacagggtgcactgctgcctgtacttcatctcacccttcggccatgggtatggtccaagcctgaggctcctggcaccaccgggtgctgtcaagggaacaggccaagagcaccaggggcagggctgccactagcaggtggtcacaggttcctgttccccaggctccggccattggatgttgaattcatgaaggccctgcatcagcgggtcaacatcgtgcctatcctggctaaggcagacacactgacacctcccgaagtggaccacaagaaacgcaaagtgagggaagctggtggtgggaggggatcaggtgggcttctagaaaggatgtggtccccagaactgtgggcccctcatctgtttgtcagatccgggaggagattgwgcattttggaatcaagatctatcaattcccagactgtgactctgatgaggatgaggacttcaaattgcaggaccaagccctaaaggtggggccactctagggcatcccattcctatcttatttcttccgggtagaaaaagggagtagaattctatattcaggctatcagggtgggaaaggaccctggcttcctagaatgaagcagagaagatgacgatacaggtggaaagaaagaggtgagaacagagggtgctgacaggcacccctaacctcttccaggaaagcatcccatttgcagtaattggcagcaacactgtagtagaggccagagggcgrcgagttcggggtcgactctacccctggggcatcgtggaaggtaaagcactgagcctgtgaccagggtatctccttgccctcagtggctctcccctacctatgcctctggctgacccctagccttgctatgcagtggaaaacccagggcactgcgactttgtgaagctgaggacaatgctggtacgtacccacatgcaggacctgaaggatgtgacrcgggagacacattatgagaactaccgggcacagtgcatccagagcatgacccgcctggtggtgaaggaacggaatcgcaagtatgaccagaagccaggacaaagctggcagggggagatcccaagcctagccttgggtgagaccaagccctacttttgttcttctataggccctgggctcaatctaagcgggtgctggggtcctcctcgccttatcaacccttttctccctttagcaaactgactcgggaaagtggtaccgacttccccatccctgctgtcccaccagggacagatccagaaactgagaagcttatccgagagaaagatgaggaggtgagagcagtatggggtataggggaggtctcctgtttgatcaccaacgttggtatctctttgtttggtaatagaaagatccctggctctggtgcatatttgggtcctggataggtcaataggtggttctgtccagagtctccatcacacctcacggctaccaaggttctggcttaagggattagaaatttggggcactttcccaatactaaaggactctccaaaagtccccattttgatgcctgtgcctattccagctgcggcggatgcaggagatgctacacaaaatacaaaaacagatgaaggagaactattaactggctttcagccctggatatttaaatctcctcctcttcttcctgtccatgccggcccctcccagcaccagctctgctcaggccccttcagctactgccacttcgccttacatccctgctgactgcccagagactcagaggaaataaagtttaataaatctgtaggtggcttctggtgtccctgtgtgtatttttatgacctggagatcaagatcctgggacccagttttgaaaggctaatggtagaagatgttggtttctggcttttagtagggaagggagagtggggaaaactttccacttcctttccccttctaagtccctgcttagaatccagcctggcttctccatcttgacgatcatatctatcatgcctctgttatctggggtctgggtctctctccatctttcacacatacagtacctttggtaataaaaagattcctacctgtggtgcatatttgggtcctggataggtcaacaggtggttctgtccagagtctcccatcacacctcagggctaccaaggtcctggcttaagggattagaaatttggggcacttctcctggctaaggagaaagtgaaaccctgtctctactaaaaatacaaaatagccgggcgtggtggcgggcgcctgtagtcccagctactcgggaggctgaggcaggagaatggctgaacccgggaggcggagcttgaagtgagctgagatggcgccactgcactccagcctgggtgacagggcgagactccgtctcaaaaaaaaaaaagaaaaataaaaagaaaaagaaatttggggcacttccccaatattaaaggactgtccaaaagtcccccctgccctttttttttttgaggcggagtctcgctctgtcgcccaggctggagtgcaacggcgctatctcggctcactgcaagctccgtagctgggactacaagactccgtagctgggactacaggcgcccgccaccacgcccgactaattttttgtatttttagtagagacggggtttcaccgtgttagccaggatgacctcgatctcctgaccttgagatccgcccgcctcggccccccaaggtgctgggattacaggcatgagccaccgcgcccggcccaaaaggccccattttgatgcctgtgcgtattccagctgcggcggacgcagttttgtatttgatacctgcccttgggaaaacacaaggtattaactgcgtgcaacctcctgactttctgtttcccctgatctgggaaaagggataggcaggttaagctctacactgtagaaagcctgtgatagagctttgaacaaatgctgcagccattgtaatcaccaaacactatagtaagtgctgggaatgaataaaaacacaatcaccgtcctacaggagttcagtatttaattaaaaaatttacagcatctgctagattgcaggctgttctagaccctggagttcaagtagtgcaaagttcctgtcttcctggaacttaccaacagtactggagtttcaacgttctataaacaaagatgggtgaggacattagccccgggctaattaaagcgctcaggcccgctccagacctgagaatatcagctgaatctgaatcaactgttctccatttctgtcggttggtggtatcgcggggccacggcgacctccagcggccaccctccgtcttgtggtctgttctgggtccccgggaaggaaagggaggggcgataagccgggtccttgggagcgtcctggtctcccttcgctttacagactaggaggccgcagctagctggcagtctcagatccaggtttcccatctctgggatgagaggagagttcttcactcaggactgccagcgcaatgcaggtcgtgaagaactgcagggtcgtttatcgatacaaagtgagtgttggaggaacccatcaagacacaggaagggggaaatcctagcgccgccagtcggagatgaccaagactgaacctcaggcccagccctcccttctctcttagcctgcaggtttttctcctattctggcgttgggaccggatgacagctgcgaaaccaaaacgggaatggataaactgaggtgccactggggacctgtttcagaagtacctcctgggcggggccatcaccggaagtggctttaggcatgtaacctacaatgcccgcctctaattgcgctaccagtaggcgacgagccgcctccacttccggtccccagagcagtggccagcagccccctctttactgctctcctattggctgccgcaaggacgcgctgtgatttcccattggtcgcgtctcccctccggcgccgcgcctccttcctccaggtatagtctcgtctttaggcatccgattggctaaaggctgggagggcgtttgcccgactcgaccaatgagtggggtcgagagtgagggcggtggctgcgtgatgggggcagggcgggacttggcgtggccattggccagggcgggtacaggctagagatatgattggttcaggagaggggcactgtggtggggtcgggactgcgcggcctcagcagctgcgggagacggaagtggcaagagcgcggcctcagagggtcgggcggacgccgcctgggtgagtcaccgtgccccctgcactgcaagcctgggaaccgcaacgaccgcgtcttgcccggctccgccctggcccccaccggctttcctgagtcccgccttctgtcatttggggctccgcctcccagtctttaggctccgcccctagaacctgggcacctgggctcccctgccaacctggcccgccccctgggaccagatcccctaggtctgaaaaccctgggcctcccaggcctgatccttgtccctccttccctcccttccttccctggggctgctgccagtgggcggtgaggcagcacctctggcttgcctcttgccggttcccccatgagggagaatggcctagggaagaggatactgtgaacagggaggtgggcagtaccacagatggaggcttttatccccgcagcctcccgcagggctctgctgcactgcctgaggaaagcaggcatgaaggaaagtgtcagtgaaacctaggcctggctccctaagtgagcctaggaggccctatcctgaaatccctgttacttgggctcattggacagatgctgactccaaggcctggattggcctgattctgtccctgttgtgtggcctcctctccataacctccaccccacttggtgtcaaatacactcagcaggacctgtgcagccctgctgccctctgatcacaggttgtggtcccctccctcttgtcccactctggactctgcccccagtaaacaggtcaggtgggtactactcccagactcagagactggcaaaacattcctgtggattcatgctccttcaactactgccacttcaccccaagagtcagggcctaaaatgagccccagttgggcagcctgtgtctcttcatagttggcagttctgctccctgagaaagaagtgttctccctctgcgtctggaaatcaggactcctgaattctgctgaataatcttggatgacactcattcctgtttcagaacttcgtggctgacttcatgccctgcaggatcacttgttgctttctcctcatgtagctcccattgcctctctctggcatggtgacttgtggagagactggagtctctgtgagggagaagaataagagttgtagagaaggtcaggggtagatgtgtgtcatttgttgattctatggtaatgttaatggggtcctttacttttatgttcctctgtctccttacagtgagaagcaggcagccagtacccttgccacggtagaatggtgagtaccctgtctttcctcaggccattgtgttttctgtaatccatgtgtctttctctgtgaagctgccccacctgtcctagaccttgagctccaggctaccctgttcagctcctaaacatgttcatctgccctggagataaattagggtttctttagattgcaaaacatcagccagtatacagcactgggactggaagcttctagaaatcattttctgcatgtgctaggccccacactttcctcctactccctacccaccactggttctattaacccttcataacagccctcttcttgcttttcttgggtccccggtagaatctctgtgttctggtctgaaaagctgggccttctttatctcaagatctttggacttctggtgggtcctttgaatattgtggatgctatatcaggagtgactccaccaaaactgtggggcttctctagttccagggtgctgctgttaagccactacaggtgacagctgattgaatatctatcaggatagcatcttcagggtgcccagaatatcaccagaggtggtttacaatgatcctattaattttccattaactgtaacagcccttctctcaccccaagtccagggaagcccttaactcctaagagctaggaggaggcagtgagatgggaaaggcctagagagctgtaggccctggcccagaccaggcccttaacctggtagtatctcttcggtgtcttttaggtgtcccttgtgcttaggggcaggttaaagaattcagtagatgagaggatttcctccttccctcccttccttccatagacatgtggatttggtgtgtgcactattggttcagtctcttctcagaaagcctgctggttttggcccccaccaacagatagctcctctttttctcttctgggctaccctgaaaagagcatgggcttcacagtcagcttcatctaatttcaaatcctagcaccaccacttagttaaattacatactttctctctaagcttgagtctcacgagtaagacaggataaggtttacttcttggggcttgaaaagttttactgagataatgttagaaactgcctggctcattgtagatgcttaataaaatgtcaggttttcttttattactcccttctcccccaaacaagacaaaagccctggtgtctgaaagttacaaggtgcaggaagtttggggttccagccacctccctctgtgactcttggtgacattttgagccccttattcctggtccttattccttggccctctacccaactctctctactccgctgctcctgggtttcaagtttcgtttttttgtatagcttctgtggtcgatacttctagctcttcactttcccagactaagaaatcctttctcctccaagaagggctttcttacccagagatcagaatgtgaaacaagggagagatggagctgaaggagtagggttgggtaggggcgttggaataaaaagctcatttccctttccaggagcgtggaatgactaacctggcaccattctaaggggaaagaaaggtttaacgaagtcacgggattgaaggaccctgatgggcaggggcatggtgggtagtggttttggagggaaaggaggaagcaaatggggtgcgggtaggtgagctccaccttgggatccagagcaggcgtcgggggaacttaggggagggggcgcggggatgggtttgtaagagggcatggggtggctcaccttagaagaagggaaatgagaagatgtgggcggtcccgtagcccagattcctgaaagctcctaaaggtccctggagtagggtacgccctcctacgaggcccagggtccgcggggagggaggaggctgggcttgtgggcggggcccgcggagccgccccgcctctacctccgccttcccgccgcggtcccgggctctcccctcgcctggctcccctcccttctgcactcgtgcgggagggcggagctgggcccgctccattgtggagaggaggggagaggcgcgcgggagccgcgcggaggcccggccaccagcgccctagcctcttggccgccgcggctgcacctggcgagccccgcagccgggatgcggcgggcgcccggggctggcgggcagcgcagcggctccggggacatgtgcgctggcccagaccgcccgcgaccatgagcctgaccgcccgcgtctcctgctccatgcttagctgcttcgtaagtgcccaccctgcctttgggggcctaggaggcacccgcagccccgcccagggtcagccctcgatttcagcccatcccccttcccgaggcccctggcccggccccga

SEQ ID NO: 95492 - DNA, 23073 bp, Homo sapiens
gtctcattatgttgctcagattgatcccaaactcctcggctcaagtgatcctcccacctcggcttcccaaaatgttgggattataggtgtgagctactgtgccaggacttaaattttttttttttttttttttttttgagatggagtctcacactatcacccaagctggagtgcagtggtgccatcttagctcactgcaacctctgcctcccgagttcaagcgattctcgtgcctcaacctcccaaggaagctgggagtacaggtgtgcaccaccacacctggctaatttttgtatttttagtagagatggggtttcatcatgttggccaggctggtctcgaactcctgacctcaggtgatctgcccacctaagcctcccaaagtgctgggattatagaagtgagccacagcgcccagtgtttttatttttatttttttttgagacagagtctcgctctgtcacccaggctggagtgcaatcatgcaatctcagctcactgcagcctctacctcccagattcaaatgattttcccacctcagccccatgagtagctggaactacaggcatgcaccatcatgcccggctaatttttgtattttttgtagagacggggtttcaccatgttggccaggctggtcttgaactcctgacctcaggtgatctgcccgccttggcctcccaaagtgctggggttacaggcatgagccactgcatctggccttaaaaattgtaaatgaacaaaacctgtggtccacttcttcatttttaccatggggaacacttgtgtgtatgtacaacaaggcctctcaaggcattgtttttttttttgtttgtttgtttgtttggtttgttttttttttttgagatggagtttcgctctttgttgcccaggctggagtgcagtggcagtggtgtgatctcagctcactgcaacctccgcctcctgggttcaagcgattctcctgtctcagcctcccaagtagctgggattacaggtgcccaccaccatgcctggctaatttttttatttttagtagagactgggtttcaccatgttggccaggctggtctccaactcctgaactcaggcgatttgcccgtcttggcctcccaaagcgttgggattacaggcatgagccaccgtgcctggctgagggattgtttttaatagtgaaaaacaatgttaaaatgtcagcttccattaatagaggaatggtcacaaaatggagagacaggccaactaaggaatatcatgtaagttaaaaaagtgtgatactactcaggaggctgagtcaggaggatggcttgagtccaagagttccaggctgcagtgtgccactgcactccagcctgggcagcagagtgaggccctgtctctaaaaaataccaaaaaccaaaaaacttaaaaaaaaaaaaaaaaaaggtgagatcacgctctaagtgatacatgatagatctaaagatgcactgagtaaaagaaacacattgcagaacaatatgtataatggaatatcatttatggagaaaaaccagggaacagaatatttctcacagatccataaatatgaatgaatgtaaagtattactaaaagatttggaaggtcaaatacaaaaatgtcaacagtgtttgcatctgaagagtggaggaaggggactggaactgaggatgatgcaataacctaatctaaaaggagctttagcttggtctgtaattttaaatttttttccaaatatatccaggtattacctatagaattcaaaattaattaaaacagttgtaaagagagataaaacaagatctatgggctgagtaaaactggtttgtctaagcagccgctgcctctgccatctccccagcttccatagccttctgggggtgcctctttctctccaaccacacacaggaaatcaggctgaaatcccaactgaattatttcttaaacagcattaagaaacaacatgctgttttgcaagcagtagcagagagggcccgttatcccaccagcagctgggcttcaccctgggggtggggatatttgggaactctaagtgggcagaagagacggcagtggggtgtgagtgtgttggaggcggggagctctctcaaatgactatagtcttgagatgtagcagtcccagcagtgccctccagagcctacccccaggaaggggactggcgggtaactcacatgggacaaagcttatttgaaatccctcccactcccttgagctgcattcccctggttactctgcatgctgagaagagctttgagcctcaaacacacctggcccgacaaatagggcctagatgagggaacgacagaggtgcagacaggagaggctgaccaccttgggataacctcaggtgggtcattattaattggttgaaaacatgtcaagtcatagaacatctctagccctggcacacacatgtgcatccccagacccacccccgggccaaagacaggggctttggggaatccacatcttgggagtgctctcacctctatgtgggtggagcactcagggagtttaaacgtcgttcttggagaagtattttcaaacactcctggcctgattgctgcctgtgaggaagcagagcaagcctcttaacaggtgaatcgctgacatgctgcctgccaggtctctgtgtctgggcctgcctttccagcgcactgtccacactgcaaccagagcaggtgagctctccaaagtaacttggaccatgcacttccgcttcacagacctcatgactccctggggcttcgggacaataatttctcagtaggtctgcgagaatgttgcatcctgggcctctgcttggcccaccagcctcaccctgtccaccctctccctgtgttggaactgagtgaagccgacagtgtcattctctgggcccagaatgctcttcctctgtgtctacttggtcagctttgagacattcttcaagacagtctccagaatcaattcctcaagaaagccttcactgacctcccccagttgatccaagtgctgctcttcgctgctccctaaggtccctgcattggttctgggggtgccatttgtttgcctttctgctcccctctgtgagctccttgaggataaggctcatgctttgctcagtggagaatgctcaatgcccagcgcagcacctgacaagggctcagtaaatacttgttgaaggaatcattgaatgacaagggctcagtaaatacttgttgaagaaatcattgaatgaaaggtcaggaacaggtgtccagaggctactgggtaaagagcactggtttggaagtcaggagactgggcatggagattattctgaactgtgtcacactgctgaccttggtcaagtcgtttccttccctgggctccttctttctcagctctacaataaggggcttgcattaaatatctctcccctgttgagccttgacaattcccttaaaagagcaaaaggacactcaagcatactcaaggttgacaagggtgacaggggacaggtgctctcatgcatggctgatgggaggatgaggtaaaatcttcagcaggccatttgactatcaatattaaaaagccctaaaacacgcatacccaaatacgcaggaattttacttcttgcctaaggaaataattgacgatgtggcgagagatttaactccatggatgcttatcctagtactacttataataatgaaaatcagaaacaactctaagtatctaatgagatagaattagttaataaatcatataaaatagttatatgaaatattatacagacataaaaatgaagtaaacctgtatttattgacacagggagatgctcagactaaaattgttaagtaccgaaagtagatggtaaaacaatatttaaagttcttcttatcaatatttaaaaatatatattatgtttacatataggatatcaaattcttaaatgaggtattggtgagtggtgggattatgggcaattattttccttcctattgtttatttatgtgaagacaatgataaaccttgaaagaaaaaagtacccacaatctcacttgatgatgagtaattttgatttatttttatttttgcatactcgtgttctcaaacttttcatcagtgaaaattatattacttaaaggattgaaaaatcatttccaaaagcctctaaaattctagagcttgattcacaaagagccactcgaccaacttcacacacagcaagtcactggcagggcaaaagcttggttccccttctcagcaggggacagaatccctggacacactgggaagatattctgggtgttgctgtcccttgtcccttggccaagaggtggtctgggcatagaagacaagagtgggccgggcgcggtggctcacgcctgtaatcccaacagtgggtggatcaggaggaggtcaggagtttgagaccagcctggccaacatgttgaaaccccatctctactaaaaatacaaaatattagccgggcatggtggcgggcgcctgtaatcccagctacttgggaggctgaggcaggagaattgcttgaacccaggaggcagaggttgcagtgagccgagattgcaccactgtactccagctccgccaacagtgagagaccctgtctcaaaaaaaaaaaaaaaaaaaaagagtgggtggcgggaaggtggctgaaggtaggagggggaacctaaatgggacatgggaggcatggttggcacgagctcagcctgaccagggcccagagaggtagactgattcagtcaaaagtcgtagtacttttcctgctgagattggtggcccttttgctgggctttctcaagcaagaaatatcctcttctgtttcagaattattctgaatcattaacccaagtcctcccaactgcactgatcctgtcccagagaggccctgggctgcatcacctaactgatcactaaccacaaccagttctgctctctcctggttcctgaaatccaggagcagatggtggtggggaggaggagtttggagacagccctctaccagaagccaagaagaaaggggagtgaggagggatagaggaagttatcttggtcctgcgcccacagtccccagggtcctccttcctgtgaagcccaacggtctccagccagatttcctgtccccttagccccaccaagaaccagaggctgcccattgggtggctgttggatgcaggttactgttggagtgggggatggccacctgaggccaattgggtcatctttactccaggtctccctttcatcctcctgtcttccctgggggcactctattccctgcaattccttgggctaccagttcctgacttttgttcctttcaaaggaaccctggataaacagtgtaaccagaatttcagaggggttagttgtgtgtatcccctggggacaagcaccggtataggcacacaatggtgagctgagaaatcttgggctggtagtgctaaattcaaaggctggggacaggctggggccagtggctcatgcctgtaatcccagcactttgggaggctgaggcaggtggatcacttgaggtcaggagttcaagaccagcctggccaacatggtgaaaccctgtatctactaaaaatacaaaaattagcttcttgcctaaggaaaaatacaaaaattacttcttgcctaaggaaataattgatgatgtggctagaggctagggcgtggtggcgggcacctgtaatcccagctactcgggaggctgaggcagaagaatcgcttgaaccattgcacatcagcctgggcaacagagcaagataacgtctcaaaaaaaaaaaaaaaaaaaaaaaggctggggacaatgctggcccctcctttcctgccccttccccccatttcaggggcccctctgtgtgtaccttccaaccccagtgggggaggagaaagagttcagtctccaggatcagaccttcctctacctcaccccacccccagcttagaggacataaaagcgcagattgagctaagaggagctgacaatatcaggtgagctgtggaggtggggtccttggaagctggatgacagcagctggcaaggggataagagagcagtgagcccctccctcaaggaggtctggctttatccayagacagggccctctgaggtggggctgaggtacaaagggggattgagcagcccaggagaagagagatgggggttcccttcttctcttctctcagatgcatggtggacttaggaccttgctgggctgggggtctcactgcagagatgaagctgcttctggccctagcaggsstcctggccattctggccacgccccagccctctgaaggtgctgctccaggtaacagttcccaaggtgggagaagatggtgtgttggggtggttgtgttccagagaccccttttctcagagcrggccttcctagctctggggcctgatagggggttggggcccattcctgactttgtgatccytgctctgggcagctktcctgggggaggtggacacctcgttggtgctgagctccatggaggaggccaagcagctggtggacaaggcctacaaggagcggcgggaaaggtggggcacgaggcactgcccagctctgggcaaggatgtcccaggcctttcasagaagcagcaggcagcagggagcttgaaggtgggagagggggactatggggacccatgtggactccctttctgtctgtctgtccctgtgtttctggatgggagaacagcttaaaagccatccttcccaaagccttgcctctgtctggacacccaggtccatatcctttttataaaaggaagccttcctcccacccgtgggcctgcctgcatggtcctgcatgtctgcccctgggctggggctctgctgggtgggtctgtrtcccttctctggccctcactcctcctttctccaagcagcatcaagcagcggcttcgcagcggctcagccagccccatggaactcctatcctacttcaagcagccggtggcagccaccaggacggcggtgagggccgctgactacctgcacgtggctctagacctgctggagaggaagctgcggtccctgtggcgaaggccattcaatgtcactggtactgttgcccatcacaccccaggtccctgctccactagtgactcctcctagggaccccagccgtctctcagtgatcccctcaacttcttcctccagggagtctcaggagtctccagggctcctcagcctcaggttgcctgggataggaagtgaggcggctcrgctcccccattgttctttcccccggcagatgtgctgacgcccgcccagctgaatgtgttgtccaagtcaagcggctgcgcctaccaggacgtgggggtgacttgcccggagcaggacaaataccgcaccatcaccgggatgtgcaacaacaggtgcggctggctgggggtggctgcaggaaccgggctcagagaggcgtcccggacgccacaagcctcccggtgtcagcgccctgtcctcccctgcagacgcagccccacgctgggggcctccaaccgtgcctttgtgcgctggctgccggcggagtatgaggacggcttctctcttccctacggctggacgcccggggtcaagcgcaacggcttcccggtggctctggtgagcgccggcgggcagagggggcgaggcccggccrcgcggtgcgcggacccaggcgccasstgatctccgtgtcccgcaggctcgcgcggtctccaacgagatcgtgcgcttccccactgatcagctgactccggaccaggagcgctcactcaygttcatgcaatggggccagctgttggaccacgacctcgacttcacccctgagccggccgcccgggcctccttcgtcactggcgtcaactgcgagaccagctgcgttcagcagccgccctgcttcccgctcaaggtggccctgcttcccgcccactgcctgggttgggagaggggagattgtttctggaaggggccatctcccttctgtgcccaggtttcctttcccagacgctgaggaaggctggccctgcctcccttgtgtccacagcactggctgctcagctatgacctgtctccttcctgcgcctgggctcagccagctggcagccagggccgtccatttgctcactgcctctggcaggccaagggagagagggttgttcctccttggctgacaggagtcctgttggtggaatcactggctctttgttaggttgggagagggttctgggaggagaccttctcagtgccccccaagcctccatgctcagtcctgtttccgccccactgagagggcagccccaacccccatcacacagaaagagagagcctgggggtctggtgggtgccgtgggacagggctgggagtgggcagggtggtcgaggcactgctgagtagggaaggaggaggagagaaaggagagagcgcctgagagagggagagacagacaggagaatgtcagggccagagggagagcaggcacagcagagagaaggggagagagacgggcgacgctttagtgaggagggatccgaggcctggcggtgcccagacccaggggttgcccaggttcccagttcagtgttctgctcattaaccctgcacctcagaggctgttgctgatggcgccctaggcagcgatccctttcgggcctccggaggcctctctgcaggttgagggtaccagaggtcctgagggcagggggagatccagttctgcctgggcaccttccttgccctcggtgagccagtctagcctctctctgtgcctcagatcccgcccaatgacccccgcatcaagaaccaagccgactgcatcccgttcttccgctcctgcccggcttgccccgggagcaacatcaccatccgcaaccagatcaacgygctcacttccttcgtggacgccagcatggtgtacggcagcgaggagcccctggccaggaacctgcgcaacatgtccaaccagctggggctgctggccgtcaaccagcgcttccaagacaacggccgggccctgctgccctttgacaacctgcacgatgacccctgtctcctcaccaaccgctcagcgcgcatcccctgcttcctggcaggtcagctttggggtggggaccagaggtggcataggagatgttccctgttggagccacagtgagtctgtttgtgagcagcttgtgggtttgtacttagagagactgtcctcaccagccattactatcaacttcatgatattaatccagttgccttggtaacaagtcagatggagccagaaaagcagaaaagcaaacaacctctccaaccctaagatggagacccaggcatggctgaggagcctctgtccatcagtccattgctttctctgtcccttttttcccttctggactctggaagacaagagagtcaaatccctcaggggcagggaactaaaggacagagaacgctgtggtgccctcaccctctagagcgacactatccaatgtggtagccactagctgcatgtggcwattttaattttagttattttaaattaaataaacccagtttctcagcggtgctaaccacatttcaaatgctcaattgccttacagtctagtggctccccctattgggtggcacagatgtaaaatattttcatcatctcggaaggttgagttggaccacactgctccaaaatatcccctcctgcgcatcttaattacccataataagagatgatgggattttaaatgtaaacaattggcagttttggagacacaattggggcagtgatggcagccatgaccagacattttccagtgttttttttttttctaagacggaatctcactctgtcacccaggcttgagtacagtggcacagtctcggctcactgcaacctctgccaactgggtttaagtgattcttctgcctcagcctcctgagtagctgggactacaggcgcctgccaccacacttggctaattttttgtatttttagtagagatggtgttttaccatgttggccaggctggtctcaaactcctgacctcatgatctgcccaccttaacctcccaaagtgctgggattacaggtgtgagccaccgcacgcagccattttccagtgtttttaaatgtaaacccaatagtggacctcaggccctttcctctggcctccctctgcctcctcctgatggttcctgctggtctctccctggctgggaccctgggaggaggatccwggwcggactttctgcaagagatgcccgacctcttctgggctagttaggcaagggcagccctccttagccagactcagctgcccacagcctggctttgatgagccccatgtcccaagcctgggtcattatgacctctagctgttcatggatggagatgctgctctcagagaatttcctttccaccagcttctagagctggcaaggactgaccctagtgtcctgaccctagccctctggcccctgcagagaagggttctgggaggactaggggaaccaggggggatctgcttagttttcttgaacagtctcaggtgtggactccacatatctcatgtcctagccctctcccctggggcaggctgcaccattggcatgtagtaaagggcagggctgacaactctgttcaaatggtagtggctttctggagtcctgtgttgagaaggattctgaggttgcatccaattttagcaggaaagagtgctgtgatcgttagctgcatcagacatgggcatggatgtaggctgtgccaacacgcatgcttcttcccagacactccttggaatcaagagaatcaatgaaccaagcagtgttcataagtctcatactttgtaccaggcactctgttaagccccatgtatccatatgtgtgctaggagggwgggtaaaatataaaaaggcacaagccttggtcctgtgctcaaggagctcccagtttcaggtacaggaaagtggcatgtcatgtgttggaagtgatacctattgaatgagcatccccaaccagcagcggccctgagctgaggcagaagctatcattgtggactggggcatcagggaaggcctcctagaggagtgtaaattggggatagtttgaaaagatggatggggaggaggggtgagtaggaggcatttcaggccttggctggggagggggtttcagtggagcaaatcttttctgggatggaggccttaagaatgacagtggcttttgcctccccaaggggacacccgttccagtgagatgcccgagctcacctccatgcacaccctcttacttcgggagcacaaccggctggccacagagctcaagagcctgaaccctaggtgggatggggagaggctctaccaggaagcccggaagatcgtgggggccatggtccaggtaggccgtcttgaacaccrggcacacgggatccagatgtgtccctgcaacatcctagctgtgtgaccttgggcaagttcctaacgctcctgagccttgccttcttcatccatgaggctgtaaggattataatacatatatgaaaacacctttcagatagtaagtgcttgacaaagcctccttcccttccctctccttcttcgcaggtttgctccctgcagtcttctttcctgtgggtctgttattggtgttgggagggttgaatgtttggtttagcgcccaagtagctgttcagtaaattcttcttccctccatctcactgtcactcttagctcctttacccactcacctcttctttttaaaattaaaaaaattatagggctgggcgcggtggctcatgcctgtaatcccagcactttgggaggcggaggcgggtggatcacgaggtcaggagatcaagaccatgctggctaacacggtgaaaccccatctctactaaaaatacaaaaattagccgggcgtggtggcgggcacctgtagtcccagctacttgggaggctgaggcaggagaatggcgtgaacctgggaggcagagcttgcagtgagctgagatggcgctgctgcactccagcctgggtgacagagcgagactccatctcaaaataaataaataaataaaataaaatttaaaaattattattattattttatttttattttttgatacagggtcttaccctgttgcccaggctggagtgcagtggtgcgatcttggctcactgcaacctccacctttcaggctcaagccattctcccatctcagccttctgagtagctgggatttcaagcacgggccaccacgcccggctaatttttgtattttttgtagagacggggtttcgccacgttacccagtgtggtctcaaactcctgggctcaagtaatccgccctcctcgacctcccaaatccctgggattacaggcacgagtcactgtgttcagcccactcacctcttctttttggctctgtcataatccacccaatgtccttagcctcatttacccctggggcaatgttcctggttccgtctctcaacatctggtgcttcawtgcccccaccctctccctcagaggcagaggcagacatacacacactcacacacacacacacacacacacacacactcctagattytggaggagagagttttcggtgctaagggtgagtttttgatttgcactaagaactcaagtgaaattcatttacactccaaaataacttctagactctagaatgtagagtgagactattccatgtcttcacttttcacagggaaaatcatgccagaatgssccttcgttccttcctgcctccctgctttccacaaacctaaactgagccttactgtgggcaggcacttggtgggcactgtgaagaatttcaacaacttcaatttcccttgctctcaaggactttataagatagttgcagaaatgagacattaataacttgaggacaaggaagttatcacaatgactaaaaaagtgatttgctatttagtcctctaaggcagagggcaatataattatccttaatgtacatttgaggaactcaggctcasagaggttaataattggtccaaggtcacccagccagcaagcagtagaactctatttatgcctctcagtgccactctgttaggcccaggtccggtattgtgggaggctattccctgaccatagagggatggaaggggtccccgaagccaagagcaggcagagactctggccctcctgtgctgccaggcggcatttgctgtggaggagtgggtggagaggccattccaaatgacttgtctttagatcatcacttaycgggactacctgcccctggtgctggggccaacrgccatgaggaagtacctgcccacgtaccgttcctacaatgactcagtggacccacgcatcgccaacgtcttcaccaatgccttccgctacggccacaccctcatccaacccttcatgttccgcctggacaatcggtaccagcccatggaacccaacccccgtgtccccctcagcagggtcttttttgcctcctggagggtcgtgctggaaggtaagcaggacctaggccaggagcgagtgggctgacagctaaaggtggggtagggatcaccttggctctagggagctagggtggggagcagtytgctttcctcccatcttggagatctggtctgactctctagcctcagttcctctgactctgcttccatatctgataataaacagtggggtggggatggccctcagagggaactggctacttcctatgtgttgtggctcgctgtgacccaggaagccagggcctgggagcatcccaatcttgcaagtctgaatggcataatctcctgagacctatatgtccctggggtcatgtagtgaccggtgaggacctgctcactggggccaccaccttggcaccaggcactgcttgtgcccagccctcttctcgaatcctcctgaccctacctggacttgtccctgactccaatctgagctctgatactgagccagatacttcccctgacctggctcctctggtccccaggtggcattgaccccatcctccggggcctcatggccacccctgccaagctgaatcgtcagaaccaaattgcagtggatgagatcygggagcgattgtttgagcaggtcatgaggattgggctggacctgcctgctctgaacatgcagcgcagcagggaccacggcctcccaggtgaggggctgcaggagtctcccctgatgctcacctcccctgagctgcctcctaggtagcccatcaccccccttcccactctagggtccctgccctctccaaagcatattagaggcactttgctctcaggaagtagcctgaggccaggcccctgccttttcccggacccacctgataaatttccagctcctctcaacctcctttgcatgctgtaattctcatattaggggcatcgtcatcataatgataacccacagtctgaaaatctgtctctgtcatcattccattttgcttcattgtacgttaactctgggggaagagattattattgccttcattttactgatgaggaaactgaggcttgatgagattcagaacctggccaggttctctagccaagtcagtggcaaagctgaaatttgaagccagattagcctaacctcaaagcctgtgcctatgttatggggtagcccatgtggctgaggcttctagacacatttcacctctcatgggtcagagacagacacatcgggctgctctggagggggacaaggagatgtccctattcttggacccagcaggaactgtggcagtttagggtttgccttatggtaggagggcaagagaaagacagagagggtcccagagaggcccagttgtgccccttggtctaagccaaaggtacagggttccttgaggtgaggtccttccctccctctatgaccttggttgtgttgggaaggtgggttttctgggctgctggcgatatgtgaatcttccctgctgtctccagtgacctccccaccttgaagcagagagacctgcccatagccacctgtcccctcccccatgcaggatacaatgcctggaggcgcttctgtgggctcccgcagcctgaaactgtgggccagctgggcacggtgctgaggaacctgaaattggcgaggaaactgatggagcagtatggcacgcccaacaacatcgacatctggatgggcggcgtgtccgagcctctgaagcgcaaaggccgcgtgggcccactcctcgcctgcatcatcggtacccagttcaggaagctccgggatggtgatcggtgaggaggggcaggcgtygtgggccgctgggtggctgtgggcccatccttgactctcttggagcccaaatttcctcctgtcagttgaaggactggagggagtcagtaattttccagtgtgttccaggaatcctccagatgccctggagtgcccctaatgtgccctgaacctgttgggggtgcagcaaggaaagacctggacccctggttgtaaagggtggaagatagaaaagtgccacccttagctacttcttcccatgggtttcactgtgccaccatgtgggtgtcagtcaccagtgggcagtcccctcccagctttcccacagctccccttagtgtcatttcctcgtggtcctgatgtcttcatgtctagttcttgcttagcctgtactgcacctttgggaaaattagaaaaaggtgcccctctctgggtgggcgaattataaaccacccccaagattctcttccactcctgtggatgcagctcctggccagggcacagggcttcaggagtgtgtgtgggcccgggtccccctccagcatggtgccctggaggccgccgggctaggggtaagggaaaggccactgggcagctgtgctttactctgcacgatgagtggagcatcacttgtgtgaaagcccctgggctgcccaagggcctggggccyycctgtgcttccaggtggcatttgttgtggctttgttatatcctgggagcagcacaagcccatcgatgccctgccagcccagaatatccttgggcacagtgtccatgggtgttccccmtgcaggttttggtgggagaacgagggtgtgttcagcatgcagcagcgacaggccctggcccagatctcattgccccggatcatctgcgacaacacaggcatcaccacygtgtctaagaacaacrtcttcatgtccaactcatatccccgggactttgtcaactgcagtacacttcctgcattgaacctggcttcctggagggaagcctcctagaggccaggtaagggggtgcagcagtgaggggtatatctgggctggccagttggaaccacggagatctccttgccctagatgagcccagccctgttctgggtgcagctgagaaaatgagtgactagacgttcatttgtgtgctcatgtatgtgcgaagtatataaattggcttttcatgcgtgtgtgttgtctgaacatggggagtgtttcatgggttatgtgtatgtgccatttatgtgagtgtgtgtttgtgctgatgagaatactgagtatgtggaaggcagcagagcggactggtgaggagcacagctcaggaactagactgcctgggttccaatcctggctctgtggcttgctagctatgtgaccttgagcaaattaccctccttaaacaagagttttcttccttgtaaattacatctgtcatggtttcttggagggcccacttgtatcctctggttcttcatttattgagcacctactacatgcaaggcactgtactaggcgtgagaagcatatagaggcaagaaagagataccaagatgccatctgtgtcctggttagcagagctggaccagtggtgccttggagggataagccagctgcagctgggctgtgtggttgacttatgggcccagccagccaggctcaggccatggctcccctttttcttcctcaccctgatttcttgcttattcactgaagttctcctgaagaggaactgggcctgttgccctttctgtaccatttatttgctcccaatgtttatgataataaaggcaccgctgatggggacctccactctgtctgtgtctgaggaggaactggcgcttttgcagaggcttactctgggctctgagcttgaaccagtgtggtctgtgctcagggccctgtgtttctgaaccgagggtgaggatgttggggagttttcctttgagatccgtacgtggagggcagccatctcttggaagcctgggggccggggcatgcggtgcagaccctcctccctcaccttccacccctgccaccctgcagggaactgtggtcaccaagccctcatgtttgttcattgctctagcaaacgtttgctatgtgttcactctgtgtcaggcctgtgccaggggctaggaagtggaggggacaaaatgctgtgtggtaggagagaaagtacagagacctggtgaggaggcaggcccttccccaacaagaggggcctctgcatcctgcatcccagcagcctggcacaggggttcagaggccctcaagacagtggactccttctcattcatgttgcacatggctcctggagaagggagagcagatggctgggcccagaggacagggccagcactgagggaggggaaggagtgtatttccctagtagtcttgcctggagcttgaaccctgcgtctgactggtggactccctccctctcctcttccttctcaaatatggggagggggctggaagtggtgtaggacggtggggtctaatgtactcatggggcccctggtaacgttaggacctcaccatggtaagaagcagcaaaaatactgcttgtcctcatttctgtgatgaggagagggctgctcagaggggtgaagcgactcgtctgaggccttaaagaagtgggtggcagtgccaggctgcagccgaggtcatctggctcctgggctcttcccacaggatgactgggtgtctcccactcccaccccaccagttgggggatctggaggccctggttgggctaatctttcccagggggtcattttaaaagaagaacatatgaatatgtattgggcagaaactcaaggaatgttctggaagtgccccttcagaggcatcacaggatctaaggaccactctagaagagggtatttctcagaagggccactggaaggggtattagcttcagctgcgggagacccaggcttggtttcccttcctgttttatcccttggcaccaccgcctaccgtcccccccgtgtcctctctcttgctactccacggccagtgcttgttttccccaggagccccctgcccctcccctttctctgagaactcttagaaatcccaccaaaccatccccttccacctcaagacccacgcacgcgccatctcagtggtaagacatgtatggcctgtaaacgtctagttacttatttggcagtgattccgaggtctgcttttggagggaacggtgtcacgcctagcatctttagtcagtcatcagatgtttttgagcacttctaatgtgctgtgcaccatgctaggtgccacaggggaccctcggaggcaggctgaagtcctggcccagggagcttacaatctaggtgagaggacaggaagaaagataaaggttaagggccaagacttgtggagggaagaggacaggtaacatccagcaagctggagcagaagggcatctcagcggggctaagtcttgacagaaaggagaagccactggagctgagtgtaagagctgggagggccgaggcagccaccctggggcctgagcaagctgttcatccaggggtatagagaggcccagctgcaaagaagggctgggactgggatatggagctctaagggaccaggtcattgaacttgcttgaaatggccctgtggaccaaagggaactttcctgtgcagcgcgggcccctaattcttcactgaggcccagggtgacaggtccagcttgtcgatggctgagcaatccacgaagtcataggggtagctgttggcccagaatgggtcccgtgggaccttggtgatgcgggtgttgtcacagacaaggcgtgagaaggacattttctgtagagagtccttctgctcgttcgtgaagaccccagggttttcccaccagaacctgcagagacagaagtagagtcactccacagtctggccgctggcccctccccactctgtcacaggggaaggaaagggtcacagggaccatgaaaagccctactcacactgagatccggagtcagcgctcacgcaggaccttgggacacccctcttggagaagggccctgcccttccctccctggctgaggacgcacttgcctgtctccatcacggatctgctggaactgcttgcccaagaggcaggccaggagaggccccacccgacccctttccaccagcggctcagcaatggcccctatccagatgtcgatgttgtcaggggtcccgtagagacccagtaacttcttggccagcatcttgctcttcagcactgtgttcaactcctctagtgtctgcggctgtgagaggtcacagaaggctctccaggaattgtaccctagggtggagagactgaggctgtctcatcccggggacttcctgttcacagcctcctttggggccatgtccactccagctctatcagccctagaaagtctgggcttacagcctttgggatggggaaggagggaatccattgttttttatctgcacttcaatcttaagggggctagttggttaagtcctatgtaaccactaagcaatcatgaaagttatgtggtatgtactatgagtccaggcactattctaagcactgtgcaaataagtaaatgaagaatagaaatgttaagtaatttgcccaaagtcttataactagtaaatggcataggcgggatttgaactcaggcagtctggttcttaattaaattgcctttcatggggacaaaagaaaggtccaacagtcattggtttctctctattgttttcttaatgttttcagggcttttaaactgtttttaaagttagttggtgacctctttttcatttaaggaatgccaagatagtaccagatatatgctcttttctctgcattaggggaaatgggacattctgtttcatagatgaacaaagtgggttttaagaatggcctggggctggacatggtggcttgcacctgtaatgccagtgctttgggaggccaaggtgggagattgcttgagcccaggagttcgagaccagcctgggcaacatagcaagactatgtctatatttaaaaaaaaaaataagctgggcatgtggcacacctgtagtcccacctacttggtaggcttaagcaggaggattacttgaagctaggagtttgaggctgctgtgagctgtgatcgcaccgctgtactctagcctgggcaacagagcaagaccctgtctcaaaaaaaaaacctcaaacaaaaaaaactggcctgacttttgtttcagaattgatcagatgatcagatcctcagggttatagaagagagtctccaggagccctagaaagttagctaaaatttccccagtgcaggccagacttcagacactcaccaggttgcccatggtcccggcaacgctgtgtgttgatggcagccaggtcaaagccatggatcctgtgagttggctggaaaagcttgttgcgcagctctccagtcatcattttattctgtttcatcagcttggatttcttggccagcaggccccgcaccagaggatcaattccacctgccaagggagacccagaagccatgcttaggttgggggaagagtgggaacatcattcatggcttgcctctgcctccaccagacattttctcttagttgaatgtgggtcacctggacatcccaggctggaaggagggagagaagagcacagtgcagcctgaagggtgtgctcagggagacaggggcatccagattgtctgctctgggggtgggcagaaaggggcagtcatgggatgatggcatgaatataaacattgagatattttttggccatgcatggtggctcatgcctgtaatcctaacactttgggaggccaaggtgggaagactgcttgagcccaggagtttgggaccagcctggacaacatggcaaaaccccgcctctgaaaaaaaggcaaaaaaattagccaggtatgggggtgtgtgccttgtaatcccagctacaagggaggctgaggtaggaggatcatgtgagcccaggaggtcaaggccgcagtgagctgagattgcgcccttgcactccagcctgggtgacagagtaagaccctgtctcaaaaaaaaaaaaaaaaaaaaaaaaaaggtatttttaaagctctagttcatggagtcagctttttcttccatatgttctgctgaggaacgttgcataatgggaagaggttgcataaatctcaaggaaatgtccttgacttgctaggctttaagtaaagttaatttcaacacaacatagcctagggataaaggaaagttgggtccaacctctggcacctctatgaagtgaaaaactctagaagagatcagaaaagagcaatttatttaccaaaccctgtagaagtcagagaagcctagggcggggaaaggaggtagggaaatcccagtcatcttagaagccaagaggaaagaaagaatagcttatatttattgatcacctcctgtgtgtcaggaaccattgtagggtgctccacatgtatatctcatttaatgttttggatagcctcgtgagatgggtactattattgtccccattttataaatgaggaaactgaggctcagtgaggtgaattcatttgcccaaggtcatgtaaaagtgcttggaatctgacttccaacccaagtttccctacaataggctgcggagtgggagacccaggtgacagcacttccctgaaagggcataccatctttgaccatcctccaagtgttgaagaagagggtgtggagggggagttctggttctggcccccatggctgataattctcatccaggcggaacatactagaggggacctccaagtggccaaagcggaaggcgaaggtgaagacattggaaattctgggatccacagattcactgtagccttgatatgggggtatccacttctgcatgtggtcacctagcaaaatgggtaggtagtccctaaaggtgataatctggagggagaataaaatcaagaggaaagggtgtaagaaggtttaaacctctgcagagggaggctgtgaaagagctgcagccaagagtgatgagctgttgaaaaccaaggatggcaaatggatagcatatgtgcccagttcccattcctatgagcatagcagacattgctaatcaatcatgacatttttttctgctgatctcttacgatttgtctcaacataggctctactaatcagtcatttgaatttggcatatgaaacgtactatctttgtcatctttgtgctaagtttatgaccttgatgctaaagtgacagtctttgtgtgtcactttaatgtaacaatgtcagggcaagaggaatgataaaccacaggaatgattcaggggcaactgaggaaagttcatccaatctccagttctgaaagaaatacagaagaatggaaagactggtttctggttttcttttacataaaaacacaatgaactaacacaaataaaaaattttcagaaaagaaaaatgcctccacataacctaataattatattaatttttattcttgtagtctttgtctatatgttaccgacttttacatagttataatcctacagaatgcatacctgtgcattctgcttttttgcttcacattttccacatttctatctagctttcacagtgaggctctgtgtctctttgctcttaacccagtgccataaggagctcaggtgcagtggttcctgttcccctagaaggttgctcagcaacagcaggcagccagggaagtactttcctgccttgcagacagcaccagcagggattgagtgggaagcccccaaacaccagaagagtgaagtagaccagaatagcat

SEQ ID NO: 95493 - DNA, 24450 bp, Homo sapiens
  misc_feature (1)...(24450): n = A,T,C or G
caggcccagcagcgggttctggactccacttattgagggaagagctcacacaggccttgaagggagccgggcttcccacatgcccagccctgggaggtgtcccaagtgatgtccccagcaggtggcctccatgtccagtgggttgtccatcctcacctcccttggacagcacccgctctaaccacccacctggccagccttgcaatggagatggcctcaggacccacttggtgcccaccctaaggctcttcgttctctacatcacctcgtggtggcacccccacccctgccccaccccacccacctggcttatcaaggtcaaaaccctgggagtggctgaactgccatctggagaaggaaggagatttgggatgtggggagggaaggggacctgtcttcctttccagggtgaaaaagggtgtgtggactcacagagttagtctgtgacgtggttcactcatgttccacaaacatttctgagcgctggccctgggcccaaccctgtggtgggtacaaggtatgcagctgtaaatgagaccaggactggggatcagtggccagtccaggagacggacacggtgacagcatgccttcagtacagcacagtatgtgttgagggaagtatcagcatcaggtgccccacagacaaaaatggggtgtctaattcagatcatatctggggagtgaaaaggaaagggatgagagaaggctacctggagaaagtaatgacgcggctcagttgggaagatgagtagaagttaatcaggcaaagggaacacgtgcaaggacccaggggagaggggaacacggtgcatcagaaaccttcgggggatgaagctggagtgtggaggaagggtggtggaagaggtgagggcagaggctggagaagtcctccagggcctaggaagccatggaaggatttggagttcccygtactgctgctgaaggaatatcatgaatagaccccacagactgtgaccctgcccactaggaccctggacgggctgggctcatcccaggacacccatgagcaattccttctctacctccagtgctctcctcttccctctccctgggaaaccagagtgtgttgaaggcggggtggggcaagggtatggaaggacacgaaagcctcccaacttgtcacttagcaaaggtaattagacgggacaaatgccagtaccaaggacagggcagaggaagccacccgttccagggcagaaaataaggggttcgtcatctataggaagtttacaagaaataacaacacagataaaaggtcaggctgcttacgatgatcaccatgcaggggcaagtttacataatttcagagctcaaatcctgctccccaaagaaatcttgtgttggtctagattctaaaccattgctgtgattaccattgggcttagtaatatgtggaagcttcaagttaatgcacttttattgcttatcctttaagaagcactgtcttccatgtggaagttggttgggagaattcccagtcatacagtggctcgcttggctgagtatgttccctctgaggatgggctgatggctcagattcctctgagcggtctttggtgcaacgtgcgcctcctgcccctgttagcactgtagattcttgcatttaaacagctcgttcgatataaacaatgatagcacagtgattgtaaagatgaggagacagaacttgatttttaagtgcaaattttacttcatacatgaaatattgtactgaatttgaataattactttaagatctaatttattcttctaagtttgtaattgttcattttaaaactaatgaatggatcaagaagacagaaaatgtaatgacatattaaatattaaaactacaaatatgtatgtagatttcccctttatttaaaatgcattcatgtaatttaaaagtattaattcattatacttttcttttgtatattatttatttgtttattttgttatgtctctactggcatgattatacataaaattcactaaaagagaacttttacatatttctttgttggccattattatgacttgcttcatttaacgagtattactaaaaattattttgttgtgtagaggagggggtatcaaaaaataatctgttcccaggccaggtgcagtggttcacacctgttaccccagcactttgggaggccgaggcaggcagattgcctgaggtcaggagtttgagaccagcctggccaacatggcgaaaacccatctctactaaaaatacaaaaattagctgggcatggtggggggtgcctgtagtcctagctacttgggaggctgaggcaggagaaccacttcaacccaggaggcagagattgcagtgagccaagattgcgccactgcactcagcctgtgtgacacagcaagactctctctctctctctatatatatatatgtgtgtgtgtgtgtgtgtgtacgtgtgtgtgtgtgtgtgtgtgtgtgtgtgtgtgtatatttccagtgtcagatactccaggttgctactgcacaacacttaatgctaaggaaaatcttgccaatgaaatcccagtgggcacgatgaaaagcccacgagggggacacagagggcagggggcccttgcctacactcctcttcttgtccctgcatgtggttggccctgaccagagggaggaaaaagcagatgtcgacgtggaccactgtgagacatggcgagcaccctgcatgtcacctgccccatagtgggggccagagctggagagggtgggtggggtccaggctggaaagcccctggagaggggctagagaggtctctgtcacttcatcacgttcactccgtctccagtggccccgtatctggcacgcccactctgacatgaggaggagtgcttggagagcctcggtctgaacagccctaaacttggaggcctcccttccaggcgcccagccctgaagggtctgcaaatcccttgcactcactgcctccacccttcaggccaatggcaattgctgcctttgacagacagcctcaagggacctcaataaaggaagcaacaatagggcagaaaaacaaggtatgttcaacaacactgttgagcgcctgctatgtgtcaggaatgatgtctgcgaggtagactaggaatgacctccatctgacagtgaggaggtgggctcagaggttgaggagcctgcccaagtggatgacggtgctagaatggggaccaagttcagcttgtagccacctccctgtactgctctcaaggagctcccgcctgctaagtgctgtggctatggcaccaagcccagcttgtggggtgactcagaaatggcttcccagagggacctgctaggaagaggaagcttccggcagaattaggagctgcttggaaggagagaaaaggtgggggttatatgtggaaggttaggatgattggagcctaggggcagggtcctgtgggggaaacgtggcagaaagtaggctaaggagacatccagagccagagtccaggagagccaggcagcaggctctcatcaccaccccgagcaaccaataggtccaaatccccaagagatcagccaccatggcagggctgggcttagagcctaggtttctgtctcaggcttgtcccaataacccacggcagcccatggctgtggagaaacccttgcactgctcactattgttgaagaactagagtaccctctgcagggagagcagagctcactctgagtgctggggaccctggaagtacagcaatccaggatacatgcaccccatcctggctccaacctgggttacatacaccccaccccaactccaacctggagtatatgcatcccatcccagctccaacctgcggtacatacatcccactccaattctatcctgggttacatacaccataccccagctccaacctggagtacatacatcccaccccaactccaaccaggggtacatacgccccaccccgactcctacctggggtatatacaccccactccaactccaacctggggtacatacatcccaccccaattctatcctgggttacatacaccccaccccaactccaacctggggtacatgcaccccaccctgcctccaacctagggtacatacagcccaccccaactccaacctgggttacatacaccctactctggctccaagctatggtacatacaccccaccctggctccaacctagggtacatacaccctactccaactccaacctgggttatatacaccccaccctggctccaagctgtggtacatacaccccatccagctccaacctggggtacatgcattccacctggctccacccggggagcacctggctccctgagggccgggaggtgacacacagctgaggagtgctgtgtgatttatataatctctctcctccatgaggctccctgtccccatctcacaggtttggaaacaggtccatggaggggtgtgatttacccagtcactcagtgggtcagcatcaaggaacccagtgtgctttcagctcctacacagtgacttctacccaggccccccgtcacaggagaggggcctccgctaaagataagtagataagattaggagggctcaggccatcaactggagcttgtgaaaggggttgccgaagagaggtggttgtttcaagagcaacggttgggctggtaacattgctgtgggaggaggaggctgtggaaggcaccgggcagggtttcggtagggtgtgggggtgggggaggagaaaggacacttggaacagcctccctgggagtctggagcaggcacggggtccacactgaagaaggaatggacgtgtcctcctgaagaaggggcgaggacacgcaggctgctggccacagtggtggtgactctggaactgtctcagggatgagcatgtgctctccaggcagccgggatgaggtcagaggcaaaggatgaacctggctcatccagggcagggaactacaggaggaaggcttaggtgcagagagggtgggccctggcagaaggccgactgggatgcactctgcacttaaggtggaaatggaggcgcacttaaggtggaaatggaggctcacccaaggtcacgaagctagtgacagggctggattcaatccaggccaatcagaccctggtgcagcacactgcctctaaagaagctacttctcaccaagcccaataggaactcataattgaaatctacttctcagagtaaacctactactgattggcacctaagaaactccaagagaataaagcccatggcgggcgcttacttttaggctctgcagcagctcactgggctgggtgttttacctgtgacatctcgccatgtccccaaaatggccccatgagggatttcactgccaggccctgcctcagtcacagcctcacactctccctggcaccttggagggagtgagtagggctaggggataaggagaggggccaaatcattcatcacagatcattcattcactcaacaaacacctgctaagcacatactaaatgctgggctttgagctgggtatggggggtgtgtataacagtaaggcagattcagtttctgccctgttgcaggaggagaggcacccttccaatcatctggcccaactctcattctagggatgtgaaaactgaggcctggagagggaaagtggcttgcccaaggccatgcagccaggcggtggcgactgaggtgcaccgctcctgtcagccaacaaatatccattgagcgacacctgtgtcccaggtgctgctctgggccctgggagaagtgcatcagtgggcttggtagtagagggtagggatggagtgaagggtaggcaggaagaatgtccccaggctggtaggaggtggggtggggggtttcagtctcaaaactcccatgaaaaccagagagaagtttcagaactccacccaagaggctgggtttctagggcccagagctgccctcccccaccctagaatgggctataaaagtcccttcccagctacgtccagagaagagctggaggaagtgagaggtcrgctgggggycctcaaagtgagaggggagcagaggatcctcccgtgcaggctgtggatgtcactcacttcccagctggtgaagcctcgctgcagagatgcatctgctcccagccctggcaggggtcctggccacactcgtcctcgcccagccctgtgagggcactgacccaggtaatagtcccctagacaggcaaggaggagggaggggaaatggaaggggaagcacttgsgtcttggagggggtcttgtggcttgctgaaccctgagtccccatctctttgaacagcctcccctggggcagtggagacctcgrtcctgcgagactgcatngcagaggccaagttgctggtggatgctgcctacaattggacccagaagaggtggacttgggtctgggggctgcatgggcctgggaggatcagtgaggggcatgggccccagccaagttcatctcactcatcagccacctctggaccccatgaacatttcctgttggtagagcctcccttccatccatccttctgtccgcttgccctgtcctgactgtgccccaggactgggtctctgctgggtgggtctgcaccctctctccagccctcactcctcctctcctgggcagcatcaagcagcggcttcgcagcggttcagccagccccatggacctcctgtcctacttcaaacaaccggtagcagccaccaggacagttgttcgggccgcagattatatgcatgtggcyttggggctgcttgaagagaagttacaaccccagcggtccggacccttcaatgtcactggtactctgatccccaytgagcccgctgggcctaccctggcctggagtagaaggaatccaggagagggaggcagggtgcacaggtttggggtgctgggaggagagagggtaaagggatgggaggtacagagcaggccagctcaggtctgcccayttgccttcccacagatgtgctaacagaaccacasctgcggctgctgtcccaggccagtggctgtgctctccgggaccaggccgagcgctgcagcgacaagtaccgcaccatcactggacggtgcaacaacaagtgcgtgyggggcggcaggaggggctgcccctgcctgggggacctctcccttcctgcacccaccctctccctccatgctgagccatctccaggccctgccccctgctaacctatcccacccatggctgcaggaggagacccttgctaggggcctccaaccaggctctggctcgctggctgcccgccgagtatgaggatgggctgtcgctccccttcggctggacccccagcaggaggcgcaatggcttccttctccctcttgtgagttggggctgagggtttgggaggttgcttgatctcttaartgcggggagtaaaacacagcccagagtcacgcaggcagggcttgaacccaggcccttccactgaccagtgcagtgacttgaggcaaataacacagctttctgaggcttagtttcctcatctgtaaaatggccctaaaacctacctcgtagagcctgtgtggatattgaagtccttggtataaatagctatagaggacatgatctattcatgctaaccattacggtgttgtacggttttttctgagaaaattagtgtcaaagtcttgctaaatataaacagctctataccttaatctggctttatctattgatctatttcacatttatcaactcatcagttttctattgatatatcgatagagcagtctatcatctacccatctatcaacatctattaattaattttcttctatccacccttccatctgctgaccccgtactccctacgtgtattatccatcacctggcaaccagcccatgcacctgtgaatccgtgctatcatctggttagctatcagtgtacaaattgatctatctatttgatctcccttcccctctgggagagctggtgaggtctgagccagtcaacctagcccctctccttctctttaccaccggaatcctcaggagcccagccagaaaccatccttctaggaatgagagcaggaggtggctacgcctccagggacaaaaggggcatggagggcagaagaggagaggctgtcaattccagcaggggagctgctgctccctgagtcctggrttggctctaataccttgtggggtcagggagcccatgtcccgtgctgatgttatttccccaccaggtccgggctgtctccaaccagattgtgcgcttccccaatgagagactgacctcygaccgtggccgrgccctcatgttcatgcagtggggccagttcattgaccatgacctggacttctccccggagtcccyggccagagtggccttcactgcaggcgttgactgtgagaggacctgmgcccagctgcccccctgctttcccatcaaggtacctaccctcagccaatctcccatgcccttgtgtggcctcccccaaaggcaaggtgctgggggtggggatctggaagactggagcaccatccttaaggagctgcctgtggagctagggtatgagacagagacacaagaaacacagctgagcagagaccccgcgccgtgtgtgtttgagaggtgggggtagggcaatctgccaggaggctcaggtcaggcttcatggagtgggaagcccttgacacatgccttgacccatgggtctgaatccaacaggggaagcctctgggcccctgcttttggcaacctaagggcctcttagctcttgcccttctctccttcccagagtagtccaagggtcctgcggctcttgccagcttcttgggcttgggctgtaagtagggtcctaaccttcaggctagaagccaaggacagtgtggggcactaggggaggaaagatagaatccagggagcagagtctctgctaggaacatagggttgacacacgtgcacacacacactctctcacacacacacacgtgcacacacacgctccctctcacacacacatgtacacacacagtcacccttaataggtggggccacattcatgagggatgacatgtgagggcctctggatggcctctccctgttgcaaccttatctattcctcartccctggcttaggggcacctcctctggggagccttctcagatcttcctattacacttttaacatatgtcctcccctcccctctcctctctctccttccttccttcttccttcctctttctttctttcttctttctttcctttccttccttccttcccttccttccttcatttccttccttcctttctttctttctttttctttctttttctttcttccgtcctttctttctttatctttccttctttctttcttctttattattattattattgttttgagacagaatctcactctgttgtccagactggagtacagaggggcaatctcagctcactgcaacctctgcctcctgggttcaagcagttctcatgcctcagcctcccgagtagctgggattacaggcatgtgccaacaagcctggctaatttttgtatttttagtagagattgggtttcaccatgttgacaaggctgatctcaaacttctggcctcatgtaatccacctgcctcggcctcccaaagtgctaggattataggcgtgagccaccacacctggcccacatatggcttttctatcaagcacagcagatgccacttcaacttagtttcttaactctatgtgtgtgtgtctttttccactgaactgccagcttcctgcaacctttcctgtgtttttttaaccttcataatctccaaagcagcaagcaagaaaggggcttagaaaaggtctgtcgaattgaacagaattaaagaagctcaggcctaagagtcaagagaactaagttctaatcccacctttcctgctaactggttgtcacttcccctctctgaggctgttttccttgctgtaaaatgaggatcgagattgtttcaaaagcctcattcattcctaaccttttgagactctatgaaacaaaatgttraggacactcagactgacggggtgagcagcatgagcctgggtgagtcaaggagggcttcctggaggaagggagttttaagcaaggttttgaggaggtggaagatgacggagaggagtgagtctgctattgagggggccccatgtcactgtctcctcttccatctcagatcccacccaatgacccccgcatcaagaaccagcgtgactgcatccctttcttccrctcggcaccmtcatgccyccaaaacaagaacagagtccgcaaccagatcaacgcgctcacctcctttgtggacgccagcatggtgtatggcagtgaggtctccctctcgctgcggctccgcaaccggaccaactacctggggctgctggccatcaaccagcgctttcaagacaacggccgggccctgctgcccttygacaacctgcaygatgacccctgtctcctcaccaaccgctcggcgcgcatcccctgcttcctggcaggtcagacagggaggaaggtggtgtcttcccaggaaacagccatccctggggtcccaactgggaagcaatggtgggaygtggtgaaggtacatggtttgggacctcagtattaggcacaccataagcatggatctgtgcacagccatcatagaatcagaacgttgagtccctttgcaagctccctgtgtgtggscagagataactgcttaaccgtctccagtgacaaggctctcaccgcctctatggcaccccagctcagccacaggcagctccgactgttagaaagtctccttattttgatcacatattcacctattccccttaatcatgcttctggaacctcagaaaagacactgtccctcttacacgcaggaatacctcaaagtagctgttaactccatctccattttttttctcttctctgggataaatttccgtagttcctccctgtccccagctgttgctagacagttaataccctcttctggaagcataatttgaactttcctcagggtcttttgtcccatgtacatggttacaataataatggtagtcatttctcattaagatatttatcttattattattattattttaagatggagtctcactctgtcgcccaggctggagtgcagtggcgtgatctcagctcactgccacctctgcctcctgggttcaagtgattcccctgcctcagcctcccgagtagctggaattacaggtgcctgccaccacgtttggctaatttttgtatatttagtggagatagagtttcaccatgttggccaggctggtctcgaactcctgacctcaggtgattcacctgccttggcctcccaaagtgttgggattacaggtgtgagccaccacgcccaaccttatcaagatatttaaatgtgccatctctaaaccttgcaacagccctgaaaggagggaattattattgttctcattttacgataagaaactgagactcagggaaagtgaatcatgcgcccaagagcacagagttagtttcaaatgacagagtccacttgagaacacagtcagtgtagtatcaaggtctctgcccagtccactgtattccactgttttcctcacagagagtcggccccaacccctcttttgaaggattgtacatttgtgtgtcctggaaagagcagcttgtgccttcgggagaggtcaactgaactaagaccttgtgcaaaagggtttagttaaaaccaagcaaatgatggaattaactttctttccctgcctgtagtaggtctgttcgtaaggacagtctctgcccaaccctccctctcttcctctttccctctggttcacgggggagagcagtattataccaagcccaaagataggaagaggtacaccagcccttggcagagaacacgcaggcagatgcagctcatggacaggtgggctctcagtcccaaagtcaaggtgcccttgcccatagctggtccaggctatggatctggttgtcttgtagagtagaatccttaggcaaagatgcccctgcctgagaccagcagctgccctgtgctttcccacctcacccaagcctgctaggaacccccggtccttccgctcctggcctgtggtgttagggaggagggtggcgatgaggagcctcagcacagctgaagagatggaggtccagtgagggccaggagtttggcccaccccgtctctcccatccccagccctgggtctaccctggtagaaagacatttctctgggaaaggctgcagtaaatctgagcttggggttttcaaggtgacacccgatcaacggaaacccccaaactggcagccatgcacaccctctttatgcgagagcacaaccggctggccaccgagctgagacgcctgaatccccggtggaatggagacaaactgtacaatgaggctcggaagatcatgggggccatggtccaggtaaggagctctgcatcccagcatcccccagatgacaagcttggcatgagaagcagtccttaacacatccttgcggatgtgcctaaaaccagctgggtctgggcaactggcggagcacctggacctgtcctctggccccgattctgcctctaactcccgtgtgaccctgtctgtgtcactcaccctctctgggctttgtatctccacccaccaatagtaaattaatgttgtcacatttgacgtgatgacaataaagaatatgtctgagccaccctttgaaaaggcaagggtatgggtgagtagcctctggggaatgttcctcctgtcttcccttccagatcatcacctaycgagactttctgcccctggttctgggcaaggcccgggccaggagaaccctggggcactacagggggtactgctccaatrtggacccacgggtggccaatgtcttcaccctggccttccgctttggccacacaatgctccagcccttcatgttccgcttggacagtcagtaccgggcctccgcacccaactcgcawgtcccacttagctctgccttctttgccagctggcggatcgtgtatgaaggtgaccaggttttccagggggcaaatgggggtgagggtggggagcatgccctcccctaggtgggccaagcttactgccaggaagccaggctgctgcagaggccactgctaatatctccccaggacagtggaaacaaggcaggtgccagcaagaccctcagtcacgggcctcccatcctgtgtggaatgagaggattttttaaaggggtggagactaatgtcagattgatggggagctcaccttccattccttaagaagtacctcccagctccagctgcttcatgtctctccagaactctgtttcctgacaaacgttactaacatacccgactggcttgtccagctctgggctagcttggcatcatgtgataacccaagtagcttcccagaggctggtccaatctgtgctgctcacattccctgccaccagggggcatcgaccccatcctccggggcctcatggccacccctgccaagctgaaccgtcaggatgccatgttagtggatgagctccgggaccggctgtttcggcaagtgaggaggattgggctggacctggcagctctcaacatgcaacgaagccgggaccacggccttccaggtgagggggctgtccacctcttctcccagctttgctcgggccaggctgctcaaggggttctgggaagaccctggtacctcctttctgactgggactgtctacaggatgtgcaggagtgcagaggcatgcaaggccaaggtcgatgtcccaaagcactcctggaacaccgcttgctgtcctgccatggctcccccatccactgtaggggctccagctttaggttcaccacaggaccagcacttaggctcaggagctgaaaaagggaggctcgaactttccaagtagaaaaaaagcaataggcttaaaaggcagggaagaactgctccattcccaacacgctggcaagttccaaggaggaaggctaaaattccagagctacagaaacgctccttgctctaagtggagaaaggcaaagagccttagaggcagggaataggtggaataaaactaaggctgcagtggctgtttggtgagggcacaaatgactttatcccaggaaagaagaaaatataggcactttgttagtcactttcatgtatattaatttattttgttctcccaatcaccttgagaagcaaatgattacagccattttatagatgagaaactatgttcagagacagctagtaatttgcccaagatcacataaataagaagtagtaaaatctgaatttaaatttacaatttctcctttcttccccctgttcaaccccagtaggggaaggttttggccactgccttgctcctctctccttcccacctcctacctccctgtctagaaagaacctgaaggcccatctgcccatgtatgaagcagtggtggcacctcctactgcccaccccacttcacacagcgcctggtagagcacagcaggcactccggaaacctgagcttctttcctttcttaaacttgggcgctcctggcagctaaggagctgtgggcaccccctgccggagagctgagatcgctagccacccaagtttctattaggttttgaagggaaggcaagggttaaggaaagacacaaagagagagggcggctgaacagccaatgcaggtatttatttccagcataaaacctacagaggtgggggaccagcttattgccagaacctgccgccgcctacagctggggtactgggtatgggtatgggtatgggcaggaggggtctgggtcgtatggcttgctacccagcaggatattgataagatgtacctatgatcaggtccttttttcagtgggatgtggtaagatgttccttggacctttgcccagcaggatatgatagggatgttccttcagttgggcctttgcccattagggtatgttatgtttttcatggcccgacctcctgtggaacrtttcactttgaccaaggtctgggaaatggtggggggcttagaaaatggtgcagtttggactaacattcttgccttctactttggtataaaaggaagagctggagagctgagatcgctagccacccaagtttccacattgcgagcttctgctccccgcaatacctgtgccctccagaaatattatcctgacactagctcttgcaatctcctctaatcccttcccaagtccaacatcaaactgggaactggacaacctggtttgagctccacttaacagtaaagtgaccctgaagcctatggttgctcaactttagtaaacataccagatatagttagcatgccataaaagcacctcaaaaaggtgctgtgagggtcctgagatattcacccaatagtgctcagtaatggtaaaatactgtgtggttttcatgggttccgctgggggatggtgtgtgtgagctgtagttcaatggatgacgttgggctggtgtcccttcgggacatggcaaagctatctcctaccttgattgtcacatcttatgatgtggcttggccctgcgtgggatcctgatggctgacaaattggtatggcttgtctttggaagtttctgaaaactttttaaaaacttctttattgagatataccataaaattcacccatatgaaatagacaattcaatgattttagtgtatttagagttatgcacccatcaccatgatctaatatcacaccattttcactccccaaagaaaccttgtaagaacagtcaatccccatccccaccccagccccaatcacctctaatatactttgtgtctctatattgacctatgcaggacctctcatatcaacagaatcatagtgtgccgtccttttctgagtagatgaattttatcattgctctccatttgtttgcttgttcattcatttattcatttgctcactcattcattctacaaacctgatggagagtcttttatattctgggtactgtcttacttgtgtctaatgaatgcagtcgagcccagtaatatcactaagtgtcggatttgtggttatgagttttgggttaaaacagctttttaggttaggacacactcctcagtctgatgcacactgagcacagttgtccactcacattttcaatcagaggacagaaacctagtctttggaagctctagggactcttctgccagcaggatcttctggttctgcccaatattgactggccacagcttccccccagaggactggtggagaaaaacagaagctaatgggagatcagcaagactgaagctgcttctccccgttcccctgcagggtacwatgcttggaggcgcttctgtgggctctcccagccccggaatttggcacagcttagccgggtgctgaaaaaccaggacttggcaaggaagttcctgaatttgtatggaacacctgacaacattgacatctggattggggccatcgctgagcctcttttgccgggggctcgagtggggcctcttctggcttgtctgttcgagaaccagttcagaagagcccgagacggaracaggtaagtgaccctatcataaaagacatcagcaccagaggcagagcagaaaaacactagcatttcaagactaaacattgaagaacactgctctttttagtatcatttcttccaagttcacaggatctgaaatcaggaggctcctctctgaaaagctgggtcaaaggaagagagacactgacccaggcaaggcccatattgcctgagctggagtcatcttaaacccagaggttgcctggcagcctcactattctgggttggtggatcccagaaaacatgggcagaaagggctaaatctggtttccctccaatacatttgtgatttaagacctgacggccgggcgcggtggctcacgcctgtaatcccagcactttgggaggccgaggcgggcggatcacgaggtcaggagatcgagaccatcccggctaaaacggtgaaaccccgtctctactaaaaatacaaaaaattagccgggcgtagtggcgggcgcctgtagtcccggctacttgggaggctgaggcaggagaatggcgtgaacccgggaggcggagcttgcagtgagccgagatcctgccactgcactccagcctgggcgacagagcgagactccgtctcaaaaaaaaaaaaaaaaaaaaaaaaaaaaaaaaaaaaaaagacctgtctccttatttggagttggtattgcccgagttcaaatccagccctggccacttaaattactgtgcacttaatactgggcaatttatttggccactgaatttgtttcatttctgagattccaatcttgcaggaattttgtgagaattgaatggaataatatatgtaaagtacctggcacacaacaggtgctcattataaggtaattcctccccagccttcacccacatctctcgactgcctggtaggttctggtggcagaaacgaggtgttttcaccaaaagacagcgcaaggccctgagcagaatttccttgtctcgaattatatgtgacaataccggtatcaccacggtttcaagggacatcttcagagccaacatctaccctcggggctttgtgaactgcagccgtatccccaggttgaacctatcagcctggcgagggacatgaggcttctgcaggtaaggggaggccacctccagcaccctgggctgggttaagccctcacatccttccctggatggatggctgagtcctcttaggtctctaagcagagaaaacagaacttgtcactaggtactctttccaagtggcttcccaatgtgctagtttctgggctgacagtcaattccaggccctaggactttggggggaaattaggagcatccaactatcctcagcttggtcactaatacctgaaaacagctccatttctaaacatccagtaaattcctgacttatccagttctgttacttccacaggagtctatcccaagtctccaacttttggagacaaggggaaggggaggaccatgaggctgccttgtctccctggagcaagtgcaggctgctgacgcttctgctggctacagctcagagctgggttccccagccaggagtgaaggctgggggctcctatcagcaatggaccttcccgccttgggagcctcttaggtattaggctatgaatcagcgccacgtgcaaaggcttgggagccaagccatgtggtcttgcaccccaggcaagaaaagtcagctggagggtttacagcactttctactgtttcccagccctccctcccctccctcaccatgactaagagaccactcggtcctagcctccagacaccccacaatactcctctgagcctgaggccaggcagcatgctctgcttctaccaataaagcactgctaagggcaggggctgctgtttctgtgttgggctagggaagacgtggcctcagttccatgctttgctccagatgtttaagagaagtgctgttaacacgcaagctggcacaaccatctaagcctctcctgggggctgaattaggagagcccaaagaaacactgtggagtagggaaaggcagaaaaggggaagggcagacatggtaggggccccgacattaagaacaccctagccataccagcaacctgagcagacaaacagccaacagaacatcagtcaaaataaaaggggtttatgtaacaaaaaacaaaaaaacaaacaaacaaaaaaacacagtaaaagataccacccagctagcagaaaggactcagcactgccttcagccttcacttactcagaaataactcatatctcaacctcagcaagccccaagcagtagaatgaggcttccctggaaagaggctgagactcacaggctggggatttaagaccctctcaccgtccaccttccttccttctttggtcttggaagatgaaaggctccatttttaaagggtggagaacagcagatcccctgctactgtgagacaagccagaaaagtgagtcaaggccagactcactatggggtcaccccaaacagcttcagatcaaaaagcctgccttgctgtgatgcccattgacagtggctgcaaatataaagggggggccacagggtctctggctttatttccacagggtagggagaagaccctgcagaaggctaggcagaggggccagccgggaatttcccagcttttctggttctcagcagaccaacgtggtctctaatcagaaagacgaagaggcaggagagcactggcctcagatatcccccatcttgtcctcttgcactgtgggccagggctgctgtgagctaggagaccagggttccagaggggctcactaggtcctgcgggaggctttcccgggcctcctgcatgcrgcrccgggctcgacggaaggcctctgtaaggaaaggagatatgctatttggctgccatatggtatttctctctgcactgcagagagaaacaggcccatgctgacctggggtggccagctgggggaggggacatacctagcacattgtgaatggaactctgctggctgaacccttccagacggtccaacacactccgcatccttttctgaagggagctcgattccatgaaggccctgcagggaggccagccacatggttacggctgtctccacccctcagggctaaggtgccctgaggcagagggccaagtcactcacctggactgctgcagacagtgcaagcggaaggtgacagtgcctgtggtctctgtgcggagtccaaagcggctcaggcgttccccctgtggcatgccattgggacagcctcaggtttctgctctctctagacacccccgcaccatgctggcctcacccccattcttattcccattcttgggaagcgcagttctgttggggaaaccttattccatcacccagactctattacctcaaggctaatactgggctattgggctcccccaactaaaccagggaacattccaacctcatttgagaagcggcggtcttatatgcttactgtgaatcctccccacatctgattactgaggccttcagtgatgggggaaagagccagttattctgatgggaaccaggggaaatctctaattatactattttccagagacctcctacgatagcagtgtagatattggaacctgattcaaaatgtggtcatgacttccagcttaagccacaggaaggaaggggttaatactgaagcaatgcacaactaaggggtcttgacccagatcccacctcctacagaaggacaggaccataagttctcagcgtgaagtcactccaaagacaaaagtcaccttgaaggatcctggtatccgtacataggagaggtcctccagttccagagaaccgccaatgaaaaacctcctcagctcagccaccgtgccaagctccacaggtctccacgtggagactgtcagggtgtgtgagcctgcgcaagggaagagaagactggggccaggtccagaaagggcatgtggcccctcactgactccccagcaatgacacaggcctagactcagctaaaacacctggtctggtgatgacctggcctctggtgcaggttatcatggttacccatagcacctgtatggaaatcaatcagggagaaattcaaatttccgctctgccagttattacctgcatacccaggacaggtttcttaacctctctgaagctcattctcctcatctagtaaaatggaaataataccacctgcacctcacagagtgactgggagaattaagtgagaagtatggcacaatgcctggcacacagtaaaagacagatgcttttattccaaactgaatgctgattcattcaatacacatatgctatgagccaattttgccatacagcttctcaccctgagtccaatcagaggagcatgaagcacatggagagactgtcaggaagtcagtgccaaggccacgtcattgtcgctaatggaggggggcagaaagtcctcagaggaacaggaactctttcaagccaaacatttccaattcccaattatctccacccctcaccagaagcattcgagtgttagtcttgttcttagggcctagggcatgtgggccacagaagggcagagaygagcggttacctggagtggcaggcagcaccacagccccatagccttccacacggtacctctgccagaagtccagcgagaggacctcacagtagagcacaggccactccgggagtgcatctgggagcaaggagagaagcggccaggtcacaggcggccttcaccaagagacagcactgcttgaggggaaccaaggcccaggatcaactgctgagctactcaccagaagattcatcctcatggaggaagaaggcttcaaacgtgaatgggtaggagaagtgagccaccttgtcctataaaaaggagtgtcatagggtgggcaaggcctcccttggaatctgttctccttgtggccaatgacaaggttatcttcacaagggaaaaagaaaaattatcacccaggtgggaaataggagtctgagatgcaaaaggacacccaaatacaagctgctgccatgctcaaaaagacagacaggatctccggaccaggtggccctgtagaacccacacacaagtcacccaactctggaatcctccccagggcgcacagcacttggcctgataaaacctcaaatgccatcccaggagcagatctcattcccttccagatacccgctctcattctccataccattgccagggacttggtggtgcaggtctgtgttactcctgagagctgctggaatgctgggcttgaccagtctgaaagccaaagaccaaatatagtaagctcgcctgggaggaaagcaagtcattcagaaaaagacagtttcttttttcttttcttttttttttttgtatttattgatcattcttgggtgtttctcggagagggggatgtggcagggtcataggataatagtggagagaaggtcagcagataaacacgtgaacaaaggtctctggttctcctaggcagaggtccctgcggccttccacagtgtttgtgtccctgggtacttgagattagggagtggtgatgactcttaaggagcatgctgccttcaagcacctgtttaacaaagcacatcttgcaccgcccttaatccatttaaccttgagttgacacagcacatgtttcagagagcacggggttgggggtaaggttatagattaacagcatcccaaggcagaagaatttttcttagtacagaacaaaatggagtctcctatgtctacttctttctacacagacacagtaacaatctgatctctctttcttttccccacatttcccccttttctttttgacaaaaccgccatcgtcatcatggcccattctcaatggtcgctgtctcttcggagctgttgggtacacctcccagatggggcggccgggcagaggcgctcctcacttcccagacggggcggacagtttctttattcatttattcacacaatcaatcattcatttaccatttactgagtgcctgctatgtgctagtatatcttaggggtatcttggtaactagatagaaaagatccccatctctcatggagctgacattctgggggaagcagggagacagacaaaaaccaaaccaacaagagactattgggtagtgatgagtgctatactaaaaacaaaacggggaagggactgagtgattgggaggctcatttagactgggtggtaagagaaggcctctcagaggcgacacaggctgagacctaaactcagaaagaaccagccatgctaagatatggcagaaagggtttcagacaaaggaaacggcccttaaaaggctacaaggtgggaatgaacctggctgggaagaatgactggaaggttgtatggaagagataggcaggggccagctcattcagggtatcaagtttacattttactctaagtgggaggggaagctgttggggttttcagctcaaaagggacataacttgtttacattttttaaagctcaacttggctttggtgtctgtggcaaatcaacggcaaatgggagcaaggcagsaagcagggggatacatcagaagttgaatgcactggcctagacaagagatggtggtggcttggtgtagggtgctggagagaacaaataggttcacaacagcttttgaagacagaacggacaggaactgttgacagattggctggctatagggagctagggaaagtgagggatcaaggatgttccctaggtttttggcatcaacaactcagtagatgacactgccattctgttaggatggggaagaccagggaggagaggtttgagggaagaggaggaatcaagagttctttttggtcatgttagacagaaatgacaaaagaggtaactggatatgagtctggagtccagggaaaaggttaaggctagaggcagaaacctgggagtctgagacgtattgatggtatttaagccataggatggatgacgttgcccaggaagactgcagacagagagtaacagaaggccttggcttagctgtgggtactctcacggtttaagatcaacagaagggaaggcatcacccaagaaggatgaggggccaccagcgagataggagagagaagtgtggagccagaagccagagaagtgtgtcatgcagcacagtgggctctggaaaatgcttcaggaaggtcaagcgaggtgaaagcagggaagtctccactgggtttggtaaagtggatgtgatctatgaccttgaaaagaacagtaacagtttcagcagaggagtgggaaaggaagcctgaccaaatgcctctagatctgtctgaatgggtataaaaggagagacttaagaatattacttacgagcagttggcaattctacaaagaagtggacgtagagattgtcatactcatagccttgggctgaaactacgagagaaaacaggaagctattttagctttttctcctaccacccttagcacccaacccaatcctgaggggcctacacaccctgagagcaagtcttttgagggccaggaaccctctgcgtttccaggaaagactcaccactgagtttcccaagtacagcagacaaggcctctaccagagtggaggagactattcacagctccatctaggcacgtgcctaagcatcaagagatctatgctagcaagacacttaccgacctctccatttacaaagagccggagggcacctgggacagtctaaggtgaagagaagtgggaaaggatcagcaggcctggagggaattggcacttctcctccagccccatctacaaatctgcagacgacctgccactaggggtcaggccctgggtgtcactactgcactttctccccaccctgacacttct

SEQ ID NO: 95494 - DNA, 40334 bp, Homo sapiens
atcacccaacatgatgcatgcgcactgaaaagtgtaaagggctatttacagcatactcaggaattttaacaatggtaattgcaggaccagcaacataatttgttgggcccagtgcaaatgaaaatgtagggccccgtgttcaaaatttttaagaatttcaacatggcaacggcagagcatcaaatcagctagaatgtgagcacatactagatgtccagcctgtggtggacattttaagggattcagaacaagcatgaatgattcctatccctgagaggcttatagtcaagtggcaacagggaagcaggggaggtgggggcagttctctaacatgtttcaatcagatagcaacttaaattagtaaatgggtcaggcaatgtgtagtggcaagtgcactgagctgtaggggttcaggtgggtagagaatttactagctaaatgacctacagaaagtccttttcctttccctctccttcctcctttcttttttttttttttttgagactggttctcactctgttgcccaggctagagtgcagtggcctgatcaaccacctcccggggctccccsggctcaggttatcttcccacctcaacctcccaagtagctggtactacaggtgtatgccaccacaccaagctaacttttttgtattttttgtagagatgggggtctcgctatgttgcccagtctggtcttgaactcctgggctcaagtgatcagcctaccttggcctcctaaagtgctaggattacaggcgtgaactaccacacctggcctggagcaaatctgttagctgctctggatttagtttcttcatgtatgaaatgagagtgatgatgatcataatgcataatgtccacctgtcagggcagtgaggattaaacaagataatagaagagcaaaggatatgaaaattgaggttcttggggaaatttatttatttatttgttttgctttgtagtgaagagaaggggagagcagtgtgtattggtatagtcaaaggagacttcgtggaagagatggttcttagggccttgaaggatggagtgggtttggagaggtagaggaaagggtagaaacacatgagcaaagaggctctgaggttacactggaaacctgacttagggtttccctggcttccagttggtatttgcctgcagccaccttgctattctttttttcttcttcttcttctttttttttttttttttgtgacagtctggctccatcacccaggctggagtggtatgatcttggctcactgcaacctctgcctcctgggttcaagtgattctcctgcctcggactcctgagtagctgggactactcaggtgcacaccaccacgcccagctaatttttgtatttttagtggagacagggtttcaccatgttggtcagggtggtctcaaactcctgaccttaagtgatccacccgcctcggcctcccaaagtgttgggattacaggggtaagccaccgtgcccagcctattcttactgctttgtttgatcacctgggccctttccctctcatcaagctagtatttattaaacttgcctgagtactcagtctaattttgtatcaggacatgtgagatacaccccaccccattcaggaatttctctaaagatttagtaaagcaagccagggaataacagtgtcttaaaaacactgctcagggagtgggctacttctctgtagtcccagagctcactaggtggctcccactctcacagtttctctgcttgtctgtccctgccccagctggaagcctgtggcagaatacattgatcagcagtttgagcagtatttccgagacgagagtggcctgaaccgaaagaacatccaagacaacagggtgcactgctgcctgtacttcatctcacccttcggccatgggtatggtccaagcctgaggctcctggcaccaccgggtgctgtcaagggaacaggccaagagcaccaggggcagggctgccactagcaggtggtcacaggttcctgttccccaggctccggccattggatgttgaattcatgaaggccctgcatcagcgggtcaacatcgtgcctatcctggctaaggcagacacactgacacctcccgaagtggaccacaagaaacgcaaagtgagggaagctggtggtgggaggggatcaggtgggcttctagaaaggatgtggtccccagaactgtgggcccctcatctgtttgtcagatccgggaggagattgwgcattttggaatcaagatctatcaattcccagactgtgactctgatgaggatgaggacttcaaattgcaggaccaagccctaaaggtggggccactctagggcatcccattcctatcttatttcttccgggtagaaaaagggagtagaattctatattcaggctatcagggtgggaaaggaccctggcttcctagaatgaagcagagaagatgacgatacaggtggaaagaaagaggtgagaacagagggtgctgacaggcacccctaacctcttccaggaaagcatcccatttgcagtaattggcagcaacactgtagtagaggccagagggcgrcgagttcggggtcgactctacccctggggcatcgtggaaggtaaagcactgagcctgtgaccagggtatctccttgccctcagtggctctcccctacctatgcctctggctgacccctagccttgctatgcagtggaaaacccagggcactgcgactttgtgaagctgaggacaatgctggtacgtacccacatgcaggacctgaaggatgtgacrcgggagacacattatgagaactaccgggcacagtgcatccagagcatgacccgcctggtggtgaaggaacggaatcgcaagtatgaccagaagccaggacaaagctggcagggggagatcccaagcctagccttgggtgagaccaagccctacttttgttcttctataggccctgggctcaatctaagcgggtgctggggtcctcctcgccttatcaacccttttctccctttagcaaactgactcgggaaagtggtaccgacttccccatccctgctgtcccaccagggacagatccagaaactgagaagcttatccgagagaaagatgaggaggtgagagcagtatggggtataggggaggtctcctgtttgatcaccaacgttggtatctctttgtttggtaatagaaagatccctggctctggtgcatatttgggtcctggataggtcaataggtggttctgtccagagtctccatcacacctcacggctaccaaggttctggcttaagggattagaaatttggggcactttcccaatactaaaggactctccaaaagtccccattttgatgcctgtgcctattccagctgcggcggatgcaggagatgctacacaaaatacaaaaacagatgaaggagaactattaactggctttcagccctggatatttaaatctcctcctcttcttcctgtccatgccggcccctcccagcaccagctctgctcaggccccttcagctactgccacttcgccttacatccctgctgactgcccagagactcagaggaaataaagtttaataaatctgtaggtggcttctggtgtccctgtgtgtatttttatgacctggagatcaagatcctgggacccagttttgaaaggctaatggtagaagatgttggtttctggcttttagtagggaagggagagtggggaaaactttccacttcctttccccttctaagtccctgcttagaatccagcctggcttctccatcttgacgatcatatctatcatgcctctgttatctggggtctgggtctctctccatctttcacacatacagtacctttggtaataaaaagattcctacctgtggtgcatatttgggtcctggataggtcaacaggtggttctgtccagagtctcccatcacacctcagggctaccaaggtcctggcttaagggattagaaatttggggcacttctcctggctaaggagaaagtgaaaccctgtctctactaaaaatacaaaatagccgggcgtggtggcgggcgcctgtagtcccagctactcgggaggctgaggcaggagaatggctgaacccgggaggcggagcttgaagtgagctgagatggcgccactgcactccagcctgggtgacagggcgagactccgtctcaaaaaaaaaaaagaaaaataaaaagaaaaagaaatttggggcacttccccaatattaaaggactgtccaaaagtcccccctgccctttttttttttgaggcggagtctcgctctgtcgcccaggctggagtgcaacggcgctatctcggctcactgcaagctccgtagctgggactacaagactccgtagctgggactacaggcgcccgccaccacgcccgactaattttttgtatttttagtagagacggggtttcaccgtgttagccaggatgacctcgatctcctgaccttgagatccgcccgcctcggccccccaaggtgctgggattacaggcatgagccaccgcgcccggcccaaaaggccccattttgatgcctgtgcgtattccagctgcggcggacgcagttttgtatttgatacctgcccttgggaaaacacaaggtattaactgcgtgcaacctcctgactttctgtttcccctgatctgggaaaagggataggcaggttaagctctacactgtagaaagcctgtgatagagctttgaacaaatgctgcagccattgtaatcaccaaacactatagtaagtgctgggaatgaataaaaacacaatcaccgtcctacaggagttcagtatttaattaaaaaatttacagcatctgctagattgcaggctgttctagaccctggagttcaagtagtgcaaagttcctgtcttcctggaacttaccaacagtactggagtttcaacgttctataaacaaagatgggtgaggacattagccccgggctaattaaagcgctcaggcccgctccagacctgagaatatcagctgaatctgaatcaactgttctccatttctgtcggttggtggtatcgcggggccacggcgacctccagcggccaccctccgtcttgtggtctgttctgggtccccgggaaggaaagggaggggcgataagccgggtccttgggagcgtcctggtctcccttcgctttacagactaggaggccgcagctagctggcagtctcagatccaggtttcccatctctgggatgagaggagagttcttcactcaggactgccagcgcaatgcaggtcgtgaagaactgcagggtcgtttatcgatacaaagtgagtgttggaggaacccatcaagacacaggaagggggaaatcctagcgccgccagtcggagatgaccaagactgaacctcaggcccagccctcccttctctcttagcctgcaggtttttctcctattctggcgttgggaccggatgacagctgcgaaaccaaaacgggaatggataaactgaggtgccactggggacctgtttcagaagtacctcctgggcggggccatcaccggaagtggctttaggcatgtaacctacaatgcccgcctctaattgcgctaccagtaggcgacgagccgcctccacttccggtccccagagcagtggccagcagccccctctttactgctctcctattggctgccgcaaggacgcgctgtgatttcccattggtcgcgtctcccctccggcgccgcgcctccttcctccaggtatagtctcgtctttaggcatccgattggctaaaggctgggagggcgtttgcccgactcgaccaatgagtggggtcgagagtgagggcggtggctgcgtgatgggggcagggcgggacttggcgtggccattggccagggcgggtacaggctagagatatgattggttcaggagaggggcactgtggtggggtcgggactgcgcggcctcagcagctgcgggagacggaagtggcaagagcgcggcctcagagggtcgggcggacgccgcctgggtgagtcaccgtgccccctgcactgcaagcctgggaaccgcaacgaccgcgtcttgcccggctccgccctggcccccaccggctttcctgagtcccgccttctgtcatttggggctccgcctcccagtctttaggctccgcccctagaacctgggcacctgggctcccctgccaacctggcccgccccctgggaccagatcccctaggtctgaaaaccctgggcctcccaggcctgatccttgtccctccttccctcccttccttccctggggctgctgccagtgggcggtgaggcagcacctctggcttgcctcttgccggttcccccatgagggagaatggcctagggaagaggatactgtgaacagggaggtgggcagtaccacagatggaggcttttatccccgcagcctcccgcagggctctgctgcactgcctgaggaaagcaggcatgaaggaaagtgtcagtgaaacctaggcctggctccctaagtgagcctaggaggccctatcctgaaatccctgttacttgggctcattggacagatgctgactccaaggcctggattggcctgattctgtccctgttgtgtggcctcctctccataacctccaccccacttggtgtcaaatacactcagsaggacctgtgcagccctgctgccctctgatcacaggttgtggtcccctccctcttgtcccactctggactctgcycccagtaaacaggtcaggtgggtactactcccagactcagagactggcaaaacattcctgtggattcatgctccttcaactactgccacttcaccccaagagtcagggcctaaaatgagccccagttgggcagcctgtgtctcttcatagttggcagttctgctccctgagaaagaagtgttctccctctgcgtctggaaatcaggactcctgaattctgctgaataatcttggatgacactcattcctgtttcagaacttcrtggctgacttcatgccctgcaggatcacttgttgctttctcctcatgtagctcccattgcctctctctggcmtggtgacttgtggagagactggagtctctgtgagggagaagaataagagttgtagagaaggtcaggggtagatgtgtgtcatttgttgattctatggtaatgttaatggggtcctttacttttatgttcctctgtctccttacagtgagaagcaggcagccagtacccttgccacggtagaatggtgagtaccctgtctttcctcaggccattgtgttttctgtaatccatgtgtctttctctgtgaagctgccccacctgtcctagaccttgagctccaggctaccctgttcagctcctaaacatgttcatctgccctggagataaattagggtttctttagattgcaaaacatcagccagtatacagcactgggactggaagcttctagaaatcattttctgcatgtgctaggccccacactttcctcctactccctacccaccactggttctattaacccttcataacagccctcttcttgcttttcttgggtccccggtagaatctctgtgttctggtctgaaaagctgggccttctttatctcaagatctttggacttctggtgggtcctttgaatattgtggatgctatatcaggagtgactccaccaaaactgtggggcttctctagttccagggtgctgctgttaagccactacaggtgacagctgattgaatatctatcaggatagcatcttcagggtgcccagaatatcaccagaggtggtttacaatgatcctattaattttccattaactgtaacagcccttctctcaccccaagtccagggaagcccttaactcctaagagctaggaggaggcagtgagatgggaaaggcctagagagctgtaggccctggcccagaccaggcccttaacctggtagtatctcttcggtgtcttttaggtgtcccttgtgcttaggggcaggttaaagaattcagtagatgagaggatttcctccttccctcccttccttccatagacatgtggatttggtgtgtgcactrttggttcagtctcttctcagaaagcctgctggttttggcccccaccaacagatagctcctctttttctcttctgggctaccctgaaaagagcatgggcttcacagtcagcttcatctaatttcaaatcctagcaccaccacttagttaaattacatactttctctctaagcttgagtctcacgagtaagacaggataaggtttacttcttggggcttgaaaagttttactgagataatgttagaaactgcctggctcattgtagatgcttaataaaatgtcaggttttcttttattactcccttctcccccaaacaagacaaaagccctggtgtctgaaagttacaaggtgcaggaagtttggggttccagccacctccctctgtgactcttggtgacattttgagccccttattcctggtccttattccttggccctctacccaactctctctactccgctgctcctgggtttcaagtttcgtttttttgtatagcttctgtggtcgatacttctagctcttcactttcccagactaagaaatcctttctcctccaagaagggctttcttacccagagatcagaatgtgaaacaagggagagatggagctgaaggagtagggttgggtaggggcgttggaataaaaagctcatttccctttccaggagcgtggaatgactaacctggcaccattctaaggggaaagaaaggtttaacgaagtcacgggattgaaggaccctgatgggcaggggcatggtgggtagtggttttggagggaaaggaggaagcaaatggggtgcgggtaggtgagctccaccttgggatccagagcaggcgtcgggggaacttaggggagggggcgcggggatgggtttgtaagagggcatggggtggctcaccttagaagaagggaaatgagaagatgtgggcggtcccgtagcccagattcctgaaagctcctaaaggtccctggagtagggtacgccctcctacgaggcccagggtccgcggggagggaggaggctgggcttgtgggcggggcccgcggagccgccccgcctctacctccgccttcccgccgcggtcccgggctctcccctcgcctggctcccctcccttctgcactcgtgcgggagggcggagctgggcccgctccattgtggagaggaggggagaggcgcgcgggagccgcgcggaggcccggccaccagcgccctagcctcttggccgccgcggctgcacctggcgagccccgcagccgggatgcggcgggcgcccggggctggcgggcagcgcagcggctccggggacatgtgcgctggcccagaccgcccgcgaccatgagcctgaccgcccgcgtctcctgctccatgcttagctgcttcgtaagtgcccaccctgcctttgggggcctaggaggcacccgcagccccgcccagggtcagccctcgatttcagcccatcccccttcccgaggcccctggcccggccccgaacgtttggggggcagggaaggtgggttaacccttttatttcttggacttgcttcaatctttgggtgccggagatggtcgaaggccaggaatggaaattctgtggtccatcctggccccgcagccactgcccttgactgcagatctctaggccccgccctgcaggggtacatccctttacctccgcctctccctcttggtcccacccgctgaatccttgcttggggatgtgggatgwggctagtaggctgaatgggatgttaggaggttggtcggggagcacgggatgtctttgagctggcttggggctccagtcccttccctcttccaccattccatccctcacctggcatgccagccttttctccttgactgtcccccagacagcctctcttctccatcttccctgcctctgcagggttccgtacctctgcatcattcccggtcctcccctcctcccgctctggctgatgctccttcccagcttcccccatctgtcctctcagctgtccccccaccttccccgtgggtgtctgccgggcctcctctctctctctcccctggctgtccttgggtctcctggctcctcccaggcgcgtggatcccccygggtcccctccctggtggttgggaggggagttccttttgcttgctgtgggtattcctcaggaattcccctctgattagcaggcagagcaggttacttggcaggtaatgggggcttgtcagcaatgtgggtctaacaagaagataagcccagctctcaaacacgtcttccttttgaaagcgtcggtgaaggccctctagaggcgtgggactgaatccccccacccactcctctttgtctccttcacccaccagattgaagcttcagtggcttgtaggcgcctgatttcccttctctctgaaaccagctgccatacctggctccttttcctcaggacagcactttcccatccccactcctgccttrcccttatgcgggtctaagggaaagagtctttcttttccttagttttctctcctccatttttgaaatgttggttctataggagartccctctttgaagagtgcagattcccaattcctcctggggcctcactctttccttaggcttaataggctgatatgctctccatttcacccttccctgtctccaaccaagtcagatctcttttcccttctctggtgaccagaacctttagaggtgtgtgtgtgtgggtatctgtggatttcttggtggggagaggagcagaatgagcctgatgggctaagtggagcttggtgacttaggactgtggccttcctacagggtgaggaggggccccccagcctggagtacatccaagccaaggatctgttcccccccaaggaactagtgaaggaggaagagaatcttcaggtaaggaggagttgggggccaggatagatggggctccctgcccagttaaaaaacaccctcccttctcccaaaaatcctcaagggcatctggtaccagagctctggcttcatgttccctggtctctggaggaggagggtttgtctgcgcatcctggagcctttggccgcagggaaggaaaggcagctttcctgtacagctgttgcctggtgctgttaccgtggagagaactctcctctcttgccttggcccaccttttccagaggggatcccacagatcaggggctgtagaagaggataaggtggtcactcacttctggactgaaggtttctctgccccttgacaggtccccttcacagtgctgcagggtgagggagtagagttcctgggccgggcagccgatgccctcattgccatctctaactaccggctgcatatcaaattcaaggactctgtcatcaacgtgagtttctgtattgttctcctacccctaagctagratccctatgaagttcaaggtgggattgttccaaggctgtccttgatcatgtcattaaaaaagttggaggccgggcgcagtggctcacgcctgtaatcccagcactttgggaggccgaggcgggtggatcacttgaggtcaggagttcgagaccagcctggccaacatggtgaaactgtgtctctactaacaatacaaaaattagtcgggcttggtggtgcgcacctgtaatcccacctactcgggggctgaggtacgggaatcacttgaacctgggaggtggaggttgcagtgagccgagattgtgccactgctgtccagcttgggtgacagagtgagactacctctcaaaaaaataaaaaaaaaaaagttggggatcccttctgtttctctctgacctcatgttttcctgcctcattttcctagctctgtttctggctcattctcctttctcctcttctctctttccattattctattactggcccttctaaggagcacagtggcattgttggaagaacacaggctttggagtcaggcaaacctgggctcttttcctgcgttgccactcaccagctgggtgaccttggtcaagtcacctaactgaggcttgatttttctcctcgtaatatgggctgaaagcacctgctgtgcaacgttattgggatcattaattgggatcacatatgcagaggactccgtacagttaccaggtgcttaacagaccctcagtaaatgttggtttccttcctgctattgatacattagtgcctacgctagggtgagggtgaggagtggtacccagtggggagtctgagcttcagtttgcccttcctctacaggtccccctccggatgattgacagtgtggagagccgtgatatgttccagttgcacatttcctgcaaggactccaaagtggtgaggtgagaacaacggagcctcactcaggtcccctggccctagtcttgtccagttctctgtgctgcagggtttctctggtgcaagagaggaaagatcctgcctcactttccccagttggaagaaaaggtgaagaccatgttctgggttgggaggtcagtttactgacccataggatcttgacctgaaaaaatgggggtaatgcctagttcatggagtcatcgtaaggattaagtgagataatgtgtatgtgtatgaaagcaccgaggacaatatctggcacagagcactcatattattgttggtttatttatttattcatttgatatacatgtattgagtaccctactcaatgccagcctgttttaagccctggggatacagcagggaacaaatagacaaaattttgccgcctcagagagcttacattccaatgaggagataccaaccgtaagtaataagtaaaatttgtgaaatgatagtaagtgtaaaggaaaaaaataaagcagggaaagggaataaggagtgctatgagggtgaagattgtaaaacaatcaggctgggcacggtggttcacgcctgtaataccagcacttcgggtggccaaggtgggaagatcccttcagcttaggagttcaagatcagcctgggcaacatagygagaccccatctctactaaaaatagaaaaaattagccaggtgtggtgatgcgtggggagatcrcttcagcttaggagttcaagatcagcttgggcaacaggacgagaccccatctctactaaaaatataaaaaattagccaggcgtggtgatgcatgcctgtagtcccagctactcaagaggctgagataggaggacctcttgagcctgagaagtcgaggctgcagtgagctgtgattacaccactgcactccagcctggatgacagagtgagaccctgtctcaaaaaaacaaaagtgatcagagaagctgcaccgaaaaggtggcagtcgagtcaagacttgaagaaagtggccatgtggctatttggtggaagagtgtgccagagacagagaacggcaagtgcaaaggccttgaggtgggtgtgtgcctgcatattgggagactggcagggaggctggtgttgttggagtagagcacgtgtgggtgagggtagtgggttatatgacctgagaacaaagccgggtgtcagacactttggctgtcatgaagactggcttttactttgagggaactgagaaaccactggaggattttgagcaaaggagtgatgtgatctgattaatgtttcatagaatcacactggctgctatattgagactagatgaaagagaatgggggcaagagcaaaagcaaaaactgggagactagttaggaagctattgcagttacccagatgagagatcatggtggcctgtctgaggtggtagcagccaaagcggtgagaagcattcagattctgggtgtattttgaaggtggagatgagaagatttgctgacagatttgaagtgaaagaaagaggaatctggatgactccaaggtttattaaaaggatacctactttagagcctaccatgtgctcaggtctgtggggcattcagaaggagcattcacattgcccttcccttcaaggaggctaaactctagctgctggaagaagatttaacatgtggcaatatgctatgggaaaatgtgttgcttagtactccaagtaggccaggcacagtggcacatacctgtaatcctagtactttgggaggccgagggaggaggatcgcttgagcccaggagttcaagatcagcctggacaacatagagagaccctgtctctatgaagaatttaaaaagttagccagacgtggtggtgcacaattatggtctcagctactcaggggactgatttgtgaggattgcctgagcccaggaggtcgaggctgcagggagctgtgatcgtgccactacactccagcctgggtgacagagcaagagcaagaccctctctcaaaaaaaaaaaaaaaaggtatatatatatattccaagcacattaagaatcaagagaggaaggagtttctggaatagagtaggctgggaaggcttcaaggaagaggtgagactgaaactatcttcaaagcatcagtaggatgtggctaggcagagaggagacattatcaagcagaagataaaccaaggagatgggaaggatgtgagcagaacttcccgcctgaagcagaaggtttgagttagggagtcatgggagataacactggtccattagggtagggacaaggagtgcagacgttcagggccacatggtagcatttagatttgatacgagaaacagtagcgccccattcgagaggataagtatgcctcaaacacaggagttcttgggaagagaattatcacaagagacaacttctgttgggtgttggccagtgtccctcgtccccccaccctgggtccccactgctttacctcttgctttgcagccttctctcctcacagccttcctgtggctgtgtttttggccctgatagccccatggcacaactgyactttgcctcacctaggcctgtggcttcttgcctggcaggtgccacttctccacttttaagcagtgccaagagtggctctcacggctaagccgagccacagcaagacctgccaagcctgaagacctctttgcctttgcctaccatgcctggtgcctggggctgaccgaggaggaccagcacactcacctatgtcagccaggtgaggccagtctattttctttgggaggctgcttcttaccccttagttctcatccctcctccactcctgcacattggtgctctgggaagctaaccatcgtgggggctctgttgcaggtgagcacatacgttgtcgacaggaggcggagcttgcaaggatgggctttgacstgcagaacgtctggagagtctcacacatcaacagcaactacaagtgagagggttggggaccaaaacaccttccacaccaaactacttccgtgtttggataaartstggtgggcacakcttctgagtctgagagggaggaaggctcatggtttctcttcccacaaagccatccccagggatcctgtcatcacatgttttagacccagtgcagtgacccccacctggtctcttctcagattgtgccccagttacccccagaagctgctggttcctgtgtggatcactgacaaagagctggagaacgtggcttccttccgctcctggaagcggattcccgtggttgtgtataggtgaggcagtggggctgggaagtagggaggccatttcttatgcaacaaggaaagagtcaaaattggagattttgggtaacctggttgactgagaattgacactctatggggaagtatgaaataactttaaaacaaaaactatcttagttttttctcctaagaataaggctattagggagtttattcattccccccctttttttagagtgtgtgtgtgtgtgtgtgtgtgtgtgtgtgtataaaatagtacattattttatacacacattagtacaggggttggcaaactggcctgcagacaaaatctggcttatagcctattatataaaacggcttgtaagctgtgagtggtttttacatttttaaagggctatttttaaaaaaagcaaagaagaatacatgacagaaactggttgtgacccacaaggccaaaaattgttgtctggttttttactgaaaatgtttgctgatccctgcactagaatattgtagctaaaatagagtgagacaggaagtaaccctgaagtttggaattgttcctattcttggctcagccaggccttgttctcctgctgggtgtctgtacctggagcagttgctgtgcagatttgatgagtcaaggtcaccttggacatacagagcccatttgagaaagtatgtgtgatggtgctttgtaaacggtgaagcctgctagtgacgttggggcttttggttgctgttatggcctggatgagttggtagcccctgctggctctagagactttggtctaaccccctgaggtaggcctctggaggcttcgaatgccaagggcattacggtttcttctgttttgtcagacacttgcgcaatggggctgccatcgcccgctgcagccagccagagatcagctggtggggctggcgcaatgctgatgatgagtacctggtcacgtccattgctaaagcctgtgccctggacccggggacaagggccactgggggctccctcagcaccgggaataatgataccrgcraggcgtgtgatgctgactttggtaaggtgtggatgatgctaaccccccagggagcaggccccctccttggcttcattggctcccagggagtccccagtgagagtctgggaagatgacaacacacgggrtgctggggtccctgccttgtcagaagctgtggggtatgaggggtctctagttgcatgttctgccttctgagagggagtgccagagggccagcaagaggttgggtggctggctgactcagggactccttcctgctgtgtgtttagattcttctctgactgcgtgctctggagkggagagcacagcagctcctcaaaagctgctgatcctggatgcgcgatcctacacggcagcagtggccaaccgggccaagggtggaggctgtgaatgtgaaggtattgctgttatcccagtgtctgcagccagcctgtgctctgggtggctttggtgaggagggggttgggggccatttgtatagtggaaagagcccaaacaaacctggcttgtaatcacaactttgctacctactagctatggctatgactatgctgaagttgcttaatctgtccaagctttattttctcttctataagaaggggatgttacacactttgcaaaattgttgggatgattagaagttgcatatgtaggctgggcccagtggctcatgcctgtaatcccagtactttgggaggcagaggcaggcggatggcttgagctcaggagtttgagaccagcctgggcaacatggtgaaaccctgcctctatcaaaaatacaaaccattagctgggcatgatggtgcatgcctgtggccccatcccagccacttgggaggctgaggcatgagaatcgcttgcatctgggacgcagaggttgcagtgagctgatatcatgccactgcacctctagcctgggtgaccatgagaccctgtcttaaaaaagaaaaagaarttgtatatataaaattattgccacagagcagctactatttattgagaattgattatatattgtctttctaagtactgctatcatttgtcattactgttactattattaatatatggcacctgagtctccagagatacaagtgtgattcagatttcaagactgtatttagttcctatcctggagtgctctgccctgccaggaaagctttgtccaccaggaccactcttgtcctggatgcctgtttccaggacgtgctttttttgtttgtttgtttgttttgagacggagtctcgctctgtcgcccaggctggagtgcaatgtgccatctcagctcactgcaacctccatctcccaggttcaagcaattctcctgcctcagtctcccgagtagctgggattacaagtgcctaccactatggccagctaatttttatatttttagtagagayggggtttcactgtgttagtcaggctgttcttgaactcctgacctyaggtgatccaaccgcttcagcctcccaaagtgctgggattacaggtgtgagccaccgcgcccggcctaggacgtgcttttatgtcccactctcctgtcatgtctacagagtactatcccaactgtgaggtcgtgttcatgggaatggccaacatccatgccatccggaacagctttcagtacctccgggctgtgtgtagccagatgccggatcctagcaagtaggtgttccctacttggattccttccagtctcattccttacccagtacctcttattcttggaagattagatggggagatgagaagtttggagagcaggagacctgagggcctgggtggagttgggtgccgtgggctagttccaagaacccttccacttctcagccaacactttggcgtggtcacaggacatggattcctttcgtttggatcagttgttctactcaaagaacacagagaactggggagaggaaatggctgagtgtgcatgtgatgcttctcagttcctcttttgagcttcagatgcttttatctgctgtaggtcctgtcttccctaccttcctgctagatacctsttgtccaaaaggccctgggttgtacctcttggtttcagttctcaatggggactttgttgggtggggctggctgtggatggtggagagactgctgtggcctcagcaccctttgtgaccgacttgatgtctgcttttgtgtagctggttgtcggcactggagagtaccaaatggctgcagcacttgtcggtgatgctaaaagcagctgtgctggtggctaatacagtagaccgggaaggccggcctgtgctggtacactgctcagatggctgggaccgcacaccgcagatcgtagccctggccaaaatattactggacccatattacaggacgttggaggtattgagaggaattcggtgggaaaaccagaaggaatgtggcaggagggaaggtgttgagccctctggatctgtcctggggatctttcagtagaggacattggtggctctttttttctttttttttccaactcccaaaggcttggaaaattggtggctttgagtcctcttctaggtccagtcctatttttctttgaagctgccagcttcctgctttgggcagttcccaggggagtagcacatcagcatttccagagaggccctatgtttgaacagtttctttttttgcagggcttccaagtgttagtggagtctgactggctggattttgggcacaagtttggagatcgctgtggccaccaagagaatgtggaggaccaaaacgaacaatgccctgtgttcctccagtggcttgattctgttcatcagttgcttaagcagttcccctgcctgtttgaatttaatgaagcattcctggtaagtcctaagscctgtgacaacagggatggggggaatgacagcccgaggcccccaggtgcaagctctctctgctttctaggtaaaactggtgcaacacacatactcctgcctctacggcaccttcctggccaacaacccctgtgagcgagagaagcgcaacatctacaagcggacctgctctgtgtgggcgctccttcgagctggcaataaaaactttcataacttcctctacacacccagctcagacatggtgagtctgagcccttttcctgtaggtgctatttagaaacctatagggagaagcagctgagtcagtagggaaaatgtagagtcaagggcttagggaaagaaaaaggacaaggaactcttgacaaagcactagtattgggctgcttccctaggtcctgcatcctgtttgtcatgtccgggccctgcacctctggacagctgtttatctgccagcatcatctccatgcacacttggggaagaaaacatggatctttacctttccccagtggcccagagccaggagttctctggccgctctctggacaggtaagaaaagcccttcttcctttctcctctctccactaggaaggcagtaactgtttcccatctcatctaaatgttctctttctttcttttttttgagacggaatctcrctttgtcgcccagggtggagtgccagtggtgcaatcttggctcactgcaacctccacttcccgggttcaactgattctcctgccccagcctcccgagtagcttggattacaggcaccgaccaccacgcccagccaattttttgtatttttagtagagatggggtttcaccatgttggccaggctggtctcaaactcctgacctcaaatgatccacctgcctcggcctcccaaagtgatgggattacaggcgtgagccaccgtgcccggcctctttctgaggtatttaaaagcaacttcttgagtcatttgcaggaaaaacttggccaagacttgtagctagcctggagtgcactctgtgtgttttcaaggtcctctgaagataaggttggatactttctttcctggaggagctgctatcactctgtatgatatacccaagcaggggagagaacaaaacagaaaggactgttttaggaaggtttgtgggaatggtcttgatttttgttcactggtacagggcatggggagcttgctatattagtagcaacctttgttgtgtccagcattagcttccagaaacatmtgactctcagggaaatgggttcccagcaggaggatggccttatattactccctcagaaaaaggccagaatttaaaagggagacataaaattaggtatcttctggctcaatgtttggggagaagtgagatgatgttggttaatttatgagagtaatacctatttcttgttttaaaaaaatagtcaatataaaagtagaaaatgaaaatcttcccttatgatccttgtccccacaggtgtccactgctaacatttggtacgtgtctttccaaatgtttatctctacataggtaaatccacactcacgctttcatatggaaacattttttataaacaaaatcagaatatttttacatacgctttttacttttttgcatattctgcaaattgtttttcccgctttgtattaggttgtcttctcatgacagcacatctaaattccctttcttgtttttattggcttcagagtagtccacaatttatataaccagattcctactcatcatttaggtaatttccatttttttttttttttatcattacagggagtgctttacatccttatatgtgtagctttttaaaaatttgtaaattacaggctgggcacggtggctcatgcctgtaatcccagcactttgggaggccgaggcaggtggatcacttgaggtcaggagttcaaggccagcctggccaacatggtgaaaccctgtctctactaaaaatacaaaaattagccgggcatggtggcaggcacctgtaatcccatctactcaggaggctgaggcataagaatcgcttgaatctgggggggtggagattgcagtaagccaagatcacgccacgcactccagcctgggcaatagagtgagactccatctcaaaaaaaaaaaaaaaaaattgtaaaatacacatgctatttaccatctacaccatttttaagtacatagtttagtagggttactttgtgtgttttttttttgttttgtttttttgtttttgacagagtttcgctctgttgcccaggctggactgcagtggcacaatctcagctcactgcaacctctgcctcccgggttcaggtgattctcctgccccagcctctcgagtagctgggattacaggcatgcgccaccatgcccagctaatttttgtatttgtagtagagacggggttttaccatgttggtcacactggtcttgaactcctgacctcaagttatccaccatctcggcctcccaaagtgttgggattacaggtgtgagctcctgcgcctggccagtagggttactttgtatgcatatttttgcatttgtgctagtatttttgaatgaaaatactgtgctcaaaggatatatatacatatatacgcgtatatatatatacacatatatgtatatatatccgtatacatatatacatgtatacgtatatacatagacatatacatatatgtgtgtatatatgtatactatatatatacacacatatatacatatatacgtgtatatatgtgtatatatatctcaaattttgatatttgtttattggctgagagcttttttgttttttagagacagggtcttgttctgtcactcaggctgggtgcagtggcacaattatagtaacctcaaactcctgacctcaggtaatccttctgtttcagcctcccaggtagctaattagctcattaggcatgtgccaatttttattttttgtagagacgggtctgttgcccaggttagtcttaaattcctggcgtcgagtgatcttcctgccttggcctcccaaaacactggaattacaggtgtgagccaccatgcccagcctggctgaaagtttttaaagttaaaatataacatatgttattggttgaatattataaaggaaaacaaaaagcccagcatcccmaattattggttttagggtcttttgaactaagtcattgtgaggggaccgtgataggtttcaggatttcagtgattttttttttccttccccaaactatgcagaatttggctacaggttcataggtttacttttcctgggagaggggccataacttttaatcaaatttttaataagctctgtgacccatttaataatcatttcattaacttagtatctgatttatcaattcaacaaatgtttctttaatacctacaagttgcgtattactgtactaggttttgtgggctacagcaaagaaatagaagatattggttctactttcaagataattttaagctgtaagataagacacagaacaactagagagagcaattcttttttttttttttttttttttttgagacagaatctcgctctgtcaccggttggagtgcagtggcgcaatcttggctcactgcaacctccgcctcccgggttcaagtgattcttctgtctcagcctcccgagtatctgggactacaggtgcccaccaccacacctggctagttttttgtatttttagtagagacggggtttcaccatgttggccaggatggtctcgatctcttgacctcgtaatctacccgcctcggcctcccaaagtgctgggattaccagacccggccaactagagaacaattctaagtcaacatctaagcagataagaatgtgtgtagttcaggctgggtgcagtggctcatgcctgtaatcccagcactttgggaggccaaggtgcgcagattgcttgagcccaggagtttgagaccaacctgggcaacatggtagaaccccacctctacaaaaaatgcaaaaattagccaggcatggtggcgtgcgcctgtggtcccagctacttggagggctgacgtaggaggattgtttgctcccagcaggttgaggctgcagtgagctgtgatcatgccattgcactccagcctgggtgacacagcgagaccttgtctcaaaaaaacaaatgtgtgtagttcaaagctttagagaaatgatgtgttttttaaaagggtcacttggtggctgttttactcaggaaattttcatgaaggaccagacaagaactgtgggtctttttgtgttctgtgtatctggcttagaacctggcacgtaataagtaaatttaaataaatttactaaagtaaaaatttacttaaaactggacaaatggctgggcgtggtggctcatgcttgtaatcccagcactttgggaggccgaggcgggcggatcatgaggtcaggagatcaagaccatcctggctaacacggtgaaaccccgtctctactaaaaatacaaaaaaaaaaaaaattagccgggcgtggtggcaggcgcctgtagtcccagctactctggaggctgaggcaggagaatggtatgaacctgggaaggcggagtttgcagtgagcagagatcgcgccactgcactccagcccgggcaacagagtgagactgtctcaaaaaaaaaaaaaactggacaaatgaatgaaataaagggagttgtgagctcagtaacaaggttagtggagaggggtccaaagcaagtggatacatgagaggtagggttttctcgctccattgcccagctggagtgcagtcacatgatcttctcagctcactccgcccaccgggttcaagtgattcttctgcctcagcctcccgagtaactgggattacaggtgtgtgccactacacctggctaatttttgtatttttagtagagacggggtttcgccatgttggccaagctggtctcgaactcctgacctcaagtgatccgctcaccttggcctcccaaagtgctgggattataggtgtgagccactgcacctgggtgagaggtagtttttttttttttwaaaaaaaaagaagttctgtggctggcaggggttgagaaggggctattttaaggaatagtggaaatataggacaggtcattgagggcattgaaggctttaaacattacagtgaagagtttattttgattcagttgtcaataggaagtcattgtaggaagttactgtggtctgctgacagtgggatccttggagaactaatcagtgagtacagggtagctggaggcacagagaccagccagcactgctgtagtagttcagatatgaggggaagagtccctggcaaagagaaaggattaaattcagaagcactgtagagaaccattggcaggctacagaattgaaagttggagagtagaagtgaaaagtactttgggtcccaagtatctgagcttaaaaagtaggagaatattagtaccactaatagacattgaaaggtcgagaagaccagccagtttggggagaaagcggagatacagggaaattgggattgaaatattagttgacagcaaagaaggaggtgtgttgtaggcagctcaagatggagagtagatttcgagaaataattggtataaagattttaaaggaaatggtctctgtaacaactgacctgacttacctttgattctacctttccctagatcaaaaatgtccttcttcttctccttcttctccccctcctccccctcctcccccctcctcccccctcctcccccgcttctccttctccttctcctcctccttcttcttcttcttccattaaagtcataaacacattcttctatacccatctcaaatcctaccctctctctgtagccttccttgacctcctagctggatgagctctctctccttgttgtaaactcaggtattattatctctgtcaacattgctgactaacctttggtacacatagaatgagttgtggaggatggcagaatgttgttatttgaatttggatgaagagcacatggaagttaattatattcttctttttgttgttgtttgagacagagtcttgctctgtcacccaggctggaatatagtggtgcgatctcggctcactgcaacctctgcctcttgcctcccaggttcaagcgattctcatgcctcagcctcccaagtaggagctgggtttacaggcatgcaccaccatgcccagctagtttttgtatttttagtagagatgggatttcaccatgttggccaggctggtcttggacttgtggcctcgagagatctgcctgccttgacctcccaaagtgttgagattataggcatgagccactgtgcccagcatattctttacttcttttgtatgcttgaaagtttccataataaaaaataaaatgaaagaagtcagctgtggcacttaaaagaatacagatccctaggccccactcttggccattcttattcagtaggtcttgggtggaccctggttgtctggatgtctaagaagatccactaagatgcctgatgtgtatcacacattcaattggcacctagcagtggaaacctsatgttgtattttgagctcattcattcatttctcaagtcatttgcccctggtactgtgctaggcgctggggattcaaataagacagagtcctgccttcaggacacttcagtagagggagttaaacaagtaaacaataaagtgcaataatgtgttataggaagcactgagcaatgtgctttgatgtggattcttttgtttaatcttcataatagctttaagagctaggtactttacctttattccatagatgagggatctgaggcgtagagaagttaaagtcacacagcaaagatgttgttaaattgggatttgaaccctgcctatgggactccaggaactataatgataaccactgttattgccttcctggaatttcgtaccattaaaaaaatcaaaattcgtcacaaaaggtatatcaagtatgtataaaacatttgttttaagtttcaaaaaccgattacttaaaataagctgcgttgtaactgcctttggggaatttttccgcataggctgaactgactgagccatctaaaaataggaggccagtgaagcctctactgtttccctggtgaatttcactcaagttttcattgctctaaggactttgaactgcattaataatcaggatggtcactcttgaaaatgtcccttaacctatctggtatatatgaatgcctctagaactctgagtgctatatactaggggaagtttcatggggccttgggaagcagaggagcacactgctgctaagtggttatcaagagcagtgttgagggagttgtgttgtcttaataaagtttgtggttattatgtttgtggttggttgcctgtattttgaattctcatagcatctctacaaggtatgatttattatcatcattgtataaagggagaaaccaagtatctgagaggttaatttacttatttgtagtcatgtagctaattagcgtcagagccaatattgtctagctccaaaacccatcttctttctgttttactgtgatggaggcagtgggatattgggtttgagtctcaggtatagtcctagctggaacagtagattcagaaggcattggcatagaaggcagctgaaaccactgtagtggttgagattgcccagggagactggtaggttgagtgctgacaaaagctgaggatagatttttgggttccggaggacacggtccatgtctcatgctttttttacagagtaaactttcagtgaacattggttatttgtgatcttaagggtccttatttctaaacttaagtgttcttaagtgtcattatttctaaactctggctttgatattgctccattgattcagttccatatattgtattgcaagtgcccatctcctgacctggaggtgttatatttgtctttccagattacctaaaaccagatccatggatgatcttctttctgcctgtgacacaarcagccccctgactcgtacatccagtgaccctaacctgaataaccactgtcaggaggtcagggtaggcctggagccctggcacagcaatcctgagggatcagagacaagctttgtggactctggggtaggagggcctcagcaaactgtaggagaagtgggtcttcctcctcctctgcccagcagccagaaagactacttgagcaataaacctttcaagagtcacaaaagctgttctccaagttacaaactgcttaataccgcagtgcctcgggaaatgaagagcaacacctctgatcctgagatcaaagtcctagaagagactaagggaccagctccagacccttctgcccaggatgagctgggtaggactttagatggcataggggagccacctgaacattgtcctgaaacagaagctgtcagtgcactctccaaggtcatttctaacaagtgtgatggagtttgtaattttcctgagtcttcccagaactctcctacaggtacgccccaacaggcccagccagactccatgctaggtgtgccctccaagtgtgttcttgatcacagcctcagcaccgtttgcaacccaccgagtgctgcctgccaaactcctctagacccaagcactgacttcctcaaccaagatccctcagggtctgtggcaagtatctcccaccaggaacaactgagttctgtgccggatctgacccatggggaggaagacattggtaaaagaggaaataataggaatgggcagttattggaaaatcctcgctttgggaaaatgccattggaattggtccggaagccaatttctcagagccagatcagtgagttctcttttctagggtccaactgggacagcttccaagggatggtgacttcattcccaagtggggaggccacccctcggcggctgctttcctatggctgttgtagcaagaggccaaacagtaagcagatgcgggccacagggccctgctttgggggccagtgggctcagagagaaggtgtgaagtcacctgtctgttctagtcattccaatggacattgtactggcccaggaggaaagaaccagatgtggttgtccagtcatccaaagcaagtctctagcacaaagcccgttccactgaactgcccttctccagtgcctcctctgtatttggrtgatgatggactcccctttcccacggatgtgatccagcataggttacggcaaatcgaagcagggtacaaacaagaggtggagcagctacgtcgacaggtgcgtgagcttcagatgaggctggacatycgtcactgctgtgcccctccagcagagccccccatggactatgaggatgattttgtaagtagtcaccaactgccatacacccattatttactctgttcatccagccttccctccattcagcatttattcgttgggtacttgctgtgtgccactgagttaggtgcctgggctataggatgaaaaacaagtaagcaattagaatgatgtttttaagtgctatgattgaggaggcatcaggtgttagagggctggagtggagtgaaacrtcaaggaagaytttcttgagaaggtaatgcttgagctgagtgctgaagaatgtgtgatacttagccaggtagacagtgaaaacaaaacaccatttgcagaagcgtagtggcaatagatactccaatgatayggcttaaaaagatgggacatgcgagtatatatgtgtacatgcatgcatacacgcttacactggggctatgagagacagtcaaatagggtggtgggaggtgacattggagaattaggtggagattacaagggtcaggttgagtgcccttcttgtttggattttacccttaaggcaataaaattttaggccagtgcacaatatgatcagagttgtagtttaagaaaatgactcttgcaacaatgtacaatttttttttttttttttttttgagacggagtctcgctctgtcacccaggctggagtgcagtcgtgcaatctcagctcactgcaacctccgccctcccgggttcacgccattctcctgcctcagcctcctgagtagctgggactacaggcgcccgccaccatgcccagctaattttttttttttgtatttttagtagagatggggtctcactgtgttagccaggatggtctcgatcccctgacctcatgatccgcccacctcggcctcccaaagtgctgggattacaggcgtgagccactgcgcccggcccaacagtgtacaattttaatgaggcagttgagacccagattgggaggctggtaaggtcattttggaataatccaggtgagagatgaagactataggctgtgcagtgttgggcagcctcaggttctggcaccatagtccttggggagcttctaggagccagcttcctctccatggtatcttgccatttacacagacactttccttccttctgttaaggtgctccccacttgcctgcttctcacttctctggtgctttaaacaggagtcagcaaactttttttttttttgtaaaaggccaaataataactattttaggttttgtgggccataccgtctatgttgcaactactcagctctgctattgtgcaaaagcagccgtagccaggcactgtggctcacgcctgtagtcttaggactttgtgaggccgaggtaggtggattgctttagccaagaagtttgagaccagcctaggcaacatggtgaaaccccatctctacaaaaattacaaaaaattagctggacatggtggtggacgcctgtggtcccaactactcaggaggctgaggtgggaggatctcttgagtccaggatgttgaggctacagcgagccgtgatcatgctgctgcattccagcctgggcaaaagagcgagaccttgtctcaaaaacaaaacaaaaagcagccatagacagtaagtaaatgaatgaatgcagctgtgttccagcaaaacctgatttacaaaaacaggcagtgggctagtttggcctgtgggccatagcttgccaacccctggtttagaacataacaagagtctttctatgctgtggtgtagcatatcggtaagagtgtaaatctgaagctacaatactaggttcaaatcccagctttactacrtatcagctctttctctgtggcttcattttcttatttgtaaaatggggatattagtagtatacattgtaagactgtcataagaaataagttcatgtgtgtaatgcacttagcacagtgcctgacacatggtaaacagtaagcgttaatgatgatgaagataatttgttgtctttgccttttcatcagacatgtttgaaggagtcagatggcagtgatactgaggattttggctctgatcacagtgaagactgcctttcagaagcaagctgggaacctgttgataagaaagagactgaggtatgtttaggcacatatgtggtgggtacttacgtgagccagtgagtcatcatattttccagagatgaatgacatgctgtagactgagctgtcccccagaggagtgtcagcctggtaggcaaatggtagccagttatgaagataagccttgtctctttctgctggggtgctttcctcattgcaatgttgctcttccagtctgtcaacaaggaccaggaatttttctttgtgccttctattaggtgactcgctgggttccagaccatatggcatcacactgctataactgtgactgtgaattctggttggccaaacgaagacaccattgcaggtaagatgttttgtatgatttagtatgactcaaaaaacagggcaggccaggcgcagtggctcacacctgtaatgccaacaccttgggaggccgaggcaggcggatcatgaggtgaggagattgagaccatcctggccaacatggtaaaacctgtctccactaaaaatacaaaaattagctgggygtggtggcgcatgcctgtaatcccagctactctggaggctgaggcaggagaatagctcgaaccagggagctggaggttgcagtgagccgagattacgccactgcactccatcctggcaacagagcaagactctgtctcaaaaaggacaaaaaacaaaaacaaaaatagtgtaatacatatgtatagaactaagtggaattagtttggaagtggacacctctttatagaaactatttttgtttgtccccaacttttcatttagtatcactcattctcagtatattggcatttctyaatattaattaattaattatttttttattagcgatgggctcttgctatgttgctcaggcaagtctcaaactcctggcctcaagcgattctactgcctcagcctaccaaagtgcagggattactggtgtgagtcaccctgcctggccagtatattggcatttctgatgaactcttccctctttctgctttgacagaaattgtgggaatgtattttgtgctggatgctgccacctgaagctgcccattcctgatcagcaactctatgacccagttctcgtctgtaactcatgttacgaacacattcaagtctctcgtgccagggaactcatgagccaacagctgaagaaacccattgctacagcttccagttgaatgccggggagaaacctgtccaattttagcaggtttgaagggaggatcttcttcagttgtagtttggaaggttccttggtgtggctcatgaaatcacagagctcagagataccatcttgagaaatcctccttggtatcatgaaactggagcagaggaattgcaatttagcaggaggtcctctactggtgataccctcaccttggggtaatggtcctaacccagacccagggtctggaagcttaatgttgagttggtgactccagcctctttctcctggaggtcacaagatgatgattgcgtagatgttgcctggtgcaaagtgccccaaacagcaatagaaagrcatatgtataaccaaactccaagtgataaccagacccatctctcctccaccttgacaaaagcagattatagtatacaaggtaggaattcctgtcctatttgagatgaactatatcctgtacctctgtgctctgtgtctgcatgaaggctcagcctttagaggcactccttctagttgcattagtactgtctttctgtggagtttggtttgaagactggctcagcaagtggaggtttcaatgtatttttcagttggctcatcagccagcattggtgaatattcagtttaggggaacagttctagggagtgagacatttttgggagcagaggaaaactctgctgatgttcggtcctggcaaacattgagttattttgagctgtgaaggcagtcgtctctgttacacagtggcagctcttgagttatgcactgtgaagaatgagaagggaaaagcaaaaattatccttgtgaaatatctgctgattgtgccctactctttgcacctgacttttcctagttgtcctggtgctaacacaggagctacaccttgatcctctcctggcatgaaaataaaacaaaggttttcgttgttgttgttccattgcccatttcccccatgttgtctttcccttggctgatgcctcctctgggtcacattgcttcttatcctgaacacttgacaccttgagggtagaatttagcgtttggtttttacctcctagcatatgctgtttggtatgtgagggtttcagtacaaatgctgctgtctatttctgtgcacttaacaatggaacccaaacagaagagaataaagccttgataccaaaattgggaaagaacatgtgtccatttggaccaaacgttgttggtttttaaaaaattttattttgtttttttgtttttgtttttgttttttttcatcttaatatgtaccagtggcacttaaccaaaagatacagtgatatagccatgtactgtgggtgggacagatacagtctccttggcctataatgaaaccactaggactttatacagttttccttaatttgttgacatataaatggtaaattatatttaggcttatcctgttttgaaatgatggtagtcatctttcttactgctactttcatgttgctttctagaaaacagcatttcattccaaaataactaggatctgcatttagaacaagaatcattatttgtcctgaccttttcagtcctacagagacgcatctgtggttcttttgtacttgccatagatgtaacctaaaaagttttggcatatttaggtcagcctagcggaactttttttttcatttaaatggagctgaataatggagattttgtgtctgcaaaattcctgagatcattgaaaaagtaacaagctgttccttgtttctgatacataaaattattttaagcattttatcaatcattaaaatttactgccagttgtgagtggctttttaattaacttgtctttcattgcacttcactctgcctgttttcaaggggagtaagattggtaacatttggggagactgtatctgtctacttagcgtggctgttttgagggactgtcccatcagtgaacaaactgcatggccttggagagagactctgggctcttggctcagatgtkttmatcaaatactcctttcagagctgttgtgggtgtaagtgacatgatgtggccaaaaatccaaactgtgcagttgcgttgtgacaaacatgcaatgtgctgtaaaaattcratacagtttaaataaaatctctatattagtgctgctttgttgggtcgttttattttcatttctaaaaaaacttaatattcacttattctttgaccatgagaagagtagaacattgtacccctttctcccagcaatttccaatttatttattttgagatggagtctccctctgttccccaggctggagtgcagtggtgcgatctcggctcactgcaacctccgccttctgggttcaagcgattctcctgcctcagcctcctgaacagttgggactacaggtatgctaccacgctggctaatttttgtatttttagtagagacagggtttgaccatgttggccaggctggtctcgaactcctgggttcaagcagtccacccagctcggcctcccgaagtgttaggattacagacatgagccactgcgcccggccaatttccgttttcaaatgaacctctctttttgaatcagcacagctcttgttacattcttatttattgattggctagggatcgattcttatggataccgtagaattctgtcccatctttatttctctttaatgtctaaaatgccaccagctagttgggcaggcacacaagatagtacttagattcttgtgattccctcctcctagggacctcagttttcatctaaccttgagtaaattgtcttgaacaaatactgacttaaaagagtgtatcttaaaagatacaaagggctactatctaaaaggtgagttcgtttactcaagatattatacctccagtagcatcatttttgtttgagaggtaagcagttccactgttagcaaagattacagaccagaccctttggtccccagaacgaccaactctgctgcctaacgcacactttctctgcattccaagtctccactagttggctgggccgaaacacacgcctcttggtattccacggtggataactgggcttctctcttgtcaggacttagaacaccccggcagacagccttcccggcctgaagtctgggaacgcctggggaaggggctcctgcccgggtcccgcaggcgtccggcgggccgagctggggcacgcggccgccgagggggaggtgcccacgccgcgtggcgggaactcgaggccccattggccgcgctgggaggcgccgcggggcctcgtgcgccaacggtccctggtacgcggcggatgggcgccggcaggagcgggcagggcgaggcgaaggccggggagggatcgagaacggtgtgggagagctaggctcggggggcgaggccccggcccggcggggcgatggaggcgctgctctccacccccatcaaccccaacaacttccccgccaagctgtggcgcctggtgaacagcccgcgctaccgctccatccgctgggacggccgcggcgaggggctgcttatcgatcagccgctcttcgaggccgagctgctcagcccgcccgggccggggggcggtggcgggactgcgggggccggggccgagcccgagctcttcaaaaccaccagcttcaccagcttcatccgccagctcaacctctacggcttccgcaaggtggtgctgggcgggccggggggcggcaaaccggcaggcaatgggccgctccatcacttccacaacccgcacttccgccgcgaccagccacagctgctcgtgcacctcaagcgcctcaccagcgccaacaaggccaagctggcggccggcctggaggtgccctgccgcccgcccaaccgcttccagcggctgctcatcacctcggcctccgccgccaccgcgccactgcagcaccagcagccgccgccgcccgcggggccccggcccgagccgcacggtgagtccggactgcccgtgccctcgcccacagtgggcacatgggcggcggggagcaaccgccgctggagggcgcattttcgcacgtcctcacgctatgggcgtcggaaaggcgccggggacccattggccgctgtgcttcccgagactggcggtcccgccaccgccgccgttctcagcggcaccagcacggtggccaccggccctcccctggagggtccgtaagcattcggccccttctgagcccactggcagcaaaagggacctccgcctcttaggctcccttctactcgtccccggtttgaaccccaggagtttacctggttgtaagcctccgtttaccttcctgagacccacactgtccactgtaaacatgtggactcagtagtccttcgttgaaacattgggtctggaagaaacaaaaggggctcctttgctcccgtgggaagcagagtggagtcaccctacgggttaaggcgggatggaacaaaatcgtagtcaagagaatttagaacattacggttgggcgtggtggctcacgcctgtaatcccagcactttgggaggccgaggcgggtgcatcacgaggttaggagtttgagaccggcctaaccaacagggtgaaacctcgtctctactaaaaatacaaaaattagccaggcatggtggtgcacgcctgtaatcccagctacttaggagactgaggcaggagaatcgcttgaacccaggaggcagaggttgcagtaagccgagatagtgccactgcactccagtctgagcaacagagcgagactcggtctcaaaaaaaaaaaaaaaaaaaaaagagagaacttagaacattacaatagcaggcaagggaaagttttggaaaaggtgcctgcagtggaaatttgtccttgaagagggctgccaccttccacctattggcacatctaagaaatcttagaagtgctacgacaatcatcagatttaaggttctggttaatgtgtagaatggtagacgttgtttatataccttaagagcaaaaatacaacgatacatcgtggcttacaagatatagttcctatgtagaatgaattggctacacatttctttcattgaagcaaattagagcttgatgcttccttaaaggggtatgattagacaaacataaggcaaagatggttttctttacagctgtcaagttttagttaaaaaagaattttagaaagctcacatttacagcctttggagttttcactattggctacaatctttcagtattgaaaaaactttttggtatacatctgtatttagtaaaagttaagaaaccctctgtgatagtggattatttattttttattatttgtttatttttttgagacggagtttcgctcttgtcacccaggctggagtgcaatggcgcgatctcggctcaccacaacctccgcctctcgggttcaagcaattctcattccttagcctcctgagtagctgggaatacaggcgcgtgccaccatgcccggctaatttttatattttttagtagagacggggtttcaccaggttggccaggctggtctcgaactcctgacctcaggtgatccgccagccttggcctcccaaagtgctgggattacaggcctgagccactgcgccctgcctattttactttttgagattaagtctcactgtgttgcccaggctggcgtgcaatggcaagatctccgctcactgcaacctctgcctcccgggttcaagtgattcttctgcctcagcctccagagtagctaggattttacaggtgcctgccaccacacctcgctaatttttgtattgttagtagagatggggtttcaccatgttggccaggctggttttgaacttctgacctcaggtgatccgcccatcttggcctcccaatgtgctgggattacaggtgtgagccacttcacatggccaaattattttatagacttgatttttttttttttttttttgagatagggtttcactctgtcccccaggctggagtgcagtggcaagatcttggctcactgcaacctccacctcccgggctcaagggatcctcccacctcagcctcccgagtagctgggactacaggcgtggccaccacacccagctaattttttgtatttttggtggatacagggtttcactctgttgcccaggctggtctggaactcctgggctcaagtgatctgcccaccttggcctctggaagtgctgggattacaggcgtgagccaccactgcgccaggcctgtagacttgatttttgatgctcttccccctcttccaggaaggcaagggtggcaatattccatttctctgtttaaagagtccatgatatgaagcagtataccaagaaaccaacagggtgtaatcattcattcattcttcaccttcagctaggagagtaaataaaaacattttcagcatgttaacatggatttactataaagaaatctggggccgggcgtggtggctcacgcctgtaatcccagcactttgggaggcccaggcaggcggatcacaaggtcaagagatcgagaccatcctggccaacatggtgaaaccctgtctctattaaaaatataaaaattagctgggcgtggtggcgggtgcctgtagtcccagctactcgggaggctgaggcaggagcatcacttgaacctgggaggtggaggttgcagtgagccgagatcacaccattgcactccagcctgggcgacagagtgagacgctgtctcaaaaaaaaaaaaaaaaaaaaaaaatctgggttatttttgagttaatggaaaagtttaaatgtacaaataaaataacactatgttcaacttaaccttcgcccagggttatgaatgacaacagtacttggttcatttggaatttagaagataaggaactaggttatgtgaccactgtggagtttagaagataagggattaggttaaagttccaacagtaagttgaaaaagcagcagtggcataagaatgtcctaaaggaatattaggccatttccatgtgatggccattgattttggtagggaatgatagggggcaaggcaatggagacaataccatggcatacatttggcagaatctctgacatggattttttttttttcaggttgcatatctggtgggtataaggagaaaagactagaaaatatgtttttgggagaaatgggataaccacttcaaacaaagaaacatccatgcatacacacacacataaaaaccaacacttgctcttttctcttctctgaccttttaccctcaactatcttaaactcagttgtattttaaggatagagtccattttaattgaagaaattcagggccatctggcatctgattttattcacttatacttcagttggtcagcatttaaagattactgtttgttgaaaaacataaattcatggtttttcagtatagattatatgtcaatccatatataactaagttattgttttcatgcctttcctgtttggtgttttttttttttttccttaccattctacctgttggtatgtgcagaaggtatgtcaggtgtggactgtctataccataggtttggttcactagggaattgtgttactggttcaggtggaatgtaattctgctttaagttcaagaatattagaacttgaataatttagcaaagttattcaagaatacaactttgttttgttctcattccatgttctaagtccttggctcttctacttttcctcatctcatttttcttcttctcgaatcttgccttggttatgtgcctgactacactgctactgcttagtctccattttttctatgttctatttcagtgtatgggttgaatacttctctctctataatagaatcctctgttttaggacctagttcttttatttagagccactgaaccaattgcactgttcaccttccaagagtatacttgataagaaacagattgcatgtttttcctttgtgcgcttttgttattttgtttttaggagcagtttattttatacgatatttgttaaaatatcctaaactaagtaacagatctgagaagtggataatcttttacctggggataccatgctctcaagaggcaagtttttggattctttcctgggaattgattaattcagacgcacttccataaaagaaatagaatttttgagaacacaatttc

SEQ ID NO: 95495 - DNA, 70659 bp, Homo sapiens
gccgagatcacgccatggcattccagcctgggcgacagagggagactccgtctaaagaaaaaaaaaaaaaaatggaatcatataatgtgtaaccttttgggattggcctttttttttttttttctgagacaaagtctcactgttgcccaggctggagtgcagtggccggatcttggttcattgcaacccttgtctccacagttcaagcaattctcctatctcagcctccctagtagctgggactacagacatgtgccaccatgcctggcttatttttgtatttttgtggagacgtggttttaccatgttggccaggctggtcttgaactccttcctgacctcaaatgatctgcccgacttggcctcccaaagtgctgggattacaggcataagccaccatgcctggctgggattggctttttaaactcagtagaattctgaatgtattaatcgtttattcctttttatttcttagtattctgtggtatgaatttatcacaatttgtttagctattcattaattagaggacatcagaattatttctaatttttggctactatgaataatgctgctataaacattagtgtacaggtttttgtgtgaacacaggtcttcctttcactgggataaatgcccaggagtgcatttcctgggttgtaccgtagttgcatgtttagttttttgaagaaactgacaaactgtttcccattttacattcccaccagcaatgtgtgaatgattcatgcccatgtcagcatttttattgcactactttttattttagctaatctgacaggtgtgtagtaataccacattgttgttttaatttttatttcccccaatgtctaaagatgttgaacatcttttcatgtgcttatttgctgtttatatgtcctccttgggaaaatatatgttcatgttttttgcctattttataattggattatttgcttttatatgttgtgtttgaaagtaattcatatattctatgtattagctttgttggatgtggtttgcaaatatttttcctctgtgtgtagcttgactttttatccttttttttttttgagatggagtctctcccaggctgtagtgcagtggctcattctcggctcactgcaacctctacctcccaggttcaagcagttctcctccctcagcctcccaagtagctgggactacaggtctgcgccaacacacctggctaatttttatatttttttattagagatgaggttttgccacattggccaggctggtcttaaactcctgacctcaggtgatccacccccctcagcctcccaaaatgctgggattacaggtgtgagccaccacacctggctgaatttttaccttaacatggccttttgcaaagccaaagcttttattttgatggggcacaatttatcaatttttgttttatggatcatgcttttggtgttgtctaagaattctttacctagttttagatcttgaaattttctcctatttttttctaaatgttttatggttttgtgttttacagttaaggtaattttgagttaagttttgtataatatgtgagattttggtcagggctctttttgattgtttgcttgcttatggatgtccaattcctccagcaccatttgtttaaaagaccatatttcctccgttgaattacttttgcacctttgtcaaaaatcagttgggcatatttgtgtgagcctatttttaggtttcttattaagtttcatcaatctatgtgtctctctctccagcaataccacacagtcttgattattgtagctattatagtaaatgttgaactcagactgtttcttcccactttgttcttttcaaaattgtttcagctattctagtttgtcttttcacataaagtttataatactacatctgtatgtataaaaagttttgcttgaattttaatagaaatacattaaatgtatatatcaatttggggaagaattgacatctttactgtgttaggtcttccaatccattaacatggtaatatctcttcacttatttatcttctttgatttatgtcatcagtattgtgtagttttcagcaggtaagtcctgttcatgttttattagatttacatgcatttcatttttaaaaggaattttaggtggtattgtattttcgatttgggtccatgtgttcattgcttgtacctagaaatacaattgatttttgtatatttttcttgtttcctgagatcttgcagggctcacttatcaattcaaagagttttttttttttttttttttggtaaaatgtttgggattttatacacagacaatcatcttattcttgtcaggcctctgagcccaagtctgcacgtattcatccagatggcctgaagtaactgaagattcacaaaagaagtgaaaatggcctgttcctgccttaactgatgacattccaccattgtgatttgttcctgccccaccttaactgagcgattaaccttgtgaaattccttctcctggctcagaacctcccccactgagcaccttgtgacccccaccccagcctgccagagaacaaccccctttgactgtaattttgctttacctacccaaatcctataaaacggccccacccctatttccctttgctgactctcttttccgactcagcccgcctgcacccaggtgattaaaaagctttattgctcacacaaagtgagtttggtggtctcttcacatggacgcgtgtgaaaattgtgtataaattacctgagggttggtaattcataaagaaaaaaggtttatttggctcatggttctgcaggctaaacaaaaagcctagagccagcatctgcttctggtgagggactcaggaaacttccccaaatggcagagggtgaatgggagctggcatgtgcagagatcacactggaagagagcagaagtgagagagagaaagagggaaggtgctaggctgtttttaacaatgagttcttgggagaactctcacaggagccaatacaatgagaacttctcattacccagaggacagcaccaagcccttcatgagggatcggcctccgtgatccaaacaccttccaccaggccccacctctaacattggagaatcagatttcaccatgaggtttggatggtcagatatccaaactatagcaacaattatgttatctgtaaatagtgagagttttctttctttcttttcactccatatgtttgtaattgcttttcttgtctattgcactgacaagaactcccagcactatattgaataaagtggtgagagcgaacacccttgccttgctcccagtcttatgagaagagcattcagtcttctctcaccattaagtatattagccgtaagttttttgtaatccggtttatcaagatgaggaagttcccctctattcctgtttatctgagtttttaatcatgagtgaatgttggaatttgtaagatgctttttttgttttttttttttgagatggagtttcactcctgttgcccaggctggagtgcaatggcacgatctcggctcactgcaacctctgcctccctggttcaaatgattctcctgcctcagcctcctgaatagctggaattacaggcacatgccaccacgcccagctaattgtgtatttttagtagagacggggtttctctgtgttggtcaggctagtctcaaacttctgacctcagatgatctgcctgcctcggcctcgcaaagtgctgggattacaggcgtgagctaccatgcctggcctgtttkttttttttttttgtaatgggggtctcattatgtcactcaggctggagtgcaggggcacgatcacggttcactgcagcctggacctcctgggctcaagtgatttcccccccatctcagtctctggagtagctgggaccacaggtgtacaccaccatgactggctaattttaaaattatttatagaaatgaagtcttgctatgtggcccaaccagtttggtctcaaactcctgggttcaagcaatcctcccacctcggcctcccaaagtgtttggattacaggcatgaaccattgtgcccagctactttttttgttttgatcgaaattatcatgtgatttttctaacttaatatagtgcattacacatattttcaaatattaaaacaaacttacatctctggaatatatcccacttggtcatattgtacaattctttttatatatttctgaattatatttgctaatattttgctatggatttttccatcaatattcatgagaagtgttggtatttttttctttttgtacggtcttttgctggctttggtagtggggtgattctaacttcatacagtacattggcaactgttccttcctcttctatcttctggaagaggctgtatggaattggtgttaattcttgtgtaaacattttatagaattcatcagtgaaagcttttgggcctggagatctcaggttttttttttttttagtttaaaaattacaattacaattttctctagttagaggactatttaaattatccttttcatattaggttatttgtagtaatttgtgccttctgaagaattcgctcatcttgtcaaagttgtcaaatttatgttatgtggtgttatttatggcattcctttttggtgtctgaaggttctgtaattatattccctggtatgttcctcacattggtaatttgtgtcttctctttttcttttttctttgcagtcttgctggaggtttgttaaatttatttatcttttcaaaaaccagatccttggctgggtgtggttgcccacacctgtcatcccagcactttgggagactgaggcaggaggatcgcttgaacccacgagttggagaccagcctgggcaacatagagagattctgtccctaaaaaaataaaataaaaaaatcaaccaagcctggtgacacacatctgtggtcccaaactactccagaggctgaggtgggcggatcccttgagcatgggaggttgaggctgcagtgagctgtgatcgcgtcactgcactccagcctgggtgacagaccaagaccctgtcaatcagtcaatcaatcaatcaatagcttccctggagactccagcctgccaccagctttggtaactagtggccgactgtcaggcctctgagcccaagcctgcacgtgtacatccagatggcctgaagcaagtgaagaatcacaaaagaagggaaattggccggctcctgccttaactgatgacattccaccattgtgatttgttcctgccccaccttaactgagtgattaaccttgtgaaattccttctcctggctcagaacctcccccactgagcaccttgtgacccccgcccctgcccgtaagagaaaaaccccctttgtaattttccgctacccatccaaatcctataaaacagccccacccctatctccctttgctgactctcttttcggactcagcccgcctgcacccagttaaaataaacagccttattgctcacaccctgtttggcggtgtcttcacacggatgcgcgtgacaccgatctctttgagcatcagaagcgcatgacaccgaccatcttctctttgagcatcacaagcgcgttacaccgaccatcttctctttgagcatcacaaatggttttattcattgctgtaggccaagggctcaaggctgtttagcacgaagtagacactgggtaatcatttcttgaatgaaacacattttacagatgaggcaactgaggctgagagaagttaagatcacacaagtggcggcgctggtcacctttacattgcaattcactaggaagtgttcaggttgctctgaccgcagggcagatattggggctgcggtgcccagttccaaaggtgaaagcttgctccgcgcccgccagggagctggtctagcggctgcagtgttaacccgaggccccgcccccaacgggtggcgcgaggcggggcgtaggtgagcgctgcagagaggctgcgccttgggccgcctgtcgcctgtgcgcctgcgcgcggcgccgaggggacggggtccgactcagaaatggcggcctccatgttctacggcaggctagtggccrtggccacycttcggaaccaccggcctcggacggcccagcgggctgctgctcaggtaatgccttccagtccgctgtcrtctcgagggtcggcaggagaaagggtgaggtgtgaggggtcccgtggcccgsctcggggtcacttcgccggcagtgacattttctgrgtgccctgcaaggccctcgggcgacttgcctgggagtgctgctcgccaggactacgagcgagcccatgtttgcgcggctctgacccagcccttagtccgcgaggatccccggcggcccggccgtggctgctcctgcagtttctaagagatgggcgggagcaggtgggctctgagtggaggtgagggggtcaggacattttctgctgccattccggcgtctggcacggtgggctgagacttgcgccgcccctttttgggcaggggggaatgcccttcaaaagtacttttgtgtttcttgggagctgtcataggtgggaatgtcagaggaccagcggtgcttactgacttgccttttgtggggcaaggtagggaagtttcccctctcctccaagtagttgtatactgttctacttgttaatagcagtaataagattatgttttctacctaaccagttggagaggtaagaaaataatcttttgtatagccttatttctggataggctatagcataatagttactggccttgttttgaatatttgatgtgtgccaggtaatgtgctaagcgctttacgtgtagtttctcaggtttttcagcaactgtgaggaagtcattcaacacctgcatcattgttgaacatattatggttaagagaacaagtaatttggactaggtcatataggaggtaagatcaaagctgagatttaatcccagaggtgtctggttctaaagccgtgtacttgagttggctccacaacttcgaaaacaaacatcttccttccaactttgacaacaaaaaactgtggaagggcattattggtgtcctaagtcaattccagagttttgggtttttttctgaagtaactcttcatacatgtcatagtatgaattgatttagggccctcccgcccctacctttttttttttttttyatttttattgaagttgttcatactttcagcctaggggtagtgagttctgtgagtttgcttcccgatagaagtgactttttgaccttgaacttccttcttatgaatcttagaagagtgctatttagtttttagaaaatggggaatttagtgacaaatacgttttcattctagtcaaaatctttatctttttggaagttcatttaaaagccttcatttctccttatggaaatttccaatattattttctttataacagttgctgtcttctaccctggtattaagaaatgcagctctagagtttggaaggaccttagtccaaccctttgcttttgtagatgaggacatagaagtacggagtcttaagaaactcgttcaaggtcacacatttaatttagcaatttgttttccacatttttttttttttttccttgagacggagtcttgctctgtcgcccaggctggagtgcagtggcgcgatcttggctcactgcaagctccgcctcccgggttcatgccattctcctgcctcagcctccctagtagctgggactrcaggcgcctgccaccacgtccggctaattttttgtatttttagtaaagacggggtttcaccgtgttagccaggacggtctcgatctcctgacctcgtgatcctcccgccgcggcctcctaaagtgctgggattacaagcttgagccaccgcacccggcctgttttaaacatttgtttaagttctctgaccctcctccaatttcttggtatctttagcctagtgtaccttcgttgaaaatagatatttcagcatatgtctttaagaataaggacattcttccaaataaccgcagtgatcatacttaggaattcaacattgctgtaacatgaatatatatagtttagattcagatttttctagttgtccccaaagtgttctttatagacattagattttttaaaaatttaaactgggatgagaccttgtgacattttctctgaccaactaaccaattaggtgccacctagtgacttatgtgctagtgacctagtgctcttatatgtgttgcagttgtttatttacatgcctgtgaactctgtggctgggacccaagtgtctttatttttttagtgtccctagcccactgtctagttcatagtcatcacaaaaaatatttgagtgtatgactttttgccaggcttatgctagttactcccctacccactaatttttattattattttgacgtataatttatgtacagtaagatgtacagcttaagtggatagstagattaatttttatgtatgtattcacctgtgtaaccatcgtctgcatcaagatatacaatgtttccagccctcagaaggctctcatgtcctctctcttatcaatactccctgacagaaggtagcaaccaattatgacttctgtcaccataggctaattttgactggttttgaacgctataaaaataaatcatgtaagtatatattcttgtttctggcttctttctctctacattatgtttgtgagattaatccatcratgtgtgagccatagtactttttttctttttatttctctgtagtatactattatatacatataccacagtttatccattctcctgttgatgggcaatcagctaatttctgttttctgtctgttataaataagcctgctctggacactctagacatttttatgtgtgccttttgacagatgtaaggactaatttctattgatacatacccaggaatgggatttctgagtcagaaggtggaggtatactaaacagtagtttgagaggttgctgggtttttttttctttttttttttttttaacttatttatttgtttttttagacagggtcttgctctgttgaccaagctggaggacagtggtgaaatcacagctcactgcagtctcaaactcctgagctgaagggatcctcctgcctcagtctcaggagtagctgggattataggtgtaagccactgtgcccagcttggttgctggcttttaatattgaagtgacactaaatcaaggaattgagctacctaggtcaaatgttaccaaggattttagcttgctaaakggatcagaaataagttgctattatatatgattgatttgtaagactagtagttctcataactgtagggttcttaagaatcaactgagtgacttgttatgaatgcagatttccttgggcccagtccagagattctaatagtgcagttgagaatgggtctcaggaatctgcagattacaagcacccagttaattttgaggcaaaagcttatgaacctactttaagaaacagattgtttctatgacctctttaaatttaattcttaggacactgtgtgtttcatatgaaccatgtttcagtatactgcattctgtattgagattatggaaatgcgtggataacatttaaatgtgtgattccattgaccagtcattgggtgcaggctgacagtgggaaggaggtgtgactttgggcaagtaggctccagtaagaggacttggctgagagctgtcagcaaccagcactcccagcagcagcagtgggggctatgaatgccttggtcctgaatggggagtgccagggagatctgggcagcatactgcaacatccactacagatgaagccatggttttgaatatcgagtgtatgaaagagtaatggtatcaaatcattttattattacatatctagtgccaggtgacttgttaggtgtggaggaatggtagagagaagaaaattgggaaggatttttggtttggtggaaaagatgagattggttttagatccgctgaatttggcattgaggtagaactgccctgtagatcattggagatatgatagtaaagctgaaatctraaataaggaatagagatgatgaggaaataattaaaatgacagtggtaacagtgatatttagctgataggctagcttttagttttatgctgtaattcaggtactctgaatattgtactttgctaatgtaatgtaacagttttgttatagttatgaagaaccaagtagttarcaagagtgactgccaaatcactgtcatatataaatatgtccccaatctttctaggttctgggaagttctggatkgtttaataaccatggactccaagtacagcagcaacagcaaaggaatctctcactacatgaatacatgagtatggaattattgcaagaagctggtgtctccgttcccaaaggatatgtggcaaagtcaccagatgaagcttatgcaattgccaaaaaattaggtactaaattaagaaaagcttttgccaccttgacatgagagctctgagaagatttgaagtttgtttttggtttgataacaacttttagctttttttwaaaaaaaatacattttctttgcttaaaatagaaggtagaactttattattattgaaattctaaaattattattattattattattatgagcacccataatgccagtgacgtgggagtcacttacattggcattaggaagctgaagtcctgtttttagttggaatataattrtggggaagggaattctactactaccactctaactactctggagcttaaaggatggcagttgtgatgattcttcagggaaatggtgaaggaaaatcttagctgtttatgtgcttataaggagaggtccgtgcttccccctccatttttttgtcatgaaaaatatggaaccaaagrggaacaaaaagtagagtgctagaatgtaaactccttgagagcagagtttctttttcttttctttttttttttttttttgagacggagtttcattcttattgcccaggttggagtgcaatggtgcaatcctggctcactgcaacctccgcttcccgggttcaagggattctcctgcctcagcctcccgagtacctggtattacaagcaccaccaccatgtccggctaatttttttgtatttttagtagagacgggttttcactatgttggccaggctggtcttgaactcctgacctcgtgatctgcccgcctccgcctcccaaagtgctgggattacaggtgtgagccaccacatacagcccgagtttctttttcttatttgttcactgatatatcccaaaatcttagaagaatgcctgacacttaggtaatcaataaatactaaatgaataaatattaaatgaatttaatagttgcccatgtttattagcagattcctttattgataacrgccttaatagcttttgtcaatttgaattaatctcttaatcaaaaaataatttttgatttcagaaaataagcttacatttttaaagatttagcatgaaaaccatgagctgatgtactagctatacactgcaktttctttttagcartattttaaatcccaccaattttacgtagattagcataaataatctctcttctatgtacatttaattaataggctttaaatatgatttggtgaatactttgcttttatattttttaagaaagatgagcattttcaaagtgattgaaattttaaaagtattcatcttgtgtagwacttatttgtatctagaatggatttttctttcaaaattaaggatatatacaagttcagaaaactgtcatataagctatgtttttgaatgagatggccatgatttccttgacttggaagcatgatttttcatttatagttttgttgtttttattgttgttaatcagaaagaattattttaaatcagattacaagcaaactttttattaagcaaaagctttgtataagttcatactaattgtggtgaaatttttgttaattaatggtgacctataattggaacttctgcatggttaatgttaatgggacctgatttatatataattacgtcggtaaaaatggttttcctcttgtttccagattttaaaattccaaaaaaaaattttttttagagatagggtcactatgttgcccaggctagtctgaaactcctgggctcaagtgatcctcctacttaggcctctgagtagctggaactacaggcacatgccactgtgtctattttttgagtattataattggtttctttaactagttttccgtatattttctcatttagtgaaattccattgttttgtcagaaaaaataatttgcatagaaactttttcataaaatgaataggattaattcagatgccaatctrttttgattatgccttataaaaacttaatgattcttaggtacagaagaaagaaataatatgtgcaggataaactgtaactatragtatttctggcaagttctctgggaccagaactcacaagtaataagaagcaggtaggcagctctgattttgagccccttggaacagataccttgttcatttagaaagtgtgttttttgtcaaagaatattgcaaatgatgattatagtgtgggagggagactaataattaacaaggaaatttaaatctagaggagcagaaatgctagtttttaaaagataaatttagaaacgtctatgaaaatatggaggacaatttcgtggttttttttttttttttttttttgagacggagtctcactctgtcgcccaggctggagtgcagtggcgcgatctcggctcactgcaacctccgtctcccaggttcaagcaattctcctgcctcagcctcctgagtagctgggattacaggtgcccgccaccatgcccagctaatttttgtatttttagtagagacggggtttcaccatgttggtcaggctggtctcgaacccctgaccttgtgatccacccgcctaggcctcccaaagtgctgggattacaggcgtgagccaccgcacccagcccaattttgtgtttttagtgagtcattgataacaaaagataacgattatgggatctagttgcacaaggtgtagaatgagggaccttagaaatacacttggttttgttcatgtagctagcaattcccaatgctgakttttcattacttcagggtgatttttgctttttgactttctgcaaaattcataaaatgctaattttcatttcataaaaactctttttttttttttttgagacggagtttcgttcttgttgcccaggctggagtgcaatggcgccatctcagctcaccgcaacctccgcctcctgggttcaagcaacctctgcctcctgggttcaagcagttctcctgcctcagcctcctgagtagctgggattacaggcatgtgccaccaccccggctaattttgtatttttagtagagacagggtttctccatgttgatcaggctggtcttraactcccgacctcaggtgatccacctgcctcaccctcccaaagtgctgggattacaataggcgtgagccaccasgcctggccttcataaaaactcttaactcagcgctttgctcaacaartgayataatagaacataaatgctttacaggtgtgccaaactattgtttcttcccagtcctgtggtggcaggagaagttgagttagcatggggtttggggccactgagcctctttacccagtatttcctaccatgtccatcattttctgtttgtgtgatgatgtgaaaaaagttgagaggcattgtcctgtaggcaagttttacctgctgtgaataattgaggttaggaatggaggaatggttagaaagaaatctaattctaatattttaaaagactatatgagtccccaaaatgaaggttggtgagcttgaagatcatgaagtttctggaatagattatcaaagggatggttattagcacagataaatgtagtagatattatttggggtcagttctgagagcaaattatctctaacagttcatagttcaaggaaatatgattttagtaagggtttggcagaatgtttgttgttttgtttctgagacagtgtcttgttctgtcacccaggctggagtgcagtggtgtgatcatggctcattgcagcttcgacctcctgggctcaagccacttctcccgtctcagcctgctgagtagctgggactataggtgtgctccaccatgcctggctaakttttgtattttttcttgagatggggtttcaccatgttgcccaggctggtctcaaactccggggctcaagccttccacccacccttggcttcccaaagtgctgggactacaggcgtgagccactgcgcctgggcacagatttggcagaatttttataatttccctattgactatagaaagatagtttggcttctagtatatttaaggtggaatccctatctggttgaatagatacatgtaaagggtgctgattaatgaatgtcagcctggagggagatttctaatggcatataataggactttaccttctttctttcttttaaatatttattagttagatacctgtatacaaggaatgcttaaaatgtttgtgagtgactaaaggtagctgggatagtgattgtgttttagagacagtcttgggatccaaaaaagatcttgtctgactagagcagtgccaaatgtaataagactgcaggttctatgagggcaggagaggtctcactcactgttgtatctacaacgctagcacagtgtctggtatgtagatgaacctgttgagtgaattaatggaattgaataaaatgtttgtttcgaccagttgtcctcagacttctcttctaatctttcttcctttcttgatagttgatgagactgtatttcatgaaaaatttttttttttttttttttttgctttcgttgtgaagggcttttttttttagaaggaactttcgaagaatcatcttttgcccttaaagactttatattcctaaagaaaggaaattgacactttgcggggaagagaagaaccttctgtcttgccaagtgtttttgaaaaaatagagcttcgttactcttaataggtcaatgtgttaagttcccagtttaatgaataggaatgattgaatttagctcagtaaagcacagtgtaactatgaccattttttacattacatttgcactgtttgccttgtagttctcttcttcggatataaacaaatatttaaagtgctggaaaatcaggactggacaggtaaacagaaacaagtggaataaatagtggctgctcccttccgtttgggcacaaactcyaatttgccatggttcagagacaacctgtagtattctcaataagaacgttattgttggttttaaggaaatttctgagttgtttctatttgttacctaatattagttgtgatacatttgtgaatagtagagacagggtaattgaaaagggtttgtcttatctaaacaagatactttttctaatcagctctagttgtagtactgtgcacccagtttttcccattgggagttttcgtaagagcagtgaagaaatctagatttataagaattctgttcatatttttaaatgttcctttttttcaacattcagcaaaatattatgtgctaggaactctcccagacgcttgttaacatctatgaatacaacaaagattctgccctcctgggcctcttttctgatggggaagcaaaacaacaaatgatatatgtaagagaattacatatgtacgaagatgatgaattctatggcggaaagaagtgtagtaggtaagggggattggtcacaggtgggcaggttagtagggtaagcttcatgggcaacatgagatttaaagagaaacttgaaggatcgggggcttttcccacatggacacctggtgaagagtattctaggcagagggtgcattagagccaagtcctgaaggcaggaacatgcccaggaatagtgaggggattagtgcagttggaacagagtgagcaaccaggagggcctaggagataaaaagtgtagagggtattataaggtcttctaggccattgtaagcactttggcatttaactgagtgagactggcattcagtgcaaggttttaagtagaggaatggtgtgcctgctttggctgctgccttgagaatattctgtgggggacaaaggtcatatagttaagagatagtggtggttgggatcagagtctaaactgcaggtgatgaggaatggtgaagattctggataaatttgaagatagaaccagtatgatttcctggctgaatggaagtggggtttgagaragacaagttttttaaacactctcttggctgactacgcatagggtcatcatctggtttaaatagcatgtatttctggtgaaggcttacatcagtaattttctaaatgttcttttaaaataattgttaatgtgtaaactttaggttgtttttgtttggtttcaaactccatttcctacctcattgatttggttggttcatctgattaggtgggagcttcctctcattctgcttgataaatgcatcrtggagtgacatcctagttgtagaggactctacttcagtctgttcaaatccatgtttatggagtagttgttatatcccagagacttccttgtgcttgggatataatgaatacagtgagacctttagccctgatctcaaaggttattttgccataatgtatagttggtgccaccctgccagtgtgggcaaaatgctatgagaggcaaaatgaggaggctctgaattctgcctgtctggtacacagagaatgcctttctaagaggtattactctttttttttaactgatacataatatttttgtggtacatgttatattttgttacatgcatagagtgtgtaatgatcaattcagggcatttaggatacccatcacccagagcatttactcttttgagacagccttgctctgtcctccaggctggagtgcaatggcacaatcttggcccattgcaacctccgcctcccggattcaagtgattcttgtgcctcaacctcccaagtagctgggattacagacatgtaccaccatgcctggctaatttttgtatttttaatagagatgagatttcaccatattggctagtctggtctcgaactcctggcctcatgtgacccgcctgcttcagcctctcaaagggctgggattacaggagtgagccaccgcaccgggcccatttactcttgatcatgaatgatgagtactatctaggctaaacagccagtttgctggttttccacagcaaattagaaaggagaggaaaagggataaatagtaatcagtctacctgttaaagaagaaaaattcagtccatttatttaaaaatatgcataagctttgcaagcatagaattctgaaatcttttgatacagataccttaataactcctgatagtactactcatgcagtactgctcaataatgtattttaatagaactttctcttagtgggacagtataaatcagtatcaatactggtaatggtaatatcccccaaatcatgacatattcctgctatagcgatataactcagatgttctcaggacagcaagtttacatgtgaatagagagggagggacgtgttaggaagacatgaaattcaattttgtacttttgatactttccaaagttctagatgacactttccaaagtgtcaagaaatggttaaattattttcagtttactttaagaaatggtttaatgtggccaggtgcggtggctcatgcctgtaatcccagcactggctcacgcctgtaatcccagcactttgggaggccgaggtgggcagatcatgaggtcaggagatcgagaccatcctggctaacatggtgaaaccccgtctctactaaaaatacaaaaaaattagccaggcatggtggcgggcgcctgtagtcccagctactcgggaggctgaggcaggagaatggcgtgaacctgggaggcggagcttacagtgagccgagatcgcgccactgcactccagcctgggcgacagagcgagactctgtttcaaaaaaaaaaaaaaagaaatggtttaatgtaagtgacgaattttgaaaattgtgggccttttagacagtgattattttagtgttctaatctagaaaatctacataaagagaatgcctcatttttggacattgtgaataaattagacttgatttaataacacctgtcaatatgtatgttaaataacaaaatactatgtctggcatgctgctccatgcttcatatttaatagaagtgtttttcttctaggttcaaaagatgtcgtgataaaggcacaggttttagctggtggtagaggaaaaggaacatttgaaagtggcctcaaaggaggagtgaagatagttttctcgtaagtcayattttttaaggaaaaatcatccttgttaaagactgattaaagattacttattgaattgatgaaaatactgaaatttaaatattagatgagataaaattttggctattrtgtggatttgctttttctcaactggaggaaagaaaaatttgagttctttttcttattttagtccagaagaagcaaaagctgtttcttcacaaatgattgggaaaaaattgtttaccaagcaaacgggagaaaagggcagaatatgcaatcaagtattggtctgtgagcgaaaatatcccaggagagaatactactttgcrataacaatggaaaggtcatttcaagtgagtaattgtagacatgatacatacgggataaatttatgacattcaatttcaaaagtccattattgtttctatttatgtgggaaagattttaaaagtacaarttataatctgtttgtatgtcatgagcatgatatttatgtcatttaaaaaacagcttctttaatgccgtaaaatttgatatataatatcatgatcttaaaattataggaaaaattctgctgtaataaatttcatgggattctcaaattgttaattcactaaaagcagcttaaatcatctctggatcatctccagattgagaaaattatatctagcatagtaaaatattctaatgaaagagaaagttgctgaacccactagaagaatgtgtatccattgcctcatcttctgttttctcaacttcttgggtttgtttttttttttttaatagtttggggtttgtttcactatatgattcaatatttggtaaattgagggatgacattaagtagcaaacaatatggttttaaggagtattacattagcacagctctcctctctttatggaacctaaaatgttgaacataaagcttctggtgaagagaaaatccctttatagacctggtgtttggaagagagcattgataatcattttatactagaattatctgtttttcgagggtattaggttttacaagctgaatctgtgtgttaactagcttgttttttgaagcaactgggtatatatttgaaagccccagtacggatttcatgtagaacattaattgtgtagaatttagagtaacaaaaattttaagagtcatgaaaataattttcttatgtagaacaactttttwaaaaatagcaactttctgtattgtgatttttcttatttacaattaaatctattaatgtttgaatgataygtcttttgcaacttttaatttttataaggaagtatttctaaagatataacactagatggtagtaaaaatccactcagaatataaaattaagaagcattgttttattcttaagtgatattctatgtgatagaatttagtttgtaagttattttaaaaatcccatgacagtaacctcatatattacccaaaatttacataaattatatttttacacattcacttattttcactacattttatttttcttttcattgacattatatatcggcatctgtcattttgttagttatgtttttactttttgttacagtagccagaaacaaggtataaatacctggatgaattgagataggagttctatccatagtaattcatctttattgtagtaaaggtaggatactgaatatgtattattaaagatatgtttaaggcatttgggaaaaggatcaaatttgagttcatcttawgaacttgaatttsctgacaactayttaggtcttgttgaggataaaatgtttttattttaatacttgcttactaataatacgtggttataattcaggttaaaaatactgtagtaccagtaaaactgtttgaccgaagacattataaattctttgatattatcacattagaccaatgtagagttggttggtgttactttttggggtatagccatgtttttgggaatccctgtggacagatctctgttgaacaacaaaaattagtcacctatttaaactacaaagagcacttgtgattgagttaatgtcccatgcatgggaattaactaatcattagaaattgcttttgttaaaatggggaaaggatttcctatttaataaatggtgctgggagaacaggctagccatgcagaaaattgaaactgaaccccttccctacaccatatacaaaagttaactcaagatggattaaagacttaaatgtaaaactcaaaactataaaaactctagaaggaaatctaggtaataccattcattcaggacataggcgcgggcaaagattcatgatgaaaacgccaaaagcaattgcaacaaaagcaaaaattgacaaatgggatctaattaagctaaagagcttctgcacagcaaaggaaactatcatcatagtgarcacacaacctgcagaatgggagtagatttttgcaatctatccttccgacaaaggtctaatatccaaagtttatgagaaacttaaaacaaattttcaagaaaaaaagcaaacaaccccattaaaaagggggcaaagtacatgaacagacacttctcaaaagaagacacaggctgggtgtggtggctcacgcctgtaatcccagcactttgggaggccgaggtggacgaattacctgaggtgaggagtttgagaccagcatggccaacaaggtgaaaccctgtctctactaaaaataaaaaaattagttgggcatggtggtgagttcctgtaatcccagctacttgggaggctgaggcaggagaatggcttgaatctgggaggtggaggttgcagtgagccgaggttgtgctactgcactcccgtctgggcgacagagtaagaatccgtttcaaaaaaaaaaaaaaaaaaaactatacatatggccaacacacatgtgattaaaaagctcatcactgatctttagagaaaagcaaatcaaaaccacaatgagataccatctcatgccactcaggtggctatcattaaaaagtcaaaaaacaacagatgctggtgaggttttgcagaaaaaggaatgcctttacagtgttgacgggagtgtaaattagttcaaccattgtggaagacagtgtggcaattcctcaaagacctagaggcagaaatactatttgacccagcaatcccactactgggtatatacccaaaagaatataaatcattctgttataaagatacatgcatcggtatgttcactgcagcactgttcacaatagcaaagacatggaatcaacctaaacatccaccgatgatagactggataagaaaatgtggtacatatacaccatggaatactctgcagccataaaaaaggaatgagattatgtcctttgcagggatatggatggagttggaagccattatcctcagcaaactaatgcaggagcagaaaaccaaacaccgtgtgttttcacttaaaagtgggaactgaatgatgagaacacatggacacaaggtggggatcaacacacactggggcctgtcggggtgggggtggagggagggagagcatcagaaagaatagctagtgaatgttgggcttaatacctgggtgatgggatgatctgtacagcacaccaccatggcacatgtttacctatgtaacaaacctacacatcctggacatgtacacctcaacttaaaagttgaagagaaaaaaaaagaataagcaaagcaaaactaaaacaaaacagaaaacaattacttctattactgacttgtttttaggagatgtatcataggttctactggtctttagtacctttcacatcctgattccgggaggtaacttctatggggttggcttgccagaaagtgaattcaagtacctactctctgtgtgatacctttgttaaattagatttcttaacatttgcctagtgcctgttgggtacttttggtctgagtcaagtctatttaataaatcacatttactactttatttttctggtaaaacaactgcagtcttctgcaaatgagtgggacattttcctgtgtcaatttttgactttacctgaaatagttataaaatgtgcttaagaattctaattttacttygtgtgattttttttaaatacacatctttattttttatttttatttttaatttttttgagagtcttgctctgtcgcccaggctggagtgcagtggtgccatctctgctcactgcaacctccgcctcccaagttcaagtgattcccctgcctcagccttccaagtagctgggattacaggtgcattccacgatgccctgctacagatctttattatatcatgtggctgctttctcatttaagccttttacatttaagcctattttaaggcaaatttaaaaaaataccaacaagagaagaagaacttaggttaagaaagtgaaaagtagggctgggcgtggtggctgacacctgtaatcccgacactttgggaggctgaggcgggcggatcatgaggtcaggagatcgagaccatcctggctaacacagtgaaacactgtctctactaaaaatacaaaaaaaacaaaaaattagctgggcgtggtggggggtgcctgtagtcccagctactcgggaggctgaggcaggagaatggcatgaactcaggagacggagcttgcagtgagccgagattgcaccactgcactccagcctgggtgacagagtgagactgtgtcaaaataaaaaaaaaaaaaagtgaaaagtagaattattaatatatttgaaatttcagctacttgcttgaaatgaaattgttttgaaagtttattactaagatttaaaagtgaagccaagtcgtttgaacatgaaatagctattcattctacagtgttgactaaatgtggaactatagtcattgtttaacgtttacccatgcaagttggtttctttctaattggttgtggaattaagacaaatagagactccactttcttctatgtattattgtttccttttttttctaacttataaccaattgttgacttaatttttactttagtgagaatttaatattaacttttctcctcgtgttgccttctctgtggcttttcatttcttttaccagttggtataaaaagagagtaaaactaaaatgaaaagaggctgggtgcggtggctcacacctgtaatcccagcactttgagaggccgaggcgggtggatcacaaggtcaggagatcgagaccatcctggctaacacggtgaaaccctgtctctactaaaagtacaaaaaattagccaggcgtggcggcaggcgcctgtagtcccagctactccggaggctgaggcaggagaatggcgtgaacccgggaggcggagcttgcagtgagcccatatcgcaccactgcactccagcctgggcgacagagcgagactccgtctcaaaaaaaaaaaaaaagggaaaagaaaactaaactaaaatgttagaatattttaaagatttgttggtctgtacctctcctgttgaataaaattatattttatggttatctgtagatttaatttgtctatattctatttcagtggcatgactaaaactgaaccgcctcttcttcaatcagaattttttcctgctctttagatctttgtaaaagctaataattatgcactgccttgctagagagaaaacgaagaataccctttcatttgaaatttatagaggaactgaaaattaaaccatcatttcaaacatttctctttacttagacttgctaatgttctcttctttagcctcagaaggctctgaattcttttatttaaaaaagttttttttttatattgaaaggagttctaatactaagtgcccatagtttagctaaacttcagaggctaagarcatagtcctgcacttgattgcccttactttagacaccagtctcaattttggtggtccccaggttaccctcatttctgactagctagctacaaatttgagggttaattccttagaacgactcacagagctcaggaaaatgttaaacttagtattacagttttattatagccaaaggatataaaaatcataaccagccaacaaggtctgggagggttcccaaacackaagtttccactgttctcaggaatgttttgtcttgctagcatcttaatgtgtggcagtatgcagaatattgccaacccaaagctccccaagcttttggtgttcagagatttttttttttttagattgtcaaaaatataacaaaaaatttaccttacccattttgagtatgcagtataatagtgcattctcagaaagaaagaaggaaggaaggaaggagggagagaggaaggaaggagaatgttaatttctcttttggtaaaaggaacagagtaaaacaatttgtgcacaktttgtgcaacatctccagaacagatatccaaatcttttttttttctttaatttttctagaactttttttgtcttacaaaattaaaactattcattgaacagctcccttttccctctcccacttccctccagctcctggtaatcaccattctttgtgtttctaaaagtttgagtattttagatacctgaagtagctgtctttttgtaactggtttatctcagcataatgtcctcaaggtttattcatgatgtagcatatgacaaagtttccttatttatggctgagtactattccattttatgtatatactgcattttctttatccattcatcttttgatggacattcagattgctttcatctcttggctattgtcagtaatgctacagtgaacatagatgttcaaatatttctttgagatcctgttttcatttcttttggatgtatacctagaagtgagattactggatcatatggtaattctatttttaatttttttgagaagcttctataatgttttccatagcagctgtaccgttttatttaattaattatttttttgagacagagtctcgctatgtctcccaggctggagtgcagtagtgcagtctcggctcactgcaaccccagtctcccgggatcaagtgattcttctccctcagcctcctgagtagctggaattacaggcacccacyaccacaccctgctaatttttktatttttgtatttttttgagacggagtctcgttctgttgcccaggctggagtgcagtggtgcgatctcggctcacarcctccgcctcctgggttcaagtgattcttctgcctcagccttctgagtagctgggactacaggcgtgcaccaccatgcccggctagtttttgtatttttagtagagacagggtttcactatgttggccagctggtcttgaactcctgacttcaggtgttctgcctgctttggcctcccaaagtgctgggaatacaggcatgagcccactgcacctagctgagccgtaccattttatattccaactaacagcagacaaagcttccagtttttctgcatcctcgccaatattcattttctgtttttttggtagtggccatcctaaagggtgtgagattatatttcactgtggtttttatttgcrtttcccccgttattagtgatactgagtatcttttcatatgcttacaggccatttgcagatctgctttggagaaatgtctatttaagtcctttgcccatctttaaatttttttgtttgggttttttattttttacttttttggttattgagttgtagaagatcttacatattccgaatttcagcttttaactagatatatggattgcaaatattttctctcattttgtagattgcctttttactttgttgattatttcctttgctgtgaagtttttaagtttgatagagttccatttgtcaatttttgctttttttctgcctgtgcctttggtatcatgtttaagaaatcattgctaaatccaatgtcataaacttttttctccctgttttcttctatgagttttatagtttcaggttttatgtttaggtctttaatctattttgagtaaatttttgcatatagtagtattggtaagggtctaacttcattcttttgcatgtggatatccaatttttctagcaccrtttgttgaagagactgttctttttgccctcttgtgtagctttcscaccattgttgaagatcatttaatcatataccttagggattatttctgggttttctgttctattccattggtctatatgtctgtttttttatgcattatcatgctgttttgataactgtaaccttgtaatatattttaaaagaagtgtgaggcctctagtttctttttttttctcgagattgttttgactgttctgggtcctttgagattatgtatgcattttagtgtatttttctatttttataaaaaaaagccattgggattttgatagagattacattgaatctgtagattgcttagggtagtatgcacagtttaacaatattaagtcttccaatctgtgatcacaagatgtctttccatttgtttgtgtctttttatttttattttattttttatttttttttgagatggagtctcactctgtcacccaggctggagtgcagtggtatgatctcagctcactgcaacctgcatttcccgggttcacaccattctcctgcctcagactccygagtagctggaactacaggctcccgccaccacgcccagctaatttttgtatttttagtggagatggagtttcaccgtgttagccaggatggtctcgatctcctgacctcatgatctgcccgcctcagcctcccaaagtgctgggattacaggcgtgagccaccgcgccctgcctgtttgtgtcttctttaattcccttcagcagtgttttgtagtttttggttcataagtcttatgcctcctcgattaggctatccttaagtattttattctctttgattttaactggaattatttccataatttccttttcacattgttcactgttactgtattaaaaggcaacttatttttgtttgttgattttgtattctgcaactttgctgaactgatttattctaagagttttttttgtgtgtgtgcagaatctttagggatttctacatatgacaacatctcatctgcaaacacagaattttacctttccttttctctttggatgctttttatttttcttacctgttttctgtgtctaggacatctagtgctgtgttgaayagaagcggcaagagtgggcatccttgctttgtttctgatgttagaggaaaagctttcagcttctcatttttgtgtatgatgttggctgtaagttttcttttttatttttattattattatactcaagttctgggatacatgtgcagaatgtgcagrtttgttacataggtatacacgtgccatggtggtttgctgcacccatcaacctgtcatctacattaggtatttctcctgatgctatctctgccctagccccccaccccccgacaggccccggtgtgtgatgttccactccctgtgtccatgtgttctcattgttcaactcccacttatgatgagaacatgcggtgtttggttttctgtttctgtgttagcttgctgagaatgatggtttccagcttcatccatgtccctgcaaaggatatgaactcatcctttttatggctgcatagtattccatggtgtatatgtgccacattttctttatcccgtctatcactgatgggcatttgggttgattccaagtctttgctattgtgaatcatgccacaataaacatactgatttataatctttgggtatatactcagtaatgggattgctgggtcaaatggtatttctggttctagatccttgaggaatcaccacactgtcctccacaatggtggaactaatttacactcccaccaaaagtgtaaaagtgttcctgtttctccacattctctccagcatctgttgtttcctgactttttaatgatcaccattctaactggcatgagatgctatcacattgtggttttgatttgcatttctctaatgaccagtgatgataarctttttttcrtatgttttttgactgcataaatgtcttcttttgaaaagtatctgttcatatccttctcccactttttgatggggttgtttttttcttgtaaatttgtttaagttccttgtagattctggatattagccttttgtcagatgtatagattgcaaaaattttctcccattctgtaggttgcctgttcactctgctgatagtttcttttgctgtccagaagctctttagtttaattagatctcatttgtcaattttgtcttttgctgccattgcttttggtgttttagtcatcatgaagtccttgcctatgcctatgtcctgaatggtattgcctaggttttcttctagggtttttatggttttaggtcttacatttaagtctttaatccatcttgagttaatttttgtataaagtgttaggaagggatccagtttcagttttctgcatatggctagccagttttcccaacaccatttattaaatagggaatcctttcttattgcttgtttttgtcaggtttgtcaaagatcagatggttgtagatgtgtggcgttatttctgaggcctctgttctgttccactggtctatatatctgttttggtaccagtgccatcctgttttgtttactgtagccttgtagtatagcttgaagtcaggtagcgtgatgcctccagctttgttctgtttgcttaggagtgtcttggctttatgggctcttttttggtaccatatgaaatttacagtagttttttctaattctgtgaagaaagtcattggtagcttgatgggataccattgaatctataaattattttgggcagtatggccattttcatgataytgattcttcctatctatgagcatggaatggaatgtttttccctttgtgttctttcttattttcttgagcagtggtttatagttctctttgaagaggttcttcacatctcttgtaagttgtatttctaggtattttatcctctttgtagcaattgtgaatgggagttcactcatgatttgactcttgtttgtctattatttgtgtataggaatgcttatgatttttgcacattgattttcagtttctcattattgtgtatgatgttggctatgagttttcttatatggcctttattatattgaggttgtttccttcagtctttgttgagtatttttatcgtgaaagggtattcaattttgttaaatgccttttatgtatcaattgagattattgtggtttttgtycttcattctgttaatagcatgtattacactgaatttttgtatgttgaaccatccttgtattctaggagttaagtcccacttgatcatgatgtaaagtccctttaatgtgttgttgaattcagtttgctagtattttttgartttttttttcatcattattttttcagagctattagcttgtagttttcttttaataccttctgattttggtatcatggtaatgctggcttcatagagtgagtatggaaattttccrtccttttcaattttttgaaaagagcttgggaaagattggttcagttctttaaatgtttgatagaattttccagtgaagccatttggtcccgggcttcctgttgcttagaagtttttgattactgattcagtatcattactagttatagagctgttcatattttttatttctttatgattttgaagattgtttctagcaagttatcartgtcttctaggttattcaatttgttgatacataatttttcatagcagtctcagactctttctgtgacagctgtaatgtctcctttcacttctgatttttgttatttcagtcttttctatttttttatagttaaagggttgtcaattttattcactttttcaatgagccaatatgcagttttgttgattttttttttttctgttccttgtttcttttatttctgctctaatctttatgattttcttccttttgccaactttgggtttagttattctttttctagtttcttgtggtataaatataggttgagcatcccaaatctgaaattctgaaatccaaaatgctataaaatcctaagcttttkgagcactgacatgacacttaaaggaaatgctcattggagcattttggaattcagatttttagatttgggattctccaatggtaagtataatgcaaatatttcaaaattcaaagaaatccaaaatcttctggtcctaagcatttcagatgaggagtactcaacctgttaaaaaatcaggagctgggtgtgttttcttagttgtagcaagctgtgtcaacttccctctgggatgttacacattttctggtactgccatgagcctgtgtactctcctttgttctcgatgccccacaggcatccagagtatgctggttccccatcagcacccatatcagttgagacaggaaacagtcccttggacagccctccaagaagctggaatgttgaacatgtgttctactcttctctttctctcccaatggagaagcttcttaatcccaaactatgttagtttggagtggtggggggaaggatgctgatgtggataaaatgaaatggcttttcttactgatttcattgcagatgttcttggctttgagcttacctggggtactgtgacttcctaattggttactgtcattgtcataaaaggtttttggatcatatattgttgctaaagtcagtgtttttgtcagggagcaaggtcttgggcttcctattttgtcatcttgctgaccttggtgtccagagttttcattggggttctatggtgtaggcattaaacaaaaatttttttttaattttaaatttttgtagagacaggttctcactatgttgcccaggctggtctcgaactcccggactcaagcagtcctcctgcgttggcttcccaaagtgctaggattacagatgtgagccaccacacccagcctgggtatcactgattgaatcattgtctgtgcagttgacttagcccatttcttctatgcagagtgggttgatacaatttgactgaaagccccaaacctctaatcacattgtcaatctttctggcatggccattgcccacctgagtcatctccttagtgtaaactgtctaggggcccaccatgaggctccttggtagcatcaactatcagatgtggttggagggtttagaagttacttccaagaccctggggacaaaagtcatctgaattccttgttacaaatgtatacagaaatcgaatacatggtacaaaatcatttttttcctaaataaaagtttaacactcttaaaaaagtgatagattcttcttctttttaatttttgttattgccttattttaagtatttgaaggactgtttcgttctctaaacagtaatgaatgcaatcctattcctttaatttatactttaaatgagtatgttactaaaacactaagtgctaggatagaaaagtggaattaggctgggcatggtgggtcatgcctataatcccagcactttgggaggtgaatcacctaaggtcaggagttcgagaccagcttggccaagatggtaaaaccctgtctctactaaaaatacaaaaattagctgggcatggtggtgcatgcgtgtaatcccaactacttgggaggctgagacaggagaatcccttgaacctggggggcggaggttgcagtgagctgagatcgcatcatttcactccagcctgggtgacagaacgacactccatataaaaaaaaagaaaagaaaagaaagaaagaaaagtggaattagtcttttgattaaaaaaaaaagttgtcatgcctgtttttttttctggatgtaagagtagtatgttcattgtaaaaaaattttatttggaaaatagttgcatttaaaataacaaaagtcttttaatgttttatttcccactcttttattgtttctgtcaatatggagcacttgaaacgcactttatgttaaaaaataatacaattgagaaaacgacctagggctttgtatcatttttttcatacgtaacactacatgtacacatacactacattacccactacagatcagtagtttcctgtcagtaaacaatctttaaatgcagttttactatttctctttttttcatgttaacattatttctagtttaatgcataaattagtagatctattagataatttatgattttttcttgattgattttcaaggccttaaakgttaataattgttagtattgataccttaccttctcatattgttcatgacaatagccagagctattctttcaaactagttagctytctcttttatttattgtattttactttttttttgagacagggtctttctctgtccccatgctggagtgccatggtgtgatcacagctgactgcagccttgatctctcagtctcaagccatcgtcccatttcagcctgctgtgtagctgggactaaaggggcatgccaccatgcctggctaatttatttgtattttttgtagaaatggagtcttactatgttgcccaggctggtcttgactcctgaactcaagtagtccttctgccttggcgtcccgaagtgctgtgattacaggtgtgagccactgtgcctggccagctttcttttttattgtcttgcagtagggctagagcttagactttcccttttcttaggctttttctttcaaatatctgttttcaggattttctagtgtttatgctttaagcaatacttttaatgtcccctcagtttttatgaaaaatgcataggttatatttcacatacatatgtttacatatttggtgttaagttttttttcttttttttttaattatactttaagttctgggatacatgtgcagaaagtgcaggtttgttacatagttgtacatgtgccatggtggtttgctgcacccatcaacctgtcatctacattaagtatttctcctaatgctatccctccccttgccccarccccctgacaggccctggtatgtgatgttcccctccctgtgtccatgtgttctcattgttcagttcccacttaygagtgagaacatgtgatgtttggttttctgttcctgtgttagtttgttgagaatgatagtttccagcttcatccatgtccctgcaaaggacatgaacacattctttttttatggctgcatagtattccatggtatatgtgccgcattttctttatccagtgtatcattgatgggcatttgggttggttccaagttgttgctattgtggtataagtttttgtgtatattttaaatctattttccttgcaggcaagccattattttcttctttttttacttttttatccattgctttaattgaatatttataagagggcactgtgctggagatgtgaggataarttctcaagaaaattttaaartgtgggtagagagtaatagatgcttacatctgatattatgcacgggtaggttttaaagtttcattgatgagtctaaaataaatctagagttttggttgtttacttcccttgccagggtcctgtattaataggaagttcacatggtggtgtcaacattgaagatgttgctgctgagwctcctgaagcaataattaaagaacctattgatattgaagaaggcatcaaaaaggaacaagctctccaggtatgttgtattcctgaaaaatttctagcttatgattagagaattatgatacttaaagataaccgtacaactgaagtaattgtcaaaacttatttaaacattttgagtgtcaggaaagttaataacttgtttgaaatagctcattttggaattatttacaattttttcatatctctataaatatttcaatgtggattcttttaaaagagtcactggccaggcacggtggctcacgcctgtaatcccagcactttgggaggccaaagtgggcggatcatgaggtcaggagttcgagaccagcctggccaatatggtgaaacccccgtctctactaaaaatacaaaaaaaattagccgggcatggtggtgcgtgcctgtagtcccagctactcgggaggctgaggcagaagaatcgcttgaacccaggaggcggaggttgcagtgagccgagattgtgccactgcactccagcctgggcaacagagtgagactcatctcaaaaaaaaaaaaaaaaaagagtcactataccattaccctatctagtaaaattaacaataatttcttttcttttctttctttcttttttttttttttttaagacggagtcttgctccgtcacccaggctggagtgtagtggcgccatcttggctcatcacaacctccgcctcccaggatcaagcaattctcctgtttgagcctcccaagtagctgggactacaggcacctgccaacacacctggctaatttttttgtttttagtagagatggagtttcatcttgttgatcaggttggtctcgaactcctgacctcaggtgatccacccgcctcggcctcccaaagtgctgggattataggcgtgagccagcgcgcccagccaacaataatttgttagtatcatcacttagtcattcaaatttctctagttgtttcaaatcaatttttcatttacaatttgtttgagtcagcatccaaatacggttcttcattgttattttatttattttctttgagatggagtcttgctctgttacctaggctggagtgcagtgttgccaccttggctcactccaacctctgccttctgagttcaagctattctcctgcctcagcctaccgactagctgggactacaggcgcacgtcaccatgcccggctaatttttgtattttgttttagtagagatggggttttgctatgttggccatgctggtcttgaactcctgacatcaggtgatccaccctcatyggcctcctgaagtgctaagattacaggcgtgagccaccgcgtccggtcccttcattgttgttgactgataagtctcataggtcttttataacttacaggtttctcttttttgctgtcatcttttttctttcagttcagttgttgaagaaactgaggtgattattattcattgtttttcgtagtctggattttatatctccatggtttaagtggttaaacatttaaaatattcctgtgtcccctttattttctgtaaattgtgtagaatggatgggacactgtcttatatatctccataatagagctgtggtttatgaatgattttaagaattcgatgaacgctgtggtccttctttcaattctttcaatttgtatgtgttcacaataaaattttgcctacagttttactggttttctctattgtccttgtgtgctgcttcccctccattcttccccccactaaaaaaaagcccccattgagtttaatattaaggcctgtgagagttgcttggtaatatttgtaatgctgctatcgaattaaattgtttgctttggatataaaaataagtgactcatcttttcgtttgtttgtttttgagatggagattcttgctctgtcgcccagggtggagtgtgcagtggcgcaatcttggctcactgcaacctccgcctcctgggttcaagcaatcctcccacctcagcctcccaagtagctaggattacaggcatgcaccaccatgcccagctaacttttcattggtatttttagtagagacagggtttcaccatattggcaggctgctccagaactcctgacctcaagtgatctgcctgcctgggcctcccaaagtgctgggattacaggtgtgagccgccgcgcctggcctaatgactcaccttaaaagaagaatttgaatattggacttygaagttaaacatttctttttttttattattgatttttatttttagtttttttttgagacggagtctcgctctgtcgcccaggctggagtgcagtggcgcgatcctggctcactgcaagctctgcctcccgggttcacaccattctccttaaacatttcttaatgagaaaactatgtcagaataagtttgtggtattgaagtacagcaagtgcaagaattattttttttttgagacggagtcttgctctgttgcccagactggagtgcagtggcatgatcttggctcactgaaacctctgcctcccgggttcaagcgattcccctgcctcagcttcccaggtagctgggattacaggcgcccgccaccatgaccagctaatttttgtatttttagtagagatggggtttcaccatgttggccaggctggtctcaaactcctaacttcatgatctgcccacctcggccttccaaagtgctgggattacaggcgtgagtcaccgtgcccagccaagtgcaagaattttgaccggcacaaagttttaaggagataaatgtttctgatggagaataaagcaaattgattttggcaaatgaatgatataaatgtttaaaaggcatggatttgatttattaggtagttacgtgaagatgatgactggagagtgaaatttagatgaggaagaaaatacttgatttacaagaatacatggaggaataatctaagattatagcattttgcatgatggtgatgagtggaaatagagcctagcattagaaaattgatgtcataatggattgatcagaattactttgtagttttcaaatgtttaagcctaaacatttggttttagtttttgtttttttaggtgagttgtgacatagtgaaaaactttcataataaaatggtactttcatattattctttatttgaaataggtcaaaacaaaagattacattccttagtgcttttttttttttgtgggggggagacagagtctcactctgtcgcccaggcaggagtgcagtggtgtgatctcggctcactgcaacctccacctcctgagttcaagcagtttttgtgtctcagcctctcgagtagctgggattacaggcatgcgtcaccacacctggctaatttttgtatttttratagagacagtgtttcaccatgttgcccaggctggtctcaaactcctggcttcaagtgatccgccctctttgtcctcccaaagtgctggtattacagacttgagccactgcgcccrgcctacattgtttagcttgatcattcactttacttattggcatttgactctttgcaaatatcttcttcatcttcaaagaatttaagattttttgttattgaaaatcaaaagaatgtgttacaaccttagatagcaactgaaaaagaggaaagaattctctatagggttcctgagcagtggcagcactgttagaataaacacatagacatgtatcctctgtaccagtggttcagaattgctcatggaacttgaaacatgatagatgcttgatccagtaaaaaacttgtcaaccagaacttctgagttgggaccttgatattgtattgtttaaaagctctgtgggtatctctatttgggaatccctcaagactgtaaactcttttattataaagttaaacatctttatcttttgggcctagcacagtgcctggaatgtaataggtgcttggtagatttttgaataaatgggataacactcatttgactgtatgacatgtattcttattgcttggtagacactctttataaattatacaaaaggtaaaatagggtcttctaatattttggcttttctttggaccataagggttgtcagtccacattttatatttttagtagagatggggtttcactgtggtggccaggctggtccgtaactcctggcctcaagtgatctggcccctcagtctttcaaattgcaggcattacaggtgtgagccactgtgcccggctcacattttatatatagttttaataaaatataaacctcttctttcagcttaggttggcagtaaagcttaggcagtatggacactatggaactggaatctaggccaatgaatggcaagttacttgatctctctgaatctctttcttatctrtaaaatgggcataatatctrtcttttgaagattttgaataaaaagttttgtttaaccatttagtaatggtagctgctatttcagtaatgtttgactataaatgactcatgtttatcatttaagtgataaactacaagsctttttatttatagtaatgttgattagacatatgcaaactacctataataaaaagacatattgatttcagcttgcacagaagatgggatttccacctaatattgtggaatcagcagcagaaaacatggtcaagctttacagcctttttctgaaatacgatgcaaccatgatagaaataaatccaatggtggaagaytcagatggagctggtaaagtatcttcttttgtctaacatgattatgcatttatttctctaatatgcttccctaaggaagttaaatcatagaagttaaagyagttaaacttctacctrtgtagaagctttttaaaaaaaaatcagatagaatgaatatgaacaaatattaaacccattaaaacaaaacactattagacccattaaacaaacaaacaaaaaataaaacaaacaccttatagagacgtgcacagaggggtcggaactgtactgtccaatacagtgactatcagccacacgtagttattaaaattaattaaagttacataagatttaaaaattcatttactcagttgcactagtcatggttcaaatactcaatagccaaatgtggttaccatattaaaagagcacacacacagaacattcccatcattgcagaaggttttattgggcagtgctgggttagtgtatgcagtgtggtggtgattgagctgtaattttatggaattagctatctggatatatagattgcatactatatacattttgcatctttctttattcacttaataacatatcctggggaactctttatgtatatggggtctttatatattagggatgtcaatcttttttctgacatttggtgtgaatctttttctgagattgtcctttattgtttaatgttatttgatttttggggaaatatttttgtttttgcatgtactcaaatctcattactttttttttttttttttgagactgagtcttgctttgctttgtcgcccacactggagtgcaatggcgtgatctgggttcactgccatctccacctcttgggttcaagtaattcttctgcctcagcctcccaagtagcttggactacaggcatgcaccaccgcgcctggataatttttttgtgtttttagtagagatgaggtttcaccatgttggccacgctggtcttgacctcctgaccttaggtaatctgcctgcccctgcctcccaaagtgctgggattacaggcgtgagtcactgcgcccagccgagttccattacttttatgctgagagatttttttattctccatcttaagatcagtaaatattcatcctcaatgtgttctgtttttttcttttgggtcagtttagttagagatgttctattttttaaattgtttcatttttacttttaagtctttaatcaattaatattttactttagctttacttttagttttttagagtatcttattctacttttagtaatgctaaagtaaaggttctgcagtgagaactttattttctttttttaagctttctagtaaaactaaaattagattaaattgccttcactagatgttccttatgcccctcttcccccaactttttaaaaatttaatgggctacccaacatttagaaaaacacttttttaatccaaatactgatttaaaaaaccttaatactgagtcacaaattaaaaagtttcagcagatatccaagaatttataacacagataatgatctgtaaacacaaagcaataacattggaaattaatataaaatattatawttttaaattttttgagacacggtyttgctttgttgcccaggctggagtacgctgacacaatcacagctcactgcagccttaaacttctgggctcaagcgatcctccctcttcagcctcttgagtagctgggactacaggcccatgccaccaccatgcctggctaattctttttaaaattttttgtagagacgggccctcaatatgttgcctaggctcatccaackcatgtactcaagccatcctcttacctcagctcctgaagtgctgggattaaaggtgtgagccatcacacccagcctatttttttttttttatttaaagaaaatacttkaaaataatttctgaattaatgaagaaataataatggaaatgagaaaatatttcaaactgaacaactgcaaggaatgtaggaattgtgaggaatactcattatcaaaggggtcagtttcttaatatttaggttggtgcaaaagtaattgcagtttttgcctttttttttttttttttaaaaacggcaattacttttgcaccagcctatctaacttaaatgtaattatctaaggattaactaaaaactgtccaagaaccatccaagagtggatccttatgcaatttatatggaaagtaaaaggataagaattgccaatttttttcctattcaacagcattaatttaatttaatgggtgatgttttgctgaactaaatcattccttactatgaatatggtaccatgtgtgcttttttccccttacttttaaattttgatacagaaataaatactataaggaactcctaaatacactttagtcaacattgccggttgtttacatttcaccctgtgttttattctctttctgctctctttctgtctgtgtacacatgcatttgtgtgtataaaaatacaaatatatttggaaccattaagagtaagttggagacattgttcttctagtgtctaaaaacaagaatattcttttcttttttgagacagagtcttgctctgtcgcccaggctggagtgcagtggtgcaatctcggctgactgcaagctccacctcccgggttctcaccattcttctgcctcagcttgccgagtagctgggactacaggtgctcaccacygcatacggctaattgtttgtatttttagtagagatggggtttcaccatgttagccaggatggtcttgatctcctgayttcgtgatctgcctgcctcggcctccgaaagtcctgggattacaggcgcaagccaagaacgttctcttatataacctgactacatttattaaaaccaagaaatttaatactgagaaaatattatctaattcataatacatattcaaatgtagccagctgtcctactgatgtcctttatactatttttccccaggaccaccaggatcacacattgaattgagttgtcacatccatttgacctggaacagatctggaagtttgatttatttcttgaccttattttttgttgttcctgtttttctttgttttttttttttgtttgtttgttttttttttttaaagaaggggtcatttatttcatagaatgcccttcagtttgtgtttctctgtttgatgttccctcatggtttttttttccttcatagtgcacaatgtcaggaggtacattatgttggtttgttccagtattgataatgttaacttggctcacttgtttaagatcgtttccagaagcttttttcattatagagtcattagtttttcccgttgtaattactatgaaatttgtgggaaaatattatattccttgtcaaacttttacccattagttttggcatctgctgatgattttctaactacatcattccctctatatttactagttggctttgtattatacggaagagctttctcttctgccccattcgtttgtatcaggatgggctcatccattctttaatcaatgagttatccattttaatccttattttgttacgcagactgtcccagatttggccagcagaggccactttcaggcttgctcctgtggcctcttttttttttttttaaataaatgaaaaattataaataaaattataatttaacttacaatattgaaacaaatacagactttcaggaggttgttaaattaatagtcttgcatgcccttcacccagtgatgacattttttttttgagacggggtcttgctctgtcacccaggctggagtgcagtggcacgatctcagctcactgcaagctccgcctcccaggttcatgccgttctcctgcctcagcctcccaagcagctgggactacaggtgcccgccaccacgcccggctaattttttgtatttttagtagagacggggtttcaccgtgttagccaggatggtctcgatctcctgrccttgtgatccgcccgccttggcctcccaaagtgctgggattacaggcktgagccaccacgcctggcccaatgatgacatcttatttagctgtatatacccaaacagttagttgacattggttcattattgttagctagactaaatattttacttagttttcaacattttttttaacattttaaacctgcagttatttgtgtgtatatgtataattttatttaatttattccatacatagatttgagtagccactaccacaatcaagatacagactgttccatcaacacaggagacctctttgcattcacattgtctaccaattctttcctaccctgtccctgtgccctggaaatcactagtctattcttcatcctctatagttttttttttattttgagaatgttatataaatgcaatcatataatatataaccttttaaggttgacctttttactatacataatgcctttgaggtctatccaggttgttgcatctttttctttttcattgctgagtagcattccactgtatagaagtacctgatttcattcaaccgtttacactttgaagggtatttgggttatttccggtagttttctattaccaacaagctgctacaaacatttgcaaggtttgtgtgactgtaagtcctccctttgtccttttgatatgcccatatttttatttgagcaagccttttacattttgtgcaacaagatattccaggattatcttcagttttccttgtcacagttcggcaatccaccttttctccaaaggaccctggcttctttttgtggaaaacaatatttattaataggtaccaagatagacatactacttaatgcatattgctaatcttgtgtcattgcttccaggccttttcaacaaacagaaccaagaagtatgtgtgtgtgtatgtgtatgtatatgtttgtacacgtacataaaaacacacctatatttatgtctgttttttttttgtttgtttgttttgggacagagtctcgttctgttgcctaggctggagtgcagtggcgtgatctcagctcactgcaacctccgcctcccgggttcaggcgattctcctgtctcggccccccgagtagctgggattacaggcacgtgccaccatgcctggctacttttttgtatttttagtagagatggtgtttctccatgttagccaggctggtctcaaactcttgacctcaggtgatccgcctgcttcagcctcccaaagtgctgggattacaggcgtgagccactgcacctggccttctatctgtgtttttaaaaatctccaaatttatactgataactctaattccacttgagttcttcaaggttcattctagctttaccactttctatgtttataattttcttattcaacatttacataaatggtttttattagcttcaatatagttattcctttygttaccaaaacaccaggggtttggtcaaggtcctgctgcrcagaaagccaatcactgagaagtattgccaaagaagaagggtttaattgggtgctgcagctgaggagataggatctcagtctcaaatctatctccctgactaaaaccaggggtttatatggcagggaagaaacgtaacaatgtgtaagaaaacaagaactagggaggggcaaggaagcagtcatgatgaatacgtggtaagagtctcattgtctggatgtggtgatctggtgagttgcagttcttcgatacatttttttgagaggtcccaaggtcccttcctgaggaaaaactcctaagttttaagctttaagaccagaaaggtcaatttctgtgtttatccaaaagaacagtctatgggactgttgggtcagtttcagtcttccctttctatttatcagttcctcaatcatgaggaatccagtcattggtctttctggctgcttcatgctgaggaagggtgtcataggcagctccataccataggtgaccatgtagccacccaggaatcaaagtttcatctaatagagagtttcttctgacacataatatttctctctctggtgtaccacttccaccaaagasaaatcacagcaggatctacctgcaaaataagcttctaccaatctasctgcaaaataatcttcagtcccatatacttggcctgattacccacacacagtgcgacaagaatcattgcccatagattcttccaaattggctttgctggaacatttcacaaggtcatttgagtcaaagtcctaggaaaatagccagttcctctggctgtgtcccattacaaaagaaaacaggtttttattaaatatatgcaaataaacacattttccatgaattaagaatattcacagtttccaaattctggagaaattaggcagagagagaaatatgcctcaaattctacttattaaagtatcctctactcaatacacttaaagtatatatcaaggctatatatagctcaaaaggaacatattctccagactctgaaaaacaaaaaacaaacaaaagaatcatcaatatttcaaacaaaaaaagccataaaaattatttcagtcttcattatttcagtccatgcaatgaactcctgctctgcttcatattgggttagcaatctttataaacacatcagctctttaattagagtcctgaaaggtctctctaatccaggggcacaaactgcaaagtttttagaaacctgcattaaagaatccttttcatgaactcctccaaagaagmaagccctggaccataggtgattataagtcactttttgaggagattaaaagcaatatatcaattgtggatgttgaaagtcataagacagtcataaagacacagttgataaggatatttggttacttgtgtggcatacaacaatttaacataatcataattactactgacaacatatattaagacacatcagaatttcaggaatgtcgtagaatcctggaatgcatattaacaacatatctaaataaatataacccaaagacagttaaatactacctcacatttgataatgcttcctgtataattctaacataacaagcctaataagcctgatatatctctcttggatgtcagggaacctaatatccaaaaaaatagtttgaggtcaaaaagactgaatttcgatcttgaaattttgcttatagaaagtttgccaaatatcaaagttttaagacacttgttatcacaaaatagaatcacaaagtcactgtaaaatgtcattcatttagccaaaattatacaaaaacatttactttttcatagagaggagactaattttcctaagcaataagatgtaataaagatagcatgccaactaaacctgtctggccccccccactccattttctctttgcaacttactcagaaggcaaacaaaatcttttatctcttaatattacacaaacattttgttcaaaagcaaaaaccaaaattttcytttatatattattaaagttaataaaactrtataaacaaatctatctaattttaatcagtttgaccataaggtaagatttccataaacttttaataactggccccaattttctttttaaagagcatatcagtgctccaagaaaaccatgttcttctaacacatagacccagatgctggccttgcatcagtgtgcttttggtattaatgtttaatttatagaaaaactctgatcttatccctcaaaatcggcctttacagtcttacatggctacctcttccgcagtgatccctgggcctagagggattgaatcrttttaacttctggccctgtgtctcataaaagcagttcattatgagtgttcatcttcaaaccagtgcgacacctgcacatattctgtttacaagtacagatgaaagcccatcattgataaacttcttgggatcaaaagtcactagaaagtctctcttttttttttttaactacttaattcaaatgaatgtcacttaattttaataatggtccacacaactaaattagtttgaagagaaatcctaatcaatataatttccttaatgacagggcccgtcttttctgaacattaaaactttgtacccacatcacagtttttcttcattaaattattgattgaattgaattatcttggatataaacatttaaacatttttattctcccctactttttccaaataacagaatatataatgtactgttcagaacttgtcttttattattatttttgtgtgtgtgccagaaatcttaaagctcttgtagttctttagatcattagaggtaagcaaaatccaccaaattttaaatggctggtgtcctctatcaatttttaaaggcttgaccacagtagcttaggaactttagataaatagggcaaattgtagaaccaaacaaaagctttccattagaaacttaaaaagtttacggttttatatatatgtatacacaagcaaaacccacaggagaacaacagcaaacaaatgaaaattagaagcaaaaaacaaacaggaaacccagccctcaatctttcccctactcagtctaccctggaggctacagtgttacccagaacctcccaaaaaaaccacatgatgaatattttattcctggtacacaattcaataaccttaagtccaccaatatcaccatacatcttgtgcaatcaagaaattcactctaggcccatgatcagtaaatactccagcagtatccatgcaaaacagctaacatagtgtgaagcaatgtaagcatgtatgtgaaatatgggtccacactagatctggcttcatgcttaactattaagaattgctaaattgctgatgcatttctttacagtatttcttattttacyttcatcaagactaagagctttaactatgaaatgttaattagccaaatttctctcattctcaggttttaaagaatctattgtctaaactcttctgtgttctgttttctctttttgtgcatgaagatagactatacactggaaaaccagaaaagctacatatgacttacacagaccatccatgacatgcctgggctttccaatcagtaccagatttttttcctcttcctcctcctccttctcctgggctttccgatcagtcccagattttcctcctcctcctcctcctcctcctcctccccccgctccccttcccccctcctcctccgcccctcctcctccacctctcctcctccccctcctcctccttctccctcctccttctccctctcccttcttctttcttatttgtttaaataacatcattttactccaggacagcaagatcttttcacatacaaaattattatctttataaccttccttaccaaaaatacatgatcatcatatacataatttttttcatacctttctcccccacttgtttccttactaccttgtttcataaaaaactttttcaagcccataatttgaattaacttttagataacttctgaattaaacaaaattattatttttctcataacattttttggggcacattttttaaacagaattatatcttatccttagtaaccttaaatgttagtgaaaccctagaaagcaatcctgaactatattagcattttatagatgagaacagttccacaatttttagaaacgtatttccctatatcacaaccctttcttaactggaaatgacccagatatccaatgagcatcaaaaataatttcaaaattttaaattacacaagaagtttacctaaaacatttatcccaattacaagtattcagttctttcattttaaacagtttatctagattacttctgaaaacatatattagatgccatcatttaaagttatttccttattaaccattttataatctatgaatatcagtcattcactgaaataakaactttaaagttaactacataggcattttcaccaataactattttcattaaaccaataacttaattactcttttcaaaaaatttgcacaaagatcattttgttttggctgggtttatagttttataaccttctatgccaaaccctgacacctcaaaatacctaccagagacaaatataaaatccaggcaaaaatrtatgctgacaattctgaggacgttgctattttcattttactaactattttaaagctagcttgtttagtaaagatttacttaactcacatgaacttaaaaattgcttggacttaatttatgagtgctcttttacttataagccaatttggtagacacaacatataacaataagtgttcatacaaataaacacatctagacatgtatgtatacacacacacaaatgaaaatccagtagtgtttaccttggaactctagccatgagatagcaatacaaactcactgagtttacatggttacactttgtttactccaataggtaattcactgaaagctgtgaaccaaaactttgggtaaagcagttttcatggcagtttgattttctaaaggccaaacctccccagactccaaagaacactggggccaaacatcagcaaaggagaacatcacatactaaccaggctcaaccctgcttagcgtagcagcacaaaagtctgggtaacacacaactccatcccactttttcattcagcagcaaaccccagattccaaacaacactgggaccaaacagtattgcaaaagtgtatcattttaccaaattctaatttctcatgactatatgaaacacaatcacccaaacacaatccagctgctacagcaacaaacaagccccaaaagtgtccaaactgacacacttgaggtgcttcctctctccattagttgggcttggtcaactgcaaacaaaaattccttaggaatttcccaaattgagaggagctgatccaactgtccggtacccacaaaggacgctcacttgcccggacacaacacgcaattacagaaaaacctccaagaatgttcttactgaaacagttagggtgcttccctctctcagtcatttgggcttgttcaatctacaaatgaaaattctttaaagatttcccaaaatgagaggagcaaatccttatgtctaggcccataagggacacttacctatatcgatgcaatgtcaagtttcaaaggcagttctaatgaggcaatcaggaatgtggttggggccggctgtggtggggccagagagagactgacactcaccttcagccaaaactgggtgggcagctgcttaggatggcttctgagactccctgcccacatcagctgagtcacaagcaacatgttccctgtcaactaaccaaaatctgttacggaatcactaggggtttggtctaggtcctgctgctcgccacacagaaagccaattactgagacaagtattgccaaggaagaaggctttaatcgggtgctgcagctgaggagatcggagctcagtctcaaatccatctccctgactggctaaaactcggggtttatatagcaaggaaaaaaatgtaacaatgtgtaagaaaataggaactagggagggtcaaggaagcaatcatgatgaatgagaggtccagagtctagtctcattgtctggatgtggtgatctggtgagtttcagttctttgacacatttttttgagagccatgaaggtcccttcctgaggaaggaactgagataaaacaaatgtaagcttcaagctttaagaccagaaagatcaatttcactgtttatccaaaagaatagtctgtgggactattgggttggtttcaatttgctcatatatttttgttgttctttcctacccatagatgaagatttaccaacattggcactattgacattttagggtaggttgatttttttgttgttgttatgggaggctgtcctgtgcttggtcggatgtttaacaggatgtttatccagtagcattcaggtgccagtagcaacctccatttgtgacaaacaaaaatgcctccagacatttcctgatgtcccctgtgggacaaaactgccccttcttgacatttactactttagattcagatttccacgttacatcccttgagcctgaagaactttctgtagcatttctcttagcacaggtctgctagtgatgaatattgtttccattattctgcaaatatctttattctgtccttcttttgaagtatattttcactggatrtagaatcttggcttgatatatttttctttcatcacttttttcctgtcccattctccttttcttccagtttcacattagacttcttgatattgtccaagaggtcactgaggtgcagtttcttttttctttttttttcttcctgcagattggataatttctctttgtcttcaggttcactgacccatcaccagtctgctgttaagttcatccagtgaattttttatttcagatattatactttttagttctggattttccatgttgttcccttgttttattctctgcttagattacctgtgtgttcatttattatgaccatattttctcttaaatccttaaacatgttttaaaaagtttataatagtcttctgattattctaaatttgggttactgtgggtttggtttcagttgactgtttcttctctttactagtggttacatttccccgtttcattacggatctagtaagtttgactcatacactgtgcattttgggagctatggtgtaaagactgaattctgttatcttcctctgaaagaatattgacttttggtattaakggtacttaacttagctgggctccaaactttttctcctgtgttgggcagcagctgaaattgcttgcttctttcaaccctgtatcttttcaggagctgcaaggagaatgttgtggttagattggagtgaggaaggggtagggtactgaaaggtgaagtcagagaggtgacctttgttaagagccattttggtagagtgctgggrgtaaaagcctgattagagtgggtataagagagaatggcaggaaaaaaatttggtacaaggagtttaagcacaggggttggcatttaataagtattttaggctttatggatcacatatagtttttgatgctgctgttttgcttcttcttcttctctttcttttccccttttgacttcataatcctttaaaagtgtaaaatccattcttagcttacaggccatttgaaaacaggcacaagttgggctcagttgctcacacttttaatctcagcattttgagaggctgaggcgggtggattacttgaggtcagcaattcgagaccagcctggccaacatggcaaaaccctatctctactaaaactacaaaaattagctgggtgttgtggtgcatgcctgtattcccagctactcggaaggctgaggcatgagaattgcttgaacctgggaggtggaggttgaagtgagctgagagcatgccactgcactctagtctgggtgtgagaacgagaccctgtctcaaaaaaataaaaaataaaaacaagcacaggccgaatctggccatagtttgctcacccctctatttcttttttttccccagaaacccttgttctgagacccctcttttaattagacaaatcttcaaggagttgctatgtagtaaagagtaagggggagataggagttaaaagatttttttttctttttattaaggtgaggaaataaaactgttttagcaagtcggcaagatttagccaatagaaaggtaaggggtggggggaggcagatttataatgtaggggagacagaattgctggaacattatttttgagtagaggagaggggatgggatatggggcccaagtgatgggattagctacgaacaaggatagttaatttttgacaatttttaaataatttaaaatatttttgaggttttctttttctttatgtagtgcatagcatggatgtagacccaataactttgatggggcagttttaattcccaaatattcttttttaaagaacagtttgaattcatagtgaacataaattgaaatattttcattaagtaacaaaattaaaatgtgtcttttccctaaatgaaagaccatttgactatttgatactttattgtatctgtcttgaaattaaggtcatttttctctttttcccttcaaagtattgtgtatggatgcaaagatcaattttgactctaattcagcctatcgccaaaagaaaatctttgatctacaggactggacccaggaagatgaaagggacaaagatgctgctaaggcaaatctcaactacattggcctcgatggaaatataggctgcctaggtaccatgtgtttttatgttagaattggattcactaagtttaatttggatttactaagtttaatttattttctctgtgtttgttgcttatacaaatcattttcccctatatagtaaatggtgctggtttggctatggccacaatggatataataaaacttcatggagggactccagccaacttccttgatgttggtggtggtgctacagtccatcaagtaacagaagcatttaagcttatcacttcagataaaaaggtaagggcagggcttgatatatttttatatcatgtaaatatataaaataaatacttataaaaatgtatatttttatgttttagaatttagaattcayatatatgtcttttaatatatattttgagtctttttttgctatcatatcttgaagatttttgcaattcaccaagagactcttctgaaacactcattttaatgtttgtgtaatctgtcattatagatgtgccataatttagaactatgtgtttattaatgattatcaaagtayaagggatgtgaagtatcataattcaaaagacatatatattattaatcactagatatttgttaaggagtgtatctattgtgtggccagtgtagattttgtaaggcttacaaaaaagataataatctctgtggaactattcttactggatttaaaccgagaattcttcactgatagggatsatatcttactaattgttgcttctcgtagtgtctggtataatgcccagtacatatgtaggtcattaatcaatatttattattgatgatgctgctggcaatgtatatttttatttgtggtgttagaccgtagaattgtttaaaatataaatttatttcaatgccttttcctttgagcctacagccttattttccatatttattaattttgcaaggaggattaaactaaatgagatgtaaaatgtgcattatttcccttgttyagtaattactaaaacaagtaaacattttattagaactatatttctatagcttcttttgacaaactcgagaagcagagtattaaagacaatctaattatctaactgttgagtacttactactagaattgagttgagtacttacaactagaattagaattctagttgtttatttttctaagcatggcttttagggcccaggtgcaagaatggagaaaagtatatgaagagttacagtgtaggggactgacatgatgggcrtcagagttggaaacagaatggwaacccagggtgtcaatgtggatagcattgaagtggccatatattttgtgatggtcactgtgcttggacttggaaatacatgggcccttctcttaagttacttatagttttactggggtgattgacacaaagtagtgctgtggaagaacagaggacasaggcaaaaactgggagaatcagggtggccttcactgaatggatgataccttaagctgtcttgaaaattaaatgagggcaagaggaagaaaatgtacaaagacatagaatccagagagggccattatgttcatggggtggtaagatgcttatgtgtaagaatatggcattattgggataaatgataagagataatgttggcaaattgtgaccacatttgtgaagatccctattatctatagttaaggagtttggattttaactccctaccccagcacatacacaagagaattcataatraattctcttgtggaagagatccctgacaaaggcaatatcagtaagaataaattagaggcatttctgagatagggtcattaaattcattttttttcttcttttctgggagcctcatagaagggttggttaagttaacattaggactttgggctggggagaatcattgggtggtgatgactttcatgctgtcagaggcaaagtcgaggaataggtatttcagaatgaatgtcaagtttggattgtggtgactatatctagtagacagttcattgaaaagatattgtacttcytatattggagaaaagttgaagtcttaggagttggtgaggtgatctgtgcaagtgagatgaggaaccaagaatggaacctggcccctccatttttgttgaagggttgaatagagaaggaaaacccaaatgaaaaacagagaacaaatgacagagataagaacagatcgggagagagtggtgacatcgaaggaccaaggtgaagagttttgagaagtaaggcattgggaaacaatgtcaaatgttgtaggactattcagacagagtaagaactgaaagaggtgagtgggaaccttcgtaagaatagtagaagagatgggggcataggccagattgtaatggattgatttgatgaggaattgagggaatagagatatccaggagagattactcttccaggactttttttttttttttttttacaaaggcatggaagggatgcagtgctatcagtcaaaggcagtaggactgaggagagttttgtggtgtatgttttcttgcttgtttagaagatcaagaagatgagctctttctagttggaggaagagaagagatttgaaaataaagagagtgaatgtagctagaggggtgaagacctggaggaaatactatgtagtaaatagatggagataattatctggccaggtcagctttggaaaggtggttactcctttcytgaggtgccactaaagaaaggaaggttgtatgctaaaagttagagagcttgcatgggatagaaggcttatgaagagagttaaaggtatgaggcygactgctaagttgaggattgctgatgaattattattttattgctcttcaggttatgctagtgtttccagttttgttttcagtttttacttttttacttttccctgaataagctatggctggaatcatccaaagatgcattgtttgaagtaggatggcagaggaataggtatgacagaattgagcatgcaggtggcagtgacactgaattgcttagccatatgtcccaggctctatagtgaagaaagtcagttccattgagagctaatagagtagaagattagagagggattgagggactagaggcttttttttgggagggggggcggggtggcggactagaggcttttaagaggaaaagattgtgtttgatagagctagaggagaaaggcattaaagtgaaaggggaaggaggttgagcrgagaatgagatttatacatttaatattctagagacactcattctggcctagtccaggatttatccatggtagtaattcgtttaaattgactacaggtgaaagtggcttggtagagtaaagatccaagaactttaaggctggagtgttagatggtgcctggtggtgaatatggaaactatccagaatgaggtgagagggagagagatgagagatgccaaaggctgctatgagttctagtctgttatgaattccagagcttcatttcttaaaggtctgggaataatagtggtaaggtaaagaatgtatagtatagctcagtgtgtctcaccccttttcatgtcatggcattcacagaaggtatttcaatggggccttrgaggtagatggagaagattgcttgtagtcagagtccactggccctgaggctcctgctgccccagaacattactagctgccccaagaattgaggggaaygatattttggtgtatctacaatgcattttaatctcattgtttgagaagccctggtatagctgagtgaactaaacctctttttttwaaaaaagagagattatttggaaaggataggagaacactgattcagaactatcattgtgatgttgaaagaatgctgacccaaacaggtcctgagatttggatgtgaaatgtacccaagagagggccatacaggagaagctgggtgattcttagggcctggtttgtgtaaaacgttgattacattgatggggattgttttgcagtgagcaggtctatgcrtatgtacccccagaggccaggggatctgagaggccagagaaagaggctggcaaatccagttctcagaaagaaactaaatttatatagggacttagaaacagaagctatggcttgggtggctgcgagatggtggatccccacactagccctccagaaattatcctttatgtagtgagctttttttcttggtaacacttgcacagctggtcacatctcagaccctcttgtcaaacttgtgaccattgaggaagttaggtaaacatctttatgagttgtcatttatgctacaggcattgtttctttataagggttatctatgttacaggcagtatttcttgaccttgctgcagaaggccttgctctgcaggagtcaaacattagtcattatgacagttttgcttcaagatggtgttactcttgccacacaacacgcccttttcctacagggataaatgaggaaatgataggtgacaaacactaaattggagatcttgcacatgagactatcttacagtatgatctgggggtagtcacgtaggtgaatggccaaatttaacaggagaaagtaaatggaattagatggtcttgttcatatgggatatagtagagaaggaaatgtgaactaggtgttgaaattacccaaggagatggaaataagttctggtgggcagtggactacatagacttcaataaagagagctagaagaggktattgtggtttggtctgaaaatctttctatcaagttaatgtttatcatgaagcacatatactagtattttttggggaaaagaacttaaatttcttttaaattttaatctatcagaacactttattcataggtactggctattctggtcaacatttttggaggaatcatgcgctgtgatgttattgcacagggtatagtcatggcagtaaaagacttggaaattaaaatacctgttgtggtacggttacaaggtgagtataaaaggtatcttgcagttgttcctaattctttaaaagttcacrtttccatggagttcagtttgttaaaacatagtttttaaatagctgtgtctttgaaagcattatacaatatgaaattaaaactatagtttttaaaacattttaacattggggcaaaatgtttatacttttgcttggtataatttgatacactttttatttrttgtgatttgtcttgaattctgacttgcctgaattactaagcaagtcagaattattgtaaggcaaaatattttataagataacctgggcttttacagtgttttctttggtttagaagtgtttatactaaataatggaagtctcctctgttgaggttttattcttataccatgttttggcaaacattttaaaatgcttttgtgtgtgtatttaaaacatttatatttgcataaatcatttacaggtacacgagtcgatgatgctaaggcactgatagcggacagtggacttaaaatacttgcttgtgatgacttggatgaagctgctagaatggtaaattggccatgttcatctaaggaggatttataaacacagattctaaaatgaacctaattattaatacagctaataatttgtgtttcagctaaatattatgagtgtaatgaatggttaaagaaaacgattattcatgactcttgctgaaagatgttaaggcagactttattcagagggactgttgcaataagcatagagactactgcagtggagttttgcagtaggggagaaagattgggcccaactccaaatacagcaaggaaaagtgggaatttataaccaaggaagagggtcggggcagtggatgaaaaattattaaaaggatacattatgggtaagggaggatcctggctaaactgacttaagcaagattcttggtaaaattggactatgcagggacaaatacagaagtccaaaagttagggccaagttgagaagagagttcagagtagcctttgggaggctgaggcaggaggattgcttgagtccaggagtttgagactagcctgggcaacatagggagaccctatcttcacacatgtgcgcacacacacatgcacgcacacacacatgcacgcatatgtatgtatgtgtgtgtatctatctatatattcgataaatatatattgaaaaaacaaaagagagtttggtcaaggagagaatctttgtcagaacgtcttatatctgtgatcatcttaaacaacggtcagctcctgcccaatcttgtttgttgttttgtctgtattcttacttcctcccacaactgtgattattttcaagcaaatcccagacattatatcatttcatacatttcatcatgcatctgtaaaagataaaggtattgataatggtataaaaaaattactgttacttgttttaggtggggtaatggtattatggttatgttttataaaaatacagtctgttgaaatttctgagtctcttatatcttttgtttaagttctttgtaagggtcagaataagtctctgcattgtagttggttaatatgtcagtaagtttcttaatctgttggtttccccttttaaaaagaaaagtattttctgtggtttatttgttgaaaaatccaggttgatggtcttgttaagtttctcatagtctggattttaatggttgcatctttaggctgtcattcatttactgtgttctctgccctctctgtgttctctgccttgtgtatttcctgtaaactgggagttcaatctgtaggcttgaccatattcatatttgattttggggagcagggaacaagaatatttcatagtaggtgtttaatttcatcaaaacgtatacaatgttaatctttttgtggtattactagccattgacatcatagcttagatccagtattttgtttgtgttgcaaagcgttgctattgtaattctgtcattcttcacttattatatgtaatgcttctaaaaagtaatacttccacgtgtcaaccatttgttaccatggagtacattttgcataggaaaagtaggataattacctgattgtttgcctttattgaccaattttcaaaataatgtttgttctattatgtccaataaaggtgacctagggttttttttgttttttgttttttttgtattttgtttactttttgttttcaggtgtgtgtgtgtgtgtgtgtgtgtgtattgtgcgtgtgtgcatacacatgcatacacatgtgtgttccactggcatactgttttgaacttatgacttaaaacattgatgtagttcagttcatgtaagttgtgattgaaattgtccaacctttggtctttgggaacctcttcaggttaactgttgcatccttctgagaagccctctatctggtatgataaaatgtttcaggctcatctttacgtttcttgagtcagaacttgaatgggccaaatggtatttagagagcacaatttggccttatgagtattcatagatactgggttgattattgtttctgagctttttaagtggcaagtctgagaaaacatgtattttttaaagaggtaatacttgagttcatactgatattttcaatgcaagtccaggagtatagatttttttttcttatctgacatctgtttgtaccttcgttcatgccatactatcataattattcatttgctttgtcccttagtacagatatgacagttttataataagaataccaacagtctgattactgaaagcaattatatctgcatttctttctgtcctttagggtatgtcccacaacttagtggattttaaaattcatgtgaaataattctctgtgtgttttgtctcagctttgtatagtttcattgtttttaaaggkattgctttttttttaaaaaaaaaaacacaaccttttgttttttattttgtatttacatgattccaaagtggaaagtatagaacaaggtattatcagggaatctagcttttatatatttccctctttacttcttccccaacaggcaacctttttaccttttttktttgtttgttttttaagaaagttttggtttatctttccacttcttaaaaacataagctaattgtatgtatataactatatgtatgtgtgcagtagtccccccttatctgcagggaatgtgttgcaagacccctagtgggtgcctgaatcacagatagttccaaacctgtatatactgtgcttcttcctgtacatatattcctttgataaagtttatgtattagacatagtaacagattaacaacaactaataataaagtagaacaattataacaatataccgtgataaatgtgaatgtggtctctcaaaatatcttattgttctatactcacctttgtggtgataatgagatgataaaatgcttacttggtgagatgaactgaggtgaatgatgaaggcattgtgacatagtgttaggctactactgacctaatgatgtaacagaaggagaatcatctgctttggttcatcctggatcattgagccatgatgttgattgttggatgtcaagagtagataatgttgatgactaatggaagagtagtttatacagcgtggatacgctgggcraagagatggttcacattccacttggagcaggatggtgcaagatttcatcacacttctcagaacaacacacagtttaaaacttaatgacttttttatttctggaatttctcatttaaaatttttggaccacagttgactgcaggtaactgaaactgtagaaagtgaaattggataagggggggactgtgtgtgtgtgtgtgtgtgtgtgtgtgtgtgtgtgtctcccttttcccactttagattaatggtaatctatactttgtttcttttacttaacaataatgtgtatcagagaacacttcatagtagatacagagagatgagaattttttgtcttcccttccattatgtttatagacatttcattgaacactcgaacactctttgggctctatagcttaatcaatagtagattcttgattttttttttttttttttttttgagactgagtcttgctctgtcacctaggctggagtacagtggcgtgatctcagctcactgtaacctttgcctcctgggtttaagcaattcttgtgtctcagccttctgagtagctgagactacaggtgtgtgccaccacgcccagctaattttttttttttttttttttttttaagacagagttttggtcttgttgcccaggctggagtgcagtggtgtgatctcggctcactgcaacctccatctcccaggttcaagcaatcctcctgcctcagcctcccaagcagctgggattacaggcatgtaccaccatgcctggctaattatgtatttttagtagagatgcggtttcaccatgttggtcaggctggtcttgaacccctgactttgtgatccacctgcctcggcctcccaaagtgctgggattcaggtgtgagccactgcrcccagccttgtatttttagtagagatagggttttgccatgttgaccaggctggtctcgaactccagacctcatatgatcctcccacctcggccttccaaagtgctgggattacaagcatgagcccccaggcttggccagactcttgaatttaccsagttaatgtgatgtcatttcacaaaaataataaaagtcttatgtccttctttgggaaagtacttactagtaaacaaaatttaactctagcttggagacagaagaatttaaacttaaacctgaattaaaaataaagaatttgagcaagggaatagtaggagaaagtatttcagaaagcctattttgactttgagatgtgggatatattgaagggaaaaggggagagatagtaggagtccatctagtgcaatacttagatatgagaaaaggtgaaggtaataaataggttataacttgtctctgaaagtgcacttttttggaatgaaaacttaaattaaraaaagcttggaggacatgaaaagaaggagaagaaccagtaggaccttgatcaaatagatcatgagaggtaaaagtgaacagttgatttaaattatgactacagtgtttttattgactgggagattatagaagtcataacaataataatattgaatgagatgatgatgatattagcagttactactgtttattgagtgtttactgtgcatgcaatgctaagctgttttcttcaaggattatctcatttaatatgaatttggtgataaaatttccatttttatagatgaagaaacaggctagataagttaacttattcaaggttgtatgtcataagtatcagaggggggatttgcagccaaagatatctaacttcaaagccttttcttaastaatttactgaggaagagagaagctgagtttgtttttttggtcttagacatgtctaaatttgtatgatgttttgtatggtaactggtggatatttttagacagattgtagagagaattggaactcaggttagcaattgttaacttactgacaaaaagtaaaatactaactagtagacccaaatttctatcccaacattttaagttaagattgtatacttatttcaaaacaaatttttacttagatgtgctttgagttgtggagtatccaacaaagacactcactgtttctgtctttaagataaaatttagaataatatatatatatatatatatatatacacacacacacatacatacacacacattttatacacacatatataatcttatgtaatacatatgtgtaatcctagcaggtggtataacatcttaatcagaaagtatttaattgaagtttggactatgaggagtgtcagacttgattatcctttgagaatgtcatttgcttataagaacgtaatgtgatttatagcaatgtcagaatagtccagatgttttaaatggaaaaaattgagtgtacattaattttgcactgacctgtagttctgaatttacctttttgtgaaaattcttcgttcttttcttttaggttgtaaagctctctgaaatagtgaccttagcgaagcaagcacatgtggatgtgaaatttcagttgccaatatgatctgaaaacccagtggatggctgaaggwgttaaatgtgctataatcattaagaatactgtgttctgtgttattgttctttttctttttagtgtgtggagattgtaattgccatctaggcacacaaacatttaaaaggatttggactgcatttaattgtaccattcagaatggactgtttgtacgaagcatgtataatgcagttatcttctttctttygtcgcagccagtcttttttgcttctcctacaaaacgtaacttgcaatttgccagtttattattgttggatacaaagttcttcattgataagagtcctataaataagataartacgaagataaagctttattctttagtgttaaaatacagtatatctaataactagcctcattagtagagcagtatattaaaacaatgttttatgtaaaaagtgtttatcttcagcaccaaatacatgataaatgtatcaatcactatttataaacagagctttcaaacactcctcagaatattcttctaagtattttgatgaagtaactttgtaattatttgaacattgttttaatcattaggaaacactgattaactgcaagtcttcatgattctgtcatattaagaaacacctgtaggtttgcttcaaataaaggcatatataccaaggamttacagacaaaattaagaatgtcaatttaagttaataaaaatctcccaatatgatttgggttcatggcttttgtttgcttgttttgaggtaaacacagtagaagttgatttgttcgttattgcagtatagaggtctaagcaccaattcttagatcatatacttgccatgacagtgatttgtttttttttttgagtcagggtctcactctgtcacccaagctggagtgcagtggtatgatcatgctcactgcaacctctgcctcctgggctcaagcagtcctcccacctgagcctcctaagtagcagggactacaggcacacaccacaaaaaaacatatgtgtttttttttgtttttgatttttgttttttttttggtagggacagggtatcactatgttgcttaggctggtctcttactcctgagctcaagcaatcctcctggctttgcctcccaaaatgttgagattacatgtatgaactactgcacccagccaaccatacatattatacagctacttatagatagatagttcactggaagtctgctatttatgtgtatgccatctagtatatcctctaaaggaaacagaggggagaattgaatccaagatgcctaacttcaaagccttttcttaactattttactgaggaagagagaagctgagtttattttttggtcttggacatgtctaaatttgtatgatgtttttgtttttgtttttgttttgagatggagtctcgctctgttgcccaggctggagtgctgttgcacgatctcagctcactgcaagctccgcctctggggttcacaccattctcctgcctcagcctcccgagtagctgggactacaggcgcctgccaccacacccagctcattttttgtatttttagtagaggcagggtttcaccgagttagccaggatggtcttgatctcctgatctcgtgatctgcccgcctcggactcccaaagtctgtatgatgttttatatggtaacaggtggatatttttagacagattgtagtcacatggttctttttgtccatatatgtaaatatatgtgtgtgtgtatatatacatattgaccttttgctcactgcataaaacttggtagttaactaatgccatggaaggaaatgttgaccaagcagtagactatttaaccatactgatggatttaagaacttctacctattgtgatgttcttaaagtgtgatcagatgtatatactatgagaggcagcataacgtagtgatgatgagtacagactttgaaagtagactgtctgctttgaatctggatccactacttactagctatatgagggcttcttttgttttttgtttttttgagacaggatctcagtctgtcaaccaggctggagtgcagtggcacaatcatgactcactgcagtttcaatctcctgggttcaagtgatcgtcctgcctcagcctccttttgtagctgggactacatgtgcatgccaacatgcccagctaatttattttttatagagatggggtcctgctacattgcccaggctggcatcaagcagtctttctgccttagagtaagttttaatgctagtgtccctcagtttacttagctcttttcttatcagtgaagtttatttagtaagggaagagaacaaaaatatgtgagagaatttatatgtagaaaacaatatgtatttttagccaaatatatatttggtagtttacatatatatgacacagagtatcagagccataaaccatttaaaattgtagccaggtgcggtggctcacgcctgtaatcccagcactttgggaggccgaggtgggtggatcacctgaagtcaggagtttgagaccagcctggccaacatggttaaaccctgtctctactagaaatacaaaaattagccagacatggtggcgggcgcctgtaatcctagctacttgggaggctgagagaggagaatcacttgaacctgggaggcaggcggaggttgaagtgagctgagatcacgccacagcactccagcctgggcaacaaagagcaaaactccatcttaaaaaaaaacaaaacttgtgataattaaaagtccagtcatttagtttttactttttaaagattcattccaaagaataccagccagtgattaactaagattggcattatttgtattatttgtattattcaaggtctacttaggagttaaaaacaatgcttggtatatcagagaggatataatacagattattggtaatactagtgttttagttatctattcttgcataacagattaccccaaacacttagtgagtttcaaacaacaacatttactatctcatttatatctcatatctgtaggtttgggatcagtttagctgggattagttcttgtgctgcagttattcaaaggtgacactgagcctggatgacctacttccaaggtggctaacttgtatggctgttggccagaggcctcagtttcttaccatgtggacctatccacagggctgctcgtgtccttgtgacatggcagctggctctttgctgcccgccccctgccccccaagccacagtgcctttgtgttctagtctcattgtcacttctgctgcactgtttattagaaaatccagcccacaaaggggagggaaattaagccccactttttgaagggagaagcatcaaatattttgttaacatttttcaaaaccatcacaattcatgcttggagactgaaagaacaaacagtggatgttgagttaactcagagtttagtagctgctaggacagaggtggtacttcgaatctgctaggagtttggaagacgtctgatgcttggaatgcaaaaagaagagtgcatggctttaaagtgtttcttaagtgactgaaggggaaaactgtaacaaaattttagggaaggcaagggaaaaatatttcaaggatagagtcatcaatggtatctaatgcagctcagaagtcaagtatagtaaggactaaaaagtaaccagtggaattgaaactaactagtcttggcaagaatggttatggagaatgattgtggagaatggagacttgaaacaaccagctggtagctacttacacaccttcacacctcatttcctaaaacacataaaaccttgagtattctttatgcagtgctgatacttgcttccttgtggccctacccgcttcatatgaaaaaagcctattttaacatttgagttctctaaggtatagttgagtagatactaaatactatggtttgtaccaagagtataaccaattttgactattaaccttgcagttgcaaagcctagaccaagccagcttgattctggcacttggtagcagatgcccatgaaggggaaaaataagcaggcaaaaaccaaaaaacagaaaccaactctcaaaactccagcagagggcaatgaagctgttaatattttggtgagttgtttccatctggcaaagaattctatttagagaagttgcaaggccgggcacagtggctcatgcctgtaatcccagcattttgggaggccaaggtgggcagatcacgaggtcaggagatcgagaccatcctggcctaacacggtgaaagccgtgttaggtttctaaaaatacaaaaaattagccgagcgtggtggtgggcacctgtagtcccagctacttgtgaggctgaggcaggagatggcgtgaacccagaaggtggaggttgcagtgagccgagatcgtgccactgtactccagcctgggcgacagagcgagactctgtctcaaaaaaataaaaaaatgaaagaagttgcaaaatgatggatgtaaatgttggatggtgggtcaagggtagaggtctgtagttagtcatactcttttgtcctgtcaaaatgtaaagggtgaggaaagtcctgtggcttttagatttctataatttaacgtgtagtggtaaaacagatttagaggtttgcagtataaaatgaggaaaaaagtaggctgggagcagtggagcacacctgtaatcccagcactttgggaggctgaggcaggtggatcacctgaggtcaggagttcaagaccagcctggccaacatggtgaaaccccatctctactaaaaatacaaaaaccaggcatggtggcataaaataggggagattatcctggatttccctgcaggcccagtctaatcacatgaacccttaaaagcaaagaataatccacagctggaggcaacaattcaatgccctgttgctgcttctgagatgtagggtttgtgtgcaaggactggagagagacctttagctgagtgtggctgttagctgatagcgagcaaggatgtgggggtctcagtcctacaagtgcaaggagctggcttttgctagccatctgaatgcattctgaggtaggttcttctcacagcctcctgatgagagcacagctcactgactccatgattttggttttgtgaaattaagcagagaaaccagccaagcctatccagatgcctgccctacagaactgtgagataatacgtttgtgttgttttaggctatgaaattgctgctaatttttgatggcagagttaggaaatttaatacactaccatatttatgcttctgtgcataagttataataagccagctcttaaactgagaggaaagatgagtttttaaaaataagggccattttttttaaattggaaattaaaattctataatggactgattcttttataaaaaacaattactagaaaagtgaaattttcaaaaagcacagaaaagcctcaattcttttattcatttatttttgattctacaggataaaattgctctttcaaactgctgtagaagtttctaaatattttaaaatatctgtttatcacttgcagatttgtgatctgtttgtggactggcatcagtccacagataacattttgagcaggactgaaaaaagcaccatcacatccaatttgtgaagatataaacacaaattggaagtaagctataaacaaatgtctagggataagagactcagcattgagtagttgtgattaacattatggtactcatagctatgtaaatctgcgaaacaattgccattaactaaagaagtcatgactgttgggtgccctagagtctagtcagcactaatacagtaacacagaaatcactaagtttagcaagttgggagaagtattgaaagggccaggagtggcctaagcttcctggttcatttgttgccaattatattagtccattttcacactgctaataaagacatacctgagactgggtaatttatagaggaaagagttttaatggactcacagttccacatggctggggagacctcaatcatggtggaaggcaagaaggagcaagtcatgtcttacatggatggcagcaagcaaagcgagagcttgtgcagggaaactcccccttataaaaccagtggctcacgagctgtaatcctagcactttgggaggccgatgcaggcagatcacctgattgtcaggagctcaagaccagcctggccaacatggtgaaaccctgtctctactgaaaaaaaaatacaaaaattagccaggcatggtggtgtgtgcctgtaatcccagctactccagaggctgaggtaggagaattgcttgaacccaggaggtggaagttgcactgaaccgagattgtgccattgcactccatcctggtgacagagcgagactgcatctcaaaaaaaaaaaaaaaaaaaaagaaacccaaaaagcaaaaaccaaaaaaccatcagctcccacaagacttattcactgtcacgagaacagcacaggaaagacccacctccgtgattcaattacctcccaccaggttcctcccacaacacatgagaattgtgggaacacagtcaaaccatatcaccacctaaacactaacatctattaatgtcttcaataggagttgattgaccaccagttgagagcctgcagttcatcagttgagagtgacaattccagagtgaccagctgagcatgtaatatgaaggaaactggagaaaagcctcaactactttatgatt

SEQ ID NO: 95496 - DNA, 12388 bp, Homo sapiens
tgtgttaaacatttggttttttgttttgtttttagcgctctattcatcatgtgcttttattagaaaccaactcacatctattttggagagagaaagttgagctaggagagagagagactgagggccagggtaaaactcatgttaaatgcttttcaaacaagatataattgttaaacttttatttatttatttatttatttttttttttgagacagaatctcactgtcgcctaggccggagtgcagtggtgcaatctcagctcactgcagcctctgcctcccgggttcaagcgattctcctgcctcagcctcccgaatagttgggactacaggcacacgccactgcgccaggctaattttctgtattttcagtagagatggggtttcaccgtgttagccaggatggtctcaatcttctgacctcgtgatctgcccgcctaggcctcccaaagtgctggattacaggcatgagccaccgcgcccaacctaattgttaaactcttaatctcagcctcagagtcagtcttccactctttgtgatgctggaagtgggctgaggcgctgaaaatgacattctcctttgkcaacgggctattggtcaggctctgctactcagcacgggccaggagggaggcttcaaggtgcaaggccagtggaagaacttgcttcttcctttctgcttccagttcgcttcagttgcgagccaggccgtgtttctcccggtagtggcaatttattccattagcagcagtttattctggtttgcagtttcttccgaatcggcaccacctcaaagatatcaacaccagttggccagcaaccccttctcagcggtgtgagtcccagctctgtggagcccctccttcaagcttctacattttcatatttacaacctctttattttgttgcctcagccctgggggctggtagctgcattttgcaatcactccctgatgccttagtacaagcttgtccaatccctggccgtggccacatgtggcccaggacagctttggatgtggcccaatacaaattcgtaactttcttataacattatgagatttttttgcaattttcttttttaattcatcagcttcattagtgttagtgtgttttatgtgtggcccaggacaattattcttcttccaatggggcccagggaagtcaaaagattggacacccctgccttagtgcctctgactggaagggcctaccagcttatacttcctatgtttgcctgcctgccttttttttcttctgtcttgccttctcttaaaatgtactgagtggagagccgcagtggctcaggcctgttgtcctggtgcataaggaggcgaggctaggcgttccaggccagcctgggcaacatagaaacctctcatctatgtaacaaaaaaataataataataaaatgtactgagtaactgtactaggatctggactgggctctgggtcctctgtaaagtctgtgagcacacaaccatggaaccaatgagtttcatgttctctgtgaaacttcccaaacatcccaagtacccctctgtggtgtctaccttctaagatggcccccaataaattgtgccttttggtttccacacctttatgtcctcccctcccacaatgaatctgggctgagcctgtgactcactttaaccagtaaactgcagcaaaactgatgctgtgccccttccgggcctaacatcttttttttctttttttgacacaaggtctcattctgttgcccaggctagagtgcagcggtgcaatcacagttcgctgaagccttgacctccctggctcaagtgatcctcctatgtcagcctcccaagtagctgggaacacaggcacacaccaacatgcccagctaatttttttttttctttttttgttgagacaggttctcactatgttgcctagactggtctcaaactcctgagctcaagcaatccacctgccttggcctttcaaagtgctggcattacaggcatgagtcactatgcccagcctgagcctaaaatcaaagaaggcctcatatcttccacatttgtgctttgggaatcctggaccaccacgttaaaataataaaaaaacccagctgcctcgctggagagactatatcacgatgtcctcacaggaagatactgcatggagaaaagaaaccctgagaacacctgagaagagaggcccaggcatcccagcatctcatcccagcatctcatcccagctctagccatcatctgactgcaattatatgaagccagcaaaggaactgcccagctgaacccagttaatctacaaaatgtgagagataattaacccctaagttttggaggtggtttgctatgcagtaacagataattgaaatgccccttccctgttctatgttcttactctttaatcccataacaccttgtccctttgtacctctatcatattcttactcaagttgcattgtctgtctcccctaagagatggcaagtttctaaagggtggtgattgcatctttatttattttatcagaaaaagttcagtaaagaaaacagaaaccactcaaggcatttcaagcaaaaggagattaggtattcacaagattattgaaaggcacagcacgaggcttttggcttcaaggtcatatcaccatggttgtaatgcataggtctaaaaactgctgctactaccacagctctgccctatatccaagaaaatgatgtccggacagtggaatgtggatttggccatgcaaatacatctgccagaaccagccagccactatgacaagaacaatgacttctgtcttctttctgtcctccagatatttcatgaattcatctaattgacagaaccttcattgcacctagaagtcttgtgctaaaaggtctggaaaagccaggcttggcagcatacaccagtagttccagctactcaggaggttgaggcaggaggataactggaatccaggagtttgaggccatagtgagctatgatcacaccactacacttcagcctgggcaacataggaagaacttgtctcaaaaaaagaaaagaaagaaagaaaccttccggaaactatagctttcagcattccagttaattctatacaggggagaatatagatggagtgagaaatggatgataagggccgattaacagcatgtagtgcatttctgaatccctagccctaacacaagctctgataagtaggaagtctgataggcctgttgaatgaattgatgaatgtacaaattaatttgttatccatcaggtagtgtagcatgcaattatagtcccctcctatcctagatgctaggaagacaaaggtgaataaatggtatttccaaaaagcaaaatccaggggtagagctgagttgtgagagcagtgggatacaagtatgaattttgtaagattctcagtgttatctgtggagcccttgtctttcactctctcatgaaagtaaataggcaaatacagaatccatctcagatgttaaccttttcaacatgttttgcaaatgtaagttgtttctccaggaaataataaggctgcttttccaaggtcagccctgtagctgagtcaagaaagcattcctaaagcatatgtaaagaaaagaactcagacacagtctacacgcttgagaatagacacaactaaggccatcttgacaggtaaattctatggcttccccttgctattcacacatactatttattttcccagctattacttaaagcaccacatagctctcaatcctcagtgatgagaaaaagtggaatagagaccagaaataggaactcgagagtccagtgttctttacttaggccagcaattaacttgtaaaggctgtcacaatctcattttcagctgtattagttttgccatttacaaaatacaggcattatgtaaataaccaaacaatgctgataaagtgctgagtcctcatcactacagttatccctgtctgctctgtactaaatctatgacaggatttgtgtaattatagggtgtgttccccttgctaagcatatctcccacacaatccatttagccactcataaaccaaacactaggatttttttaaaaaagaaattagttgatcttgctagggttagtggaatgttttttatttgtttccattcctattgttgagatttggtgctttttcaaacagttgcttatagtttaaaaaaaaaaaaagactagacaaagctacaaccaagcattaatagtagtagtgaactctggggagtccgactggctgttccttttattttactttatgtgctgcattgtttgtatttttcacaatgggaatgtattgattttaaaattaaaaataaactttgtggcctggcgtggtggctcacgcctgtaatcccagcactttgggaggccgaggcgggtggatcacgaggtcaggagatcgagaccatccaggcaaacacggtgaaaccccgtctctactaaaaaatacaaaaaattagccgtgcacggtggtgggcacctatagtcccagctactcgggaggctgagacaggagaatggcgtgaacctgggaggcggagcttgcagtgagcaaagatcgcgctactgcactccagcctgggcgacagagtgagactccgtctcaaaaataaataaataaataaaaagcaaactttgtaaatattaccaatgattaactttgagtagagggattacagatgattttttttattatttgaatatttatattgagaaaaataaccattatttaaaagaacatcgactacattgttgacactttttctgcagaaagtgcaacaagtgtatcaagtgacacgtaggtctggctcttagaagtctgtgaacccttcttcacctcattaatcattggctgacctatagagactcagcaaccagaaataaaggcatgaggtcaaactgcacagggcttgggaaggctgtctgacttcagatccttcaggccctcagacctcaccgttcaaggtcagactgactgggaaaggagtgggagttttcctggggcgtggagtgtggacaccatcagaaccaggctgaggaataccaggtactgcagagcaagtgaccgttgttaagggattctttatatggtgtgactgcttattgtggttttctgtttgctttcactccattaacttgtgtgagctgcttattatttaccaagcactgtgctcatgcttggtgggggatagaaagaggcaaaatataggatcccagcccccaagaagtctctcatcaaaagtaaaaattagacaggtagaaaagataaattataacacagcaagacaagtgatataacacaggtttattcctctcaaggaacgcagaggaaagaaaaatcaagcctgaaggattcagtgagtcttagcagagtttctcgtacagtaggcagcctggaggaaggtggctgggagagggagttccaggcccagagaacacctggggcagagatgcagaagcaagaaagagcacagagaaggcacccacacctaatccctgtgttccttttgaattgctgctgtcaaattaccacaaatgccgtggcttaaaatgacacagggagatttgaccccagaatgtggctatgtgatgacgatgggagcaagagactgcggtgatggatgggagggaaggccatgagccagggtgtgcaggcagcctttagaagttggaaagggtggccgggcgtggtggctcacccctataatcccagcactttgggaggccgaggtgggtggatcacctgaggtcagaagttcaagactagccaggccaacatggtgaaaccctgtctcttctaaaaatacaaaaaaaattatctgggtgtggtggcacatgtctgtaatcccagctacttgggagactgaggcaagagaattgcttgaacccgggaggtggagggtgcagtgagccaagatcacatcactgcacttcagcctgggcaacaagagtaaaactccgtctaaaaaaaaagaaaaaaaaggacattgccagmgtcttggcgatttggcccgacgcgctccgctttcgctacagcatggtggcctactggagacaggctggactcagctacatccgatactcccagatctgtgcaaaagtagtgagagatgcactgaagacagaattcaaagcaaatgccaaaaagacttctggcaacagcgtaaaaattgtgaaagtaaagaaggaataatctaccctgactaaagcttgaaatgctgcatttccaaggtgaagatgtatgggcacatgttatggcagattgaaaaggatctcatttcatgggaaaaaaaaatcctgtcttgttcataaattgacaatgtcaataaattgaaatatggttcactgttaaaaaaaaaaaaaaaaaaggttggaaagtgcaaggcaaggaaatggattctctcccagaaacctccagaaggaaccagccctgccaacaccttgattttagactcctggcctccagaactgtaagagaataaaccttgtcattttaagccatgaaggtattaaaatagttgtgatttgaggtggtttgttaaataataatggatagtaggaacagagtttggtgcctggaaataaggtactgcttaaacacctaaaacatgactaccatatttaattagccaatactaaaacatgtagtttgaggactgagtggcaggaagaagccagataggcattggggtaagctgatggtgagtatttgaataaagtgagaaaaaatagtatttgaagctggagaaaataaaatgtttattatatattggcagaaaatttggcaacactgtcatctgagataatacggaaaaccggaagcgtacttaataagctcaagtagtccagccaaggagatttctgggcaggatactaaaggtgccaccagcttcttatagctgcctgtgtaaaatctgaaatgatgaagatgaaataaaaaaatatgatgatcagctttcacgtcaaattaagaggacacatagagggctttcagctgaatttatccagcaggagattctcaaggcaagaaaagacctctagggaagatcaaatctaggatacagtcaagaaaatgtgttctcataataaaaatgaagacaaacatatgactttaaagctccttgttgagatctaagaaaggtataaggtggtcctttgtagactctttcaagtagactaaaggcctcctaaggattctacggaagcctttcaaacagcctctgtctaacagtagggcttctgaaaatcttgcaggcattgttgcactacagcttcatggggagctcaaggtagagaagagcttatcacaaagagatttgtgggtgtagccttatctaatggcatggagtttataaactgatacataagaaacccacaaagatgttaaaggaattatattagctttgttcaaaaggaacagatagtacaaaataaaataaggctccccagacttctagtcagaaagcaggctgaaactgcgcaggctactttttgtttgtttgtttgtttgtttgttttgagatggagtcttgctgtgtcacccaggctggagtgcagtggcacaatctcggctcactgcaatgtccgtctcccaggttcaagcaattctctgcctcagcctcctgagtagctgggattacaggcacccgccaccatgcccggctaatttttttatttttagtagagatggggtttcaccatcttggccaggctggccttgaaatcctgacctcatgatccacctgcctcggcctcccaaagttctgggattacaggtggaagccaccgtgcccagccacacacaggctactttttatggagaagaaaggataactcagaaaatgggaataaagacctacaaagcagaggaaaaatttccggagagtactttgcaacaagcaggactgggccctaaccaatacatgggcaacatatgctcagataggtttcagaattaacataaaccaatgattgttacttgtttccattttccacactttagaacaagggtatttatacacattatcctatacctatatcactttgtgttgggcttatttgggggaagagtggcagaaaaccttatttcatacgttttcagatcaagaggaccatattcaagcaacttaactgaaggagcctaatctgcacctggacctgatttatatcatgagaccctgtaccttgagcataagcccggtgctttaatgagatgaaactttgggaggaaagagcttggatgtggaagaacgtaaataatttgtgcacatgcggcaaactggaagtttgaaacacggctgcaaatttttttatattcctcccatggagtggtggctttatgtctccccctctcaaacctgggagggcctgtcacttcttcaaccaaccgaaagtggtggtggaagtgacaccatgtgatttctgaagctaggtcagaatagtacatatagcttccatcctgcctacagggaacactgactctcggagcgctgaaccactaatgttagaagccacaaccctatggaagcccaagccaaatgaggaggaactctggttaacaacccaaagtaagctcaaatttcaactttgttttagcccagataccagtaaagaaccctctaggtgatttcagccccagccattcaattcttcctaactgaggctccagacgctgtagcatggagacaagtcattcttacataccctatctgaattcttgtcgcacagaatccatgaacataatgagatggttgttgtgtgacattaagtttgaagttgtttgttgtttgacagtaataacaggaatactgctatattagtttcctgtggctgctgtaacaaattatcacaaacttggtggtttaacacaacagaagtttattctcttacagttctggaggccagaagtccaaaattgttatcactgggccaaaatcaaggtgttagccgggccacacccccctggagactgttagggaataccccttccttgcttcttccagcttctagtggttgctgacattgacttgtgtcgaagccaatatctacaaatttctctctgttccttcttcacattgctttctcatgtagtgtgtgtgtgcatgtctgtctctgtgtgtgtgtgtgtgtgtgtgtgtgtgtgtgcataagatgagacaggctgcagggaatctcttctgtttctctctctctctctctctctctctctctctctctctctctctctccctatatatatatatatatatatatatatatatatatatatatatatagtttgtttgtttgttttttgagacggagtttcactcttgttgcccaactaggagtgcaatggcatgatctcggctcactgaaacctccacctcctgggttccagggattctcctatctcagcctcccaagtagctgggactatagatgcagccatcatgcccagctaatttttgtatttttagtagaaatggggtttcaccatgttggccaggctggtctggaactcctgacctcagacgatccacccacctcagcctcccaaagtgctgggattacaggcatgagcggccttctgtttctctcttattatgacatttgcaatggcatttagggcccacatgaacagtccaggataacctctccatctccatatccttttttttttttcctagacagagtcttgctctgtcacccaggctggagtgcaatggcataatctcggctcactacaacatctgcgtccaaggctcaaatgatcctttcactgcagcctcccaagtagctgggactacatgcgcccaccaccatccctggcaattttttgtattttttatggagacagggtttcaccgtgttgcccaggctggtctcaaactcttgagttcaagcgatccaccctcctcggcctcccaaagtgctgagataacaggtgtgagccaccacacctggcctcaaaatccttgatcatacctgcaaagactctttggagttggattttgattttttgtttgtttgcttgcttgtttattttgtttctcatacaaagtaatgttcataagttctaggaattaggacatggatatcttttggggtgccctttttcagcctgctatcactgcatagttgcaaaatactacactgtatatattcttttgtatcttgcctttttaaatgtatgagccaaaataagcattcccatgccattacatactctgaaaacagaaactttaatggttatgtaatattctattgagtgaatgtaacataagttagttatccaaaaccttaatttttttttcttcttttaacttttattttaggttcaagggatacatgttcaggtttgctacatgggtaaattacatgttgctggggtttggtgtataaatgatttcatcacccaggcagcagtgagcatagtacccaatggataggttctgttttgttttggagacaggatctcgctctgtcgcccaggctaaagtgatgatcttggctcaccgcaacctccgttcaagtgattctcatacctcagcctcctgggtagctgggattacaagtatgcaccaccatacctgactaatttttgtatttttagtagagatggggtttcaccatgttggccaggctggtctcaaactcctgacctcaagtgatccacccacctcggcctcccaaagtgctgggattataggcatgagccaccaagcctagccccagtgggtagtttttgatcctcgcccttctcccacactccaccctcaagtaagccctgatgtgtattgttccactctttgcagccatgtgtactcaatgtttagcttcacttataagtgaaaacatgcagtatttagttttcttttcctggtctctggctgtatctgtgttgttgcaaagtacatgatttcattcttttttatggctgtgtagtattccatggtgtatatgtaccatatttcttttatccggtctaccattgatggacatctaggttgattccatgtctttgccattgtgaatagtgctgcagtaaacataggtgtgtatttgtgttttggggggaatgatatattcctctgggtatatacccagtaatgggattgctgattcaggtggtagttctaagttatttgaaaatctccaaactgctttccataatgactgaactaaacattcccaccagcagtgtataaacattctctttactccacaacctcgctacctcttattttttgactttttaataatagccattctgattagtgtgagatgatacctcactgtgatccaaaaccttaatgttggatacttatttccaactccctatttttttagtatttcctgagactagattctacatatggaacttagtgagtgtgagcagtttatgacttgtgactatattgccagattgccatttagaaatacatattaatgtattattttattattcctgtggggtgcctgtttcatcatatcctcaccagcactgagtactggattttttagttttggttattatttgcccttttttttgagacggagtctcgcactgttgcccaggttggaatgcaatggcgtgatctcagctcaccacaacctccacctcccaggttcatgtgattctcctgcctcagcctcccgagtagctgggattacaggcgtacaccaccacatccggctacttttttgtgtttcactatgttggccagactggtctcgaactcctgaccttgtgatccacctgccttggcctcccaaagtgctgggattacaggcataagccaccgcacccggccttgccaatatttctttagaagtctatgttttcggccgggcgtggtggctcacacctgtaatcccagcactttgggaggctgagatgggtggatcacgaggtcaggagatcgagaccatcctggctaacacagtgaaaccccgcccctactaaaaatacaaaaaattaggcgggcatggtgggcagacgcctgtagtcccagctactcggaaggctgaggcaggagaatggcatgaacccgggaggcagagcttgcagtgagctgagatcgtgccactgaactccagcctgggcgacagagcgagactccgtctcaaaaaaaaaaaagtctatgttttcttctcattttgtattggattctttataggttagcaattttctggcatttttgtagcaaatacttttcatcgttctgttatttgtttttaaatttcagataggatgtccttaattgctatctactgttttctttgtcacttctcactcttcctttatacttataaagtctgcactttttttttttttttttggatggagttttgctgtgtcacccaggctagagtacagtggtgtgat

SEQ ID NO: 95497 - DNA, 54022 bp, Homo sapiens
  misc_feature (1)...(54022): n = A,T,C or G
tcaatttgtgaggactccccctctccaaggctggggcactcagggacacttcagttcttgcctttgggaatttaggctttcaataataaaagcctcaattccagctgctcgggagcgtcatttgaacccaggagtttgagtccagcctgggtaacatagtgagaccctgtctcttaaaaaataaataaataaaaataataaaagcctcttaagggagtctcaggtcctcaaacacgtccctgtgcgccttctttctcttaagacatgcaggaaaatatgactcagataatgtctaagtcaggttattttgccactttgtttatgagcatttccccatcatcaatgattcttttaaaagcaaaccttttttttttcgtttgagacagtctygctctgtcacccaggctggagtgcaatggtgtggtcttggctcactgcaacctccacctcccgggtttaagtgattctcatgcctcagcctcccgagtagctgggatccgaggtgctcctcaccacatctggttaatttttgtatttttagtagagatgtggtttcgccatgttggccaggctggccttgaactcctgatctcaggtgatccacctgccttggcctcccgaagtgctgggattgtaggcgtgagccattgtgccagacaaagcaaacgttttttttttaattttaatttattatttatttatttagagacagggtctcgctctgtggcccaagctagagtgcagtggcgcaatctcggctcactgcaacctccacctcccaggttaaagcgattctcctacctcagcctcctgagtaactgagattacaggtgcctgctaccacacctggctaatttttgttatttttagtagagatgggttttgccatgttggccaggctggtctcaaactcctgacctcaggtaatccactagcctcggccgcccaaaatgctgagattacaggcatgagccaccatgcccagccttgtttgattaattgattgattgcttgattgattttgagatggagtctcgctctgtcgcgcaggctggagtgcaatggcgtgatcttggctcgctgcaacctccacctctgggttcaagccattctcctgcctcagcctcccgagtagctgggattacaggcgcccaccaccacgcccagctacttttttgtatttttagtagagacagggtttcactatgttggccaggctggtctcgaactcctgaccgtgtgatctgcccaccctggcctctcaaggtgctgggattagaggcgtgagccaccgtgcccagctccagccttttttttttttttttttttttttaaagtgatagagttttatgatgctgtccaggctggagtgcagtggctgttcacatttgtgagccttgaactcctgggctcaagggatcctcctgccttagccttctgagtagctgggaccacaggtgtgggccaccacacccagctcctaaaaagcaaactttctgatggttgccaaatattccatcattcggaggcatcatcatttgtatagctattctgttatttgggggcatttcggttgtttctaattttttagtggctaaattgagtaggtgctcctgaggcccaacgtgctatctttgggcattgagcaatgagctgtttctgtcccttcacttccctcctcaggtacacagacccctgcaatgcttctgtgggaggggggactgcaggggaaacgtgggtcacaagcattgcagagggctttgagcatcaacctcttctgaggaggacatgggagaaagcaagccagaccatggcaggcctacgtgtcagacgggatgcgtgacaccctaggcaggctcagcatgcctgctttagtctgtctgggctgctacaaaatagactgggtggcttaaaaaacagacacttacttctcacagtcctagaggctggaagtcccagctcagggagccacatggtcgggttctggtgagggctctcttctaggctgcagacggccaccttctccctatgttcttacatggcagagagaggagaagccctgatgtctcttcctcctttaggggcactaatcccatcatggggtccccaccctcatctaactccagctcacctccaaacattccacctcctagtcccatcacactgggggttagaacttcaacatattaattttgggaggacacaaactttcagtccataacaatgaccattggccaccctgggcatccccacattgttgcaaagcccatgcttgtgctgaggagtgggatcccggaagtgttaccggtggagggtgtccacgttcttggcatcttgaacaaagaattagacaaaacgcacaaacaaagcaaggaaagaatgaggcaacaaaagcagagatttattgaaaatgaaagtacaccccacagggtgggagtatgccgagcataggggctcaagagccccgttacagaattttctggggtttcagtaccctctagaggtttccattggttacctggtgcacgccctatgtaaatgaagggaatgaagtcaagttacaaagtcattcactcagtgtatgccctatgtaaataggattatttcctgtatgccctatgtaaatggagaggatatttcttgtcatagctgaagtatttccattttatttcgttctaagaagtcagcgtgaattggccttacgtaccctgcctccagaccctattctcctgcctcagaagtgtttcgtgctccccttttcagcaagcatttatttttaatttttttgagtcagagtctttctctgttgcccatgctggagtggagtggctcaatcgtagctcactgcagccttggacttccgggctcaagggatcctcctgcctcatcctcccaagtagctggggctataggctgattaactttttattgttgttattgagacagagactcactctgttgcccaggctagagtgcagtggcacgatctcggctcactgcaacctctgcctcctggattcaagtgattcttctgcctcagcctccggagtagaagggactacaggcatgtgccaccacatctggctaattttttttttttgagatggagtctcgctctgttgccaggctggagtgcagtggcttgatcttggctcactgaaatctccacctcctgggttcaagtgattctcctgccccagcctcccgagtagctgggaccacaggcgcgccaccacccccggctaatttttgtatttttagtagagatggggtttaagcatgttgaccaggatggtctcaatctcctgacctcgtgatctgcccacctcggccacccaaagtgctgggattgcaggcgtgagccaccgtgcccaacctgttttttttttttttttttttttttgagaggaggtctcactctgttgcccaggctggcacaatctcggctcactacaacctccgcctcccaggttcaagcgattctcctgccttagcctcccaagtaactgggattacagttgcctgccaccacacctggctaattgtgtgtgtgtgtgtgtgtgtgtgtgtgtgtgtgtgtatgagagagagatggagtcttgctgtgttgcccaggatggagtgcagtggcctgatctcagctcactgcaacctccgcctcccgagctcaagcggttctcctgcctcagcctcttgagtaggtgggattacaggtgtgtgccaccgcgccaccacatctggctgattttttttttttttttttgagacagagtcgcgccctcgcccggtcgtccaggctggagttcagtggcacaatgtcagctcactgcaagctccgcctcccgggttcacgccattctcctgcctcagcctcccgagtagctgggactacaggcgcccgccactgcgcccggctaattttttgtatttttagtagagatggggtttcaccgtgttagccaggatggtctcgatctcctgaccttgtgatccgcccgcctcagcctctcaaagtgctgggattacaggcgtgagccaccgcgcccggccacatctggctaattttttgtattattagtagagacagggtttcaccatgttggccaggctggtatcgaattcctgacctcgtgatccacccaccatagcctcccaaagtgctgggattacaggcatgagccaccgtgcccagcctaatttttgcatttttagtagagacagtgttttgccaccttggccaggcttgtctcaaactcctgacctcaggtgatccacccacctcagcctcccaaagtgctgggattaaaggagtgagccaccacgctcagccaacacctggctaatttttgtatttttagtacagattgggtttcgccatgttgcccaggctggtcttgaactcctgacctcaaactatcatccgcctcggcctcccaaagtgctgggattacaggcatgagctactgcacctatcccattcccccttttttttaagaaggtaacaaggtttttgtcagggtctgtgagctggacatgtgtgcagtggttaaataatttggcctaggctgtgcacccactgtcctttttttttttttttttttttctagagagctattggaataggggccaggctgctgcaggctcagggcagctcaacttccaaatcctgtagcttcagacttgtggtccttcacgacatgctgagtcacaatctactgctccctcaagcccaatgtcaccacaagcagagtctctaaaggacattctcagaagatggtactgtcaatgtgagaggcacctctcctcccctcgagttctggtgcagctgataactagagatctcaaatgcttccctgggctttactttctacttcaacaagtactgattgcgggcctctggagcccacacactgccctatacactgggtaacacggagcactcaggaatacacgatcttggcggggcgtgatggctgaggcctgtaatgtcggcattttgaatgactgaggtaggaggatggcttgagcccgggaggtagaggctgcagtgagccgtgatcgcgccactgcactccagcctgggcggcagagggagaccctatttcaaaaaataaataaataataataaaattaaaaaaaaaaaaaaggaactcacgatgtggccgtaaaatgggttacatcctagttaggaaaatagatgtttgcaaaggtacataaatatgcaagcatcaaaacaataacaacaacaacaaaaatttaaaaaatgcaagcatctacgtgtggcacagtcccgcgggccgggcggcttactgtggttgaggtcaccagaaagactgtggaacagacgcatcgcgagtgggtctcggaggggtggcgcatatggaaagaggagaaggagggcttttttgattgaaagcgaataccggcaagagggcctttggcacgttcagggaaccttgccttacacgcagacacagggttggggatctgttcggaaacgcctgaaagatcaggctcaggagaagaccactttttggccgcttcagtactgcggtcaaccagctggaaagaacccccgccctctacttttcaaattaatctccggccggcgcacgcgcctcgtggggcgggcgctgtgctaccatagacatgcagagctagatcgtatacctcctcggaggcggacatgttgggtcctggccaaaaagttggaaacacctggggccactaccgaggtaggctgctcctcccaagaaagtgagaccgaaagagctcccgtggaagcggtcaaagcaggggcggggcgaacctgtgacatgcccctcggaagaacaggcttttagagagtcgccaggctccctgccctcatccgagatggcggcctgagggcgctctagccgacgctcttcggatgcccggagggggcggtggccttgcctctggctctgaggcggcggcgccgggcgctgcgaaggctcggccgctgtagtcagtggtgtggggtgcgcaagggcacggacctmggagctctccccgcttgcgccgagtttctcagcgccttccccacccaaaccggggtctcgcagtcggaagcactcmgagtgcagccccgcgcggggccggtcgtaaccgcgccgcgggccggacgatgcccaagaagctgctgctgttgcccccgccctccgcgtcctcggctttccgcgtcccgcgcgcccgccccgttcccccgccggccatgaacgccgctcgcaccggctaccgagtcttctcggccaactccacggccgcctgcacggagctggccaagcgcatcacagagtaagggggcggtgggagggccgggccgggggcggcggcgcctagctctccttcgcgcccggagggacccgctcccctccacccgccccacctcctgcacctggggcgggaggcgcgggccttcccagccggacaaagcttggaggtgacggataccgccccccgctccccggttttgcagctgggaggcttggggcggactctcggtgacctcagccccccgccccgtgactgggtccgcggcctgcctgcctttcgtctccgcagtcccacaccccggggcgggccgagctttctggagccccggagtgcgtgtcttggggaaaggggctcagggcttggcttcctttcccacggctggagttgacctgggaatctgaccgccgccactctcaagtctcactgcagtgagacccgcgggcgtggttgtgagttgggggatccgacgcggcaggtgcggtcgcagagcaaaggtgtggggactggcagtgcgaagaaggcaattccagggaggcagatgggccggagctggtggtagaaatgacaggcctgaccctgctttgtaaatcagcttgggataagatcagtcatttgtgtctttaacccaaccaagcccctggtcttaagtcgcctttggggtctgacagctctgagatgccctcccagccttgccacttactagctctgtgtcagtgggcaagagacttgatttccctgaacctcatctgtgaaatgggcatggttgagaatattgtatgatcgggataatgtagaagtagtatctggttctagcagagtaggggctcatagtggccctctgaatagttgtttactaagtggcctcttttctttttctttttcttttcyttttttttttttttttttttttgagacggagtctcgctctgtcacccaggctggagtgcagtggcgagatctcggctcactgcaagctccgcctcccgggttcacgccattgtcctgccccagcctcccaagtagctgggactacaggcacccgccaccacacccggctcattttttgtatttttagtagagactgggtttcaccgtgttagccaggatggtttcgatcttctgacctcgtgatccgcccgcctcggcctcccaaagtgctgggattacaggcttcagccaccgcgcccggtgaaatggcctcttttctagttggctcttttggagaatcccagagctctgatataaaggaggagccttatatgccctttctacatacacttgttagaaatctaagacataaaatgaatagctcgtcttttaatatttaaagccattttcacattttaaacagttttcatagagttacttcgttacttttttagggttgacaaatgattgcagggatatatcttaaacttctggggggaaatgtagaagaaagggaaaactttagtcatttttttttcagctctgcttgtttttttttttaatagttggagttttggagagtggaagaatgttaaaaaaacaaatcaatccttttgcagtctactacctagtttctatttctaacccctgattgtttgtctttctttctgaggccaacgaaaacactgactttaaacgaagcttctgtgtgtatctagtggttcagatttaccctacctgaccttgagggagagcagaggggagcagggcacattttaaaagtcagtgagggttttttttgtttgtttgttttagattctttcctggcaaattcccgaaagattttgaattactataaatgatacatattcataaatacttcccttacctgttttacttgtcgctcagtaagattttgttttatcttatctgttttatttattttgagacagtcttgtgtcacccaggctggagtgcagtggtgccatctcggcttactgcaacctccacgtcccaagttcaagcgattctcctgcctcagcctcgaaagtagctgggatcacagatgcccgacaccacacctggctagttttttgttttttgttttttgttttgagacggagtctcgctgtcgcccaggctggagtgcagtggcgcgatctcggctcactgcaggctacgcccccagggttcacgccattctcctgcctcagccttccgagtagctgggactacaggcccccgccacctcgcacagctaattttttgtatttttagtagagacgggtttcactgtgttagccaggttggtctcaatctcctgacctcgtgatccactcgcctcggcctcccaaagtgctgggattacaggcgtgagccaccgcgcccggccacacctggctagtttttgtatttttagtagagatgggtttcaccacgttggccaggctggtctcaaactcctgacctcagacgatctgggattataggcgtgagctactgcgcccggcccacctggagtatttttaaaaattgttatatacataacataaagtttacctttttaaccgttttttgtttgtttgtttgtttttgagacgaagttttgctcttgttgcccaggctggagtgcaatagagccatcttggctcacccacaacctccgcctcccgagttcaagtgattctcctgcctcagcctcccaagtagctgggattacaggctgcaccaccacaccccgctaattttgtgtttttagtagagacggggtttctccatgttggtcaggctggtctcaaactcccaacttcaggtgatccacctaccttggcctcccgaagtgccgcctttacaggcatgagccactgtgcctggcctacctttttaaccatttttaagtgtacacttcagtggctttaactacattcacagtgttgcacaaccatcaccactattcatttccagaacttttcatcatcccaaacagaaactctgtacccattaaatactaagtccccattccctggtagcctccattctactttgtctctatgaattgcctattcttgggacttcatacaaatagaatcatagcgtttgtctgtgtctggcttattttcctcagcataccttgtccaaggctccctcatgtcatagcacgtaccagaatttattctttttttttttttgagacggaatctcactctgtcgcacaggctggagtgcagtggcacgatctctgctcactgtaagctccgccccctgggttcacgccattcccctgcctcagcctcccgagtagctgggactacaggcgccctccaccacgcccggctaattttttgtatttttagtagagatggggtttcaccgtgttagccagggtggtctcgatctcctgacctcgtgatccgcccgcctcggcctcccaaagtgctgggattacaggcatgagccactgcgcctggctgcagaatttattctttttttaaggccaaataatattccattgtatgtgtatacctggctggagttttgttgttttttttttttgagataaagtcacccaggctggagtgcagtggcacaatcttggctcactgcagcccccgcctcccaggttcaagtgattctcgtgcctcagctcccaagtaactgggattacaggtgcccaccaccacacccagctaatttttgtgtttttagtagagatggggtttttccatgttgcccaggcgggtctcgaactcctggcctcaagtgttctgcccaccttggcctcccaaaatgctgagattacaagcatgaaccactgcgcctggcctggctggagatgttaattttattttttttattattattttttgagatggagtttcgctcctgttgccgaggctggagtgcgatggtgtgatctcggctcacggcaacctctgcctcctggattctggcaattctcctgtctcagcctcctgagtagctgggattatagacgctcgccaccacacccagctaatttttgtatttttagtagagatggggttttattatattagttaggctggtctcgaactcctgacctcaggtgatccgcccacctcagcttcccaaagtgctgggattgcagacgtgagccaccgcacccggcctggaatatttttaaatagattatcttacatcatatcatttcacttgtaaaaagagtaatgcttactaatcaggacttaaaacctcacactactattaattccttaatattatgtagtatctagtctttgtccatatttctctgattattttttaaaatggctttttttttttttgagacggagttttgctcttgttacccaggcgggagtgcaatggcgcgatctcggctcaccacaacctccgcctcccgggttcaagcaattctcctgcctcagcctccctagtagctgagattacaggcatgctccaccatgcccagctgattttgtattttagacggggtttctccatgttggtcaggctggtctcaaactcccgacctcaggtgatccgcccgccttggcctcccaaagtgctgggattacaggcatcagccaccacgcctggccaaaaatggctttttacacttggtttattctaattaggatccaaacaagatccacaccacatttggtcagagtgctgaagcctctttccttctctatgcttttgataattgaggcatttatctctggtgtgtgttattgaaatcattgcttgtaaccaagtatttggaagtgattttccaagaaaattactattcaaagaacaacgcgcaccagacattaaccatgggttgtgagctctgtctggtaaagcagtatgttacaacgtggtgagctgcttatggagtgacagcagaattttagtttaatgaattagattttctgaattattttttggaaagaatggcagcttaattatttgagtctttttattagacatatgcatatgaactggaatttttttaaaaagagtaatcttaatttcccttttttgttctttttgatctataggcgccttggtgctgaattggggaagtctgttgtatatcaagagaccaatggaggtaagttaaaattatttcttttttttaaaattattttttatttatttagtttttttgagacagagcctcactctgtcgcccaggctggagtgcagtggcatgatcttggctcactgcaacctctgcctcccaggttcaagcaattctcctgcctcagcctgctgagtagctgggattacagaygcccgccaccacacccggctaatttttgtatttttagtagagatggggtttcaccctgttggccaggctggtctcaaactcctgacctcaggggaccctattgcctcggcctcccaaagtgctaggattacaggcatgaccactgtgcccagcctttatttatttatttatttatttatttatttttattaagatggggtctcactatgttggccaggctggtcttgaacttctgagctcaagcagtcttcccaccgcagcttcccaaagtgctgggattacaggcgtgagccaccgcactcggcttccaccacgttatttctaaaatgcaaatattttttcttactactgcttccttactcctaccctgtaggctggggtccagtctttttagcaatcacatggggccctttgggaatccagattctacccctttacctgcctcatctttgatccacccattaccacatcttgtgtgctctgactttggaatacatcttatatctgaccctttctcacaacctctgctgctcccacttaagtccagcctgccgtttgctgcttgctagacaccttccaaaacagacgccatggcctccccgtggccactcctgccctgccacggttttcttcacacagtagccagcagtctttttaaaacaagtagatgaaacccttcccaaccttaaatcttccagtggctttcctgtcactgctagaataaattccagactcttcagcgagtaagaaatgaaatccagagtcctgcaagtcctggccccttggctccctgacctcctgtctctctctttcccctcactctgtctgctttcytttttttttttttttttttttttttttgacggagtcttgctctgtcacccaggctggagtgcagtggcatgatcttggctcactgcaacctccacctcccaggttcaagcaatcctcttgcctcagcctcccaagtagctgggattacaggcatacgccaccaaacccggctaattttgtatttttagcagagacgggggttttgccatgttggtcaggctggtcttgaactcctgacctcaggtgatccacccgtcttggcctcccaaagtgttgggattacaggcatgagccaccgcgcccggcccactctgtctgctttctaagtggactaactgcctgcccctctgcttggcacactcggatcccacatcttcccatgttcccaaacccccttctgcgctgctcgttctggattgcagtgaggcccttttttccagccccattgttctttctccttcgtcatggctagcgtctctggcatattgggcccggagggtttgctggccttgttgttgtatcatctctcctgggtcagtctttgtcccttcttccaagtcctgcattttggggttcccagtacagttcctgacatggaggaggcttcagcatttgttgaaaaaataataaggatgtcgcccgggctggagtgcagtggtgcratctcagcttactgcagcctctgcctcccaggttcgagcaattctcctgcctcagcctcccaaagtgctgggattacaggcggagccaccgcgcccggccaaactccctttttcagtgcacaaccaaaaatcagaaagccactgtaaaacccagtgaacatttagcatgttgtttaacaacttttcacaagctgaccctgactttccggaagtgaaatgaatatggcagagtttatctgaagatccacagtctagaaacggaactactgctcttttgaggggcgccatctcagtggcatcactggaaggtccagattgcctgccacactggtaatcaattatgggggggtcaggtgccaacagatgtctggctttaagggatttaagtccatgctgaaaggtggaaagggagaagaggacatagaaacaaatttgtcttttcagagcacaaggcttttgtgtgctgaggtggccatgtgtgtcaaagtcagggagcccctcttcctgggagccgagaggaagtctctcaaaactagaagggaaaggtgctttccccacatcaatccagcttcggagacattctattcatgacatatgctcctttccccagaacaacaatgaagcgttctgtgtgctaacaacatagcttagaaaacaaaaattctgcgtttttataaaacttgataaaaaatagtatttcaaactgtacagtcaccagaagtacacagttatccaaaatgcacacgcttccctcagcatctccagcaggtgcctggtgtgttcaggcatctccacttcccatagagtcattcccctcctcgccagtgtcagctttttcctttttcccttgggtaccttctctcccttctttgcagtggcctttttaggcctgggctctggctttggagggaggagcaggtttagcagacagcctcacagatcttctctgtggttcgtctttcaccttggcctcatctcccttagcatccccttcagcctttctcttgggcatggtggcaacgaaagcagccggacgtaggcactgggagcgggatgcagtggcggtgcacggactgcgctcagtcgggggtcattctcgcttcctcttcttcatactgctccaagacttattcttttgccccagataaaatgttggtttagattaatctttactccctccaaatgtttctagctgttgcatcatgagtgctttgcttttctgctttttttttttttttttctccagacaaggtctctgttgtccaggctgaagtgcagtggcacagtttcagctcacactgcagccatgaccttccctggctcaggtgatcctcccactgggactacaggcacttgtcaccatgtccagctaattatttttttgagatagaatctcgctgtgtcacccagactggagtgcagtggcgcgatcacggctcactgcaagctctgcctcccaggttcaagtgattcttctgcctcagcctcctgagtagctgggattatagttgtgcgccaccatgcctggctaatttttgtatttttagtagagacagggtttcaccatattggccgggctggtctcgaagaactcttttttttttttttttttaatgagacggaatcttgctctgtcacccaggctggagtgcagtggcgcgatctcggctcactgcaagctctgcctcccaggttcacgccattctcctgcctcagcctcccgagtagctgggactacaggcrcccgccaccacgcccggctaattttttgtgtttttagtagagacggggtttcactgtgttagccaggatggtctcgatctcctgacctcgtgatctgcccacctcggcctcccaaagtgctgggattacaggcgtgagccaccgcgcccagctaattcttgtattttttgtagagacaggattttgtcatgttgcctaggctgttcttgaactctggtgctcaagtgatctgctttcctcagccctcctaaagtgctaggattacaggcatgtgccaccgcgcccggcatgaagtacttttgtttttcttttttctcctttttaacataggagcttttcttaaaacttcagaacatttttatttttcagaaacaagagttgaaataaaagaatctgttcgtggccaagatattttcattatacagacaatacccaggtaagaggactgactactttatctcttttctgtaaaaaccttaacaatataattgattatcttttcatatgaacaacaacttagtgtttttaaaagttatatattcaggccgggcgtgtggctcacgcctgttatgccaacactttgggaggccgaggtgggcggatcacgaggtcaggagttcgagaccagcctgaccaatatgttgaaaccctgtctctgttaaaaatacagaaattgctggctgggcacgatggctcacgcctgtaatcccagcactttgggaggccgaggcgggcggatcacgaggtcaggagatcgagaccatcctggctaacatggtgaaaccccgtctccactaaaaaatacaaaaaaattagccgggcgtggtggcgggcacctatagtcccagctacttaggaggctgagataggagaaaggcgtgaacccaggaggcagagcttgcagtgagccgagatcgcgccactgcactccagcctgggctacagagcaagactccatctcaaaaaaaaacaaaataaatgaataaaaaacaaaagttagctgggcatggtggcatgcgcctgtagtccagctgtttgagaggctaaggcaggagaagtgcttgaacccaggaggcagaggtgagctgagatcgcgccactgcactctagcctgggcgacagagtgagactgtctcaccaaagaaaaaaaaaagttatacattcgtttgcatgttaaactaaatgcttccccaaatacaattactgtcttctggaattcctaccatttgtcacactgtactgttacctgtttacttctctccaggctttttttggggacagtctcactctgtcaccccggctggagtgcagtggcacagtcttggctcactgcagcctctacctcctgggttcaagtgattctcctgcctcagcctccctagtaggtgggattacaggtgcccaccaccatgcccagttaatttttgtatttttagtagagacagggtttcactatgttggccaggctggtcttgaactcctgacctcaagtgatccatgcacctcagcctcccaaagttttgggatttcaggcgtgagccaccactccccaagctttaaactcctcaaggacaaagggttttcccatggtttgcactgaccccaggccagtgtccgtcagctcagctctgctgaaaagcttctagttgttacgtgtggtgcataaactgctcctggttcatacccatcaagagaggtttttgcactgcattttatcttgcaccgtggcctgtttctagcctatctctgtttcagagatcgtcgcccttgcttccctcagggcagggggctgacacctggggaatcctggcctgcttgagtgagaacgttcatgcttctatgggactatctcctttctcatcgcctgacagggagtgggccattacaccatctgtgtctctgaaaaatccagaccttcatgtcctgatcagtgtacattccccagaccatattagtaataagaatggcactgagtgctaccagtgtgctggatgctttatatgtttygtttttgtttgttttggttttttgagacggagtctcactctgttgcccaggctggagtgcagtggtgtgatcttggctcactgcagcctccacctcccgggttcaagtgattctacctcagcctcccgagtatctgggattacaggtgcctgccaccatgcccgggtaatttttttgtatttttagtagtgatggggttttaccatgttggccaggctggtcttgaactcctggcctcaagtgatccgcctgcctcagcctcctaaagtgctggctgggattataggcgtgagccactgcgcccrgccctattcagtcttctttagtttggagcagttcctcatggcctttatttgactttctttttttttttttttaatttgagacagggtcttgctgtgtcactcatgcaggaatgcagtgacacgatcatggctcactgcagccttaagctcctgaactcaaagcgatcctcccacctcagcctccttagtagctgggaccataggtgtgtgccaccatcctgggctaattttttgtatttttagtagagatgaggttttgccatgttgcccaggctggtcttgaactcctggactaagaagtgatccacccgcctcagcctcccaaagtgctgggattacagacatgaaccaccacacccggccttgactttgaaaactttgacacatttgaagactgacattttrccgattactttgtcgaatgtccctcaatttgggtttcaccgtgatggctctttcactatgatgagattcaggtacctcggaaggaagctgtgttcctgttgtcttgtcttcctgctgcttcatgacatcttgtgtggatgcatcggtttattcagtctcttgtgtgtcagtttgtttctagtcttatgctgatacaatagaggctgctgtgagcctcatcgtatatacatcatattgtcggtgtttcaggtgtatctgtaggaagatcctaagaaatttctggttgtgagggtccatgccctgtggtattgagggaaggggctgcgttgccctcattgaggatatactaattcacattttctccarcagttttggttttgtattgtttgcctcctggtgactggagtcttttttgcctggtggttttgtttgactctccatcttttatttttagacggagtctcactctgtcgcccaggctggggtgcagtggcgcaatcttggctcactgcaagctccgcctcccgagttcacgccattctcctgcctcagcctcccgagtagctgggactacaggcatgtgccactacgcccggctaattttgtatttttagtagtgacggggtttctccatgttggtcaggctggtctcgaactcccaacctcaagtgatctgcccgcctcggcctcccaaagtgctggcattacaggcgcgagccaccgtgcgaggccgttcatggttatttcaaactagtcgagcatagaaacagcatattgttagtgtcctttgtgatacgaagttgaattttataaaattcttggctttgatatcacatggtaaccaagagtgctcaatataagtatttaacacgtgcartctagagtgatgctgggggtagtaaagactgaacttgacaaacaaaggatcatcagtgtgcaagtgtcttccagggaagggacaaaagaagcatgaagaaatgacttagttaatagccaattgggaaacacttaccgtttttctcacttgtatcttgagtattaggaaattggaccatggtcaggtgtggtggctcatgcctttaatcctagtactttgggagaccaaggtgagaggatcacttgaggccaggagttcaagaccagcctgggcaatatactaagaccctgtctctattctttttttttttttttttttgagacaaggccttgctctgtcacacaggctggagtgcagtggcacgatctcggctcactgcagcctccacctcccaggctcaagtgattctcctgtctcagcacccaccgtcttaccctcccaagtagctggggctacaggcacatgccaccatgcatggctaattttgtatttttagtagagacagggttttgccatgttgcccaggctggtcttgaactcctgagctcagctgatctgcttgccccggcctcccgaggtgcttggattacatgcatgaggcactgtgcccagcttttatttaaaagaaaaaagaaattttggccaaaggaagaagtaggaagcacttcatagagttgtagcagagtcttgtacaataacaatgacaattttacataagtcaacatggaaaggcaccttccctgttgaaaaaggcacataggtataaatgggtacttctgaaaaccagaaccctctcctgaagatggtgaagtttctttatgtgtatttggtgttgagataaaagccgcaagtctcttcccagtggttcagtttaagagcatcaaagcaaaaatatcatcacctggcattttctctgtctcttaagctgatagggatggaagaagaaaggaaaaatttggaaaaaagacaggttggatgtgttgttttgtgtgggtgtgcagcccataaagaaggttattaggtttgtcacaataaactggttctttttgttgtttttttgagacggaggcttgctgtgttgcccaggctggagtgcagtggcgtgatctcggctcactgcaacctctgcctcccaggttcaagcaattctcctgcctcagcctcctgagtagctgggattataggcgtgtgccaccacagccagctgatttttgtatttttagtagagacggggtttcacagtgttgaccagaatggtctcaaactcctgacctcaggtgatccacccgccttggcctcccaaagtgctgagattatagacgtgagccaccgtgcccagtcaataaactagtttttgtagtgcttgagtactggatactttagtaccaactaaagaacacagataatttaatttaatttaattttttttttgagacgagtttctttcttgttgcccaggctggagtgcagtggtgcgaccttggctcactgcaacctccactttccaggttcaagtgattctcctgcctgagcctcccgagtagctgggattactggcatgtaccaccatgcctggctaattttgtatttttagtagagatggggttttaccatgttggccaggctggttttgaacccctgacctcaggtgatccatccacctcggcctcccaaagtcctgggattacaggcatgagccaccatgcctggcctaattttttattttattttatattttatattttattttatttattttttgagacggagtcttgctgtgttgcccaggttggagtgcagtggcacaatctcggcttactgcaacttctgcctcctgggttcaagcaattctcctgtctcagcttcctgagtagctgggattacaggtgcacaccaccacacccagctaatttttgtatttttagtagagatggggtttctccatgttgcctaggctggtctcgaactcctgaccttaggtgattcacctgcctcagcctcccagaatgttaggattacaggcatgagccactgtgcccgacctggttttttaatattatctgcggttacatagatgaaggaatatcttttacaggtttttctgttgttgggaggaagggggcattgcctaaagtaataaggctaattttaggcaaacagaccaaagcttagacattaaaataagcttagttgccttcagagctgttgttctaaaatcacatagatacctttttttggtgctgtttttgcttggaatagctttggaactactgcttccaaacttgcagcatatttcttttgactgttctaataatagcaaccttttggtcgttgaggataggtttaatttttggaaatggcaaaaagccattcagaacaaaatgattattttgggtaattgaactgtgcgatactcagagattttccagatataccaagcaatggaactaagtaaaatatgaagcttatgaagtatattttaaaggttaatttttatgtttatgtacaagttctagtgtgttgatgtaaagtaagcagactcattaaaataacatttacagctgggcacggtggctcacacctgtaatcccagcactttgggaggccgagtcaggtggatcagttggtcaggagtttgagaccagactagccaacatggtgaaaccccgtctctactaaaaatacaaaaaattaaccaggcatggtggcaggtgcctgtaatcccagatattcggaaggctgaggtgggagaatcgattgaacccggaaggcagaggttgcagtgagccaagatggtgctactgcactctcgccttccagcctgggtgacagagtgactcagtctcaaaacaacaacaaaaaattcccagctgctgcagatgattaattgttacagttgggagcagggtaaattctcccccattacttccagctgtggtgtggtttctctttttgcgagcctggctagtttaatgaatgcgtataccatgcctgtttcctcatctcaggttagttgktkgttgttgttgttgttgttgttgttttccaatatggaacacttcacgaatttgcgtgtcatccttgcacaggggccatgctaatcttctctgtatcattccaattttagtatatgtgctgctgaagagagcacacctcaggttagtttttgcctgtccaaaatgctagagcagtaagggctggacttaatataggatgtggttttcttaggggaaagaaaagtagttggttgkctgggcatgatggctcaagctgtactcccagcactttgggaggccaaggcgggaggattgcctgagcccaggagtacaagaccagctgggcaacatggtgagacctttctctatttaaaaaaaagaaagaaaagtagttggtaaaacaattaagaatgtcctacttagagrtaaagactacaagagctagccagggtgtacttgcaacattcttagggaacagataaagcagagactgccagccgatttcccttcgccctgctagttcacaaagtaactgcctggtgtccaatttgtccggtatctctcagtgaatgggtaaagccaatgtgacaaagccccttttgtcacctttctgaccaataaggggtgaggtatggagctttctttagcgttgggctggaggatgttgaatcccttggaaaaatggaaaataaaaacctcatgggaaattgctctttttttttttttttttttttttgagatggagtttcactcttgttgcccaggctggagtgcaatggcatgatctcggctcaccacaacctccacctcccaggttcaagctattctcctgcctcagcctcctgagtaactgggattacaggcatgcaccaccatgcctggctaattttgtatttttagttgagacgggggtttctccatgttggtcaggctggtctcgaactcccgacccaggtaatccacctgcctcggcctcccaaagtgctgggattacaggtgtgagccaccgtgcctggccttttttttttttttgagaaggattctcgctctgtagcccaggctggagtgcagtggtatgatgtcggctcactacaacctctgcctcccaggttcaagcaattcttctgcctcagcctcccaagtagctgggattacaggcacctgcaaccatgcccggctaagttttgaatttttagtagagacgggctttcaccatgttggttaggctggtctctaactcctgacctcaggtgatccacctgtcttggcctctcggattactggcgtgagccaccgcgtccggcccagaaattgcttattaatgaaaggaatgttaccctgaaatcaagacttctcaaaaattgtttatcttgttcattaatgttttattatctgggcctcccttgtgctgtgttctccaaaactcatggtgtcatacacttgtgtattttacttgattttgtttttatttttttgtgtgttttttgagagatggggtctcactctgttgcccaggttggagtgcagtggtgcagtcacagctcattatatgggtttgagggatcctcccacctcagcctcccgaatagctaggactacaggtgagcaccaccgtgcctggctgatttttaaattttattttatttttagagaccaggtcttgctatgttgcccaggctggtatcaaactcctggcttcaagcaatactcctgccttggcctctcaaagtgctgggattacaagcataaactactgcacttggtccacttgtgtattgtctatgacaaagccagctaaaaacccactacttgagcctgggtgtggtggctcacacctgtaatcccaacacactttgggaggccgaggcgggtggatcacctgaggtcaggagttaagaccagcctggccaacatggtgaaaccccatctctactaaaaatacaaaaattagctgggcatggtggtgggtgcctgtaatccccgctacttgagaggctgaggcaggagaattgcttgaacccaggaggcagaggttgcagtgagctgagatcgcaccattacactccagcctgggtgacaaaaacgaatttccatctccaaaacaaaacaaaaaacaaaaaaaacctcactacttgaacagataacgcttacagaagctactaaattaactgactccaaacatattgtggatattgggttctggtttatgaagccacagccagcctgggtgtggtggctcatgcctgtaatcccagcactttgggaggctgagatgggaagattgcatgaacccaggagttcaagaccagccatggcaacatagtgagaccctgcctcttacaaaacagaaaagaaaagaaaaaaaatcttttaaacaaaagagtctctgggaaggggaccacacattcttccatgagtcagatgtgctccttcttgggaagaatgagtacctcgagagtggtcccagatggcctttggctttctctagaggtggtttgccttgtttacctaccacagtgcttgcctcaagttgccccctaaatatgtgttgcatggatgatgaactaaaattgactattatgaattcccaactttcttgaaagtgtttgataattgctttgattctaccaaagattatctgaccttttgatgccagacttggcattattaatttggaagtctgaaggagaaaaatgctccaatttattgagagaaaaaataaaaggtaactggaaaacaatggaatggattagcagtctaaaaggaatgtcttagttgtcttgaagttgagccctgcatcagtctcctcagggagacattttttgtttttgtttttgttttttttaatcatagaatgcttgcaatagttaagaaaaatccaaattayragggtgaaattggaagttccaggarttgaacctggaagtggaaaacattgtcagaataaaaggatgtctttgaaatcgctcactcccaaatgcactctgccttagagagaagtgtaaacataaattggaagagactggaaggaaatggctcgattacccttcaagctagaaagcatctcttgctgagtatttcattcagccacctattcagcaaacgctaactctgctgtgtgtatggcaggctttctgctttgctgtaatgagggcagcatcacctacgtgtcagtgtagagctgataattgttcaagaactggtacctgaagaacctgctgccatgggtaggaactgatgacgtggggaagggaagggagatacagtcctgacccccacccccaccccaagacggggatgtttgaggatgcgtggatagtccaggaagagcaggaggaagctaatgtgagaagtgaatactgagagaggtcctggaaggatttcaaggctctcacccctttttaaaggaagagcctgtctgggaatggtggcgcatgcctgtaatcccagtgctttgataggctgaggcgggagcatcacttgagcccgggagttygaggctgcagtgagctaagattgtaccactgcactctagcctgggtgacagggtgagaccatttcttaataagtgagtgagtgagtaagtgaaagaarwgaatgaatgaatgaatgaatgaatgcagagtctacattaggtttgattatccttggcaaaagctagcaatccaaatttataatcattggaaattgcctttccttctaatatcttccagattcatatttcattttttgtctctctgggtaatctttgtcaggaatttatatgtcagggaaagaaaggtccagggaggtttttttttgtttgttttgttttgttttgttttttgagacagagcctcactctgttgcccaggctggagtgcagtggcatgatctcggctcactgcaacctctgcctcccaggttcaagagattctcctgcctcagcctccccagtagctgggactacaggcacgtgccaccacacctggctaatttttgtatttttagtagagacaaggtttcaccatattggctgggctgcgtccagcctccagggaggttttcgaaaattaagttccagctgggtatagtgggtcatgcctgtaatcccagcactttgggaggccgaggtgggcggatcacctaaggtcgggagttcgagaccagcctgaccaacatggagaaaccccgtttctactaaaaatacaaaattagccacgtgtggtggtgcacgcctataatcccagttactcgggaggatgagccaggagaattgcctgaacctgggaggcggaggttgcagtgaactgagatcacaccactgcagtccagcctgggcgacagagtgagacttcatctcaaaaggtcaggagatsaagaccatcctggctaacatggtgaaaccccgtctctactaaaaatacaaaaaattagccgggcgaggtggcgggcgcctgtagtcccagctactcgggaggctgaggcaggagaatggcgtgaacctcggggggcggagcctgcagtgagctgagatcgcgccactgcactccaacctgggcgacagcgagactccgtctcaaaaaaaaaaaaaaaaaattatattccaagacctccccacactcaatggaaagagaccaaatctttctgttaatggcagctaaatggaagggcagttgggtttcccttggcattcaagctggcctaagcccaaatccctgggaggctgccagcaggtgttgggtaactctggtcaccagcagttgcttcagatgtcactgcagtaacggggtatgacacaggagacccaggcaaatgtgagggtgggttaactgtgctgtgaataggagtaacctcagatgaaagctrgggcttactcagctacaraaagtcagaaagcttcccctgccttcatgaggtgccattgtaagctagtgtgatggtaaaattcccacaacacccatctgggcagcccatgttaagttgataaagtcaasatcttttctagggttgatacatggaattaatccccaaatacaaactttgactgtttcagagatgtgaatacagctgtgatggagttgctcatcatggcttacgcactgaagactgcctgtgccaggaacattattggggtcatcccctacttcccctacagcaagcagagcaagatgaggaagaggggttccattgtgtgcaagctgctagcatccatgctggcgaaagcaggtgagtgtgcgcgggggccctggggttccagcatgatcctttagggctctttcctagttggacttagctcatacctcagatatccaatctgggatctgagtgtttgtttccttttgaacagttttggctaaggatatgtgagctcggttagaaattcttttttttcccttattcgctttgtcctactttagaataccattgctttagtgtcttctcttctctgtcatctgtcacatattttctatttcatcttgtcatcgctaaattcttagctggcagtcttggcattcttatgtgatcttttgatcttcaggtctagatttctatatctgctttgttagctaaattccatttttgttcatagtattcaagctggattttcttttactccctctcccccacccttgcctttctacatagtggctcattttcattgctttattctccttgtgtggcgggggcacgctttctggcctgtaaatcaatgtaatattttacaattgggtttctattcatctgatgtctgttctaaaactttaacgtatatttgggtcctcggaaagaaatgtatggtcctccctcaatgtccttataggattggttccaggaacccatctcccgcttccccggctcctcagcagatacaaaaacccaaagatactcaagtcttccatataaaatgccatagtatttgcatataaccaacacagtcatctgtagattatttataaatacctaataccatataaacactatataaattgttgttatgctgtcttgtttagggaataatgatgagaaaaaagtttcatacctgctcagtacagacacaaccattgtaggcctaactaccttttcagtctgtgtttcgttgaatccacacgtggaacccatagatccagatggtcaactgtatgtgaatttcatcctctccaaaaaactatagtgtttctggaaagaacaagtaatactggttctacaccctggaagttttgctgtgacctttgaccatttgcaatgtgtttatatatatgtaccttttcctcttcagtactcttgattataagagtatctcttcattgtttttctataagaatacttgaaacattctttgttacatacagaaattattctaagcttcaatatctttgtgttatatgagtttcttttcttctaatatgtatattactttgcgtttgtgttcttgctactttttgccttcgctacagttctttatcctttcttttaagattctgtaatcaaggccttactgttttttccatctcttcggtattaattccatattcatatttttgcttctgccacattattcttttctcaattttctggaccaagccaaaagtcaataattcccactttcttagctttagttctttgtccatgtggaaggttgtagccttctctacattaaggctttattaaggttaacaatcaagcctgtgactgcagtgcttaatcacagtaccccgtcttcagtctgctggtaggaagcaggagttgagcatctagtttaggtccactgtagccatttacctrtaggggtgaactttgtaattttttgttttaaaatttcaggtttaactcacattatcactatggatcttcatcaaaaggaaatacaaggctttttcagctttcctgtggacaaccttagagcctcacctttcctgcttcagtatatccaggaagaagtgaggaaccaccagcaaacaccccattgtcctcaaaagagatcttatttagtttttctctggtatcagatttcgwtaytggaaggcacatcaaatgagctctcccttaagtcacaatgcctgaggcagcagacagggtcagctttagtcgtggacgatcatagctttaaaagacactaaaaacagattttttttctacgtatctttagcaatttgcttatgttttctaaaatgaatgttttaagaattatttttwaaaaattcttgacgtaggagtgctttttccagtgatgttaattgataaatattgaaaaatctaaaacttgtgactaaaattctagcatatttgatgactagtttggatcrttataagagggaaaacttgaataccagcatccaggtgttattttctgataacttttcagtattttctatttttccttcaaatctagattccaaattacagaaatgcagtcattgtagctaagtctcctgatgctgcaaagaggtaagtaagctagacatgggtcctgatccctcctgagtgctcccgaagtcagaatgagctgctttggaatccagaggctgtcactcgtggcctttgaaagcccactggctctcatgttaacccctccatcgttgtcatgtcccatgccacacacagctttatctccagcctccagacagcacacatgatcgctgagttgctcagctttcctctgggaaaacaaagttccttcaagttctcagagaaaggaaagcartgaggctatgagcatttttcaagcaatggtttttttttttgttttttttttgaaatggagtttcattctgtcacctaggctggagtgcaatggcgcgatctcggctcactgcaacctccgcctcctgggttcaagcagctctcctgcctcagcctccccagtagctgggattacaggcgcctgtcaccactcctggctagttttttgtatttttagtagagatggggtttcaccatgttcatcagactagtcttgaactcctgacctcaagtgatctgtctgccttggtctcccaaagtgctgggtttacaggcgtaagccactgtgcccggcccaggcaatggtttttaacgttgttctttcttctgaagatgactatcagaatattggacaaaggatagaatcaaaattatctagaatcagggccaggcggggtggctcacgcctgtaattccagcactttgggaggccaaagcgggagatcgcttgagcccaggggttcaagaccagcctgggcaacatagaccccgtctctacaaaatacaaaaaatagccagttgtggcaacacatgcctgtggtccccgctactcgggaggttgaggtgggaggatcacctgagcctcaggaggttgaggctgcagtgagccatgttgacgccactgcactccagcctgggtgacagtgagaccttgtctcaaaaaaaaaaaaaaatgtctagaatcagatacaatcccaaaccctaactcacgtgccctttgagtcatttacatgctggcctgggcctcacattctcatttatataaataatgcctttgtatgtccctgaaacgttaaatattttcattttatggttaaaaaatgatgccgtagtgatgcgtgggatttcttcctgtcagtttcaccatttccctttgtccttctagggcccagtcctatgcggagagactgcgtctgggtttggccgtcattcayggggaagctcagtgcacggaactkgacatggacgatggtcgtcactccccgcctatggtcaaaaatgctactgtgcacccaggcctggagttgccatgtaagatgagctctgtgtttttattttatttgtaaattgaagaaagtttttttttgttggttttgttgkttttgttgttgttgttttgttttgttttgttttgtttttgagatggagtctcactctgtcacccaggctagagtgcagtggcgtgatcttggctgactgcaacctctgcctcctgggttcaagcaattctcctgcctcagcctcgtgagtggcaaagattacaggtgtgtgccaccacgcccagctaatttttgtatttttagtagagacagggtttcaccatgttggccaggctggtctcaaactccagacctcgtgatctgctccagacctggtgatctgctcgcctcagcctcccagagtgctgggattacaggcatgagccactgcacctggccctgaagaaagttttaagtagtatgaatggctaggagttatcgactatgtagatatatgctgtcttgttgttttttaataatggaatggtatttgctatcctccgcctttttttttttttttttgagaaaggatctccccctgttgctctgtacagtggcacagtcatggctcactgcagccttgaccggggcgcaagtgattctcccacctccgcctcctgggtagctgggactgtaggggtacactaccatgcctggatagttttctgttcctttttttttctttttgtatggagacggggctccctgcattgcccaggctggttttgaacttctttgctcaaacaatcctcctgtcatggtctcccaaaatgccgagattacataagattacagacatgagccccatgccaggcccgatttcctcttttgtaaaaggaagttgtgttatacacatttgtagactgtgtatggacggttctgcgtagcactcagcattcagacggtgtttgataattttagcttcagtaaaaaagttgtatgtgtgatggtgtgaaatcttaagcttttacattatcataagctgggtgacagctgttgatcaaataccaggctttggggatcaggtaacttttatttttacttatttatttattttgagatggagtctcactctgtcgccaggctggagtgcagtggtgcaatcttggctcactgcaacctcttcctcccgggttcaagcaattctcctgcctcagcctctccagtggctggggctataggtgcgcgccaacacgccgagctaatttttgtatttttagtagagatgagctttcaccatgttggccaggatggtctcgrtctcttgacattgtgatccgcctgcctcagcctcccaaagtgctgggattacaggtgtgagccaccgtgcccggcctatttttatttatttttattttgtttgagactgaactcgttctgtcgcccaggctggagtgcagtggcatgatcttggctcactgcagcctccgcctcttgggttcaagcagttctcctgtctcagcctcccaagtagctgtgacttcaggcacacaccaccacacccagmtaatttttgtatttttagtagagacagggttttaccatgttggtcaggctggtctcgagctgctaaccttaggtcatccgcctgcytcgacctcccagtgtgctgggattacaggtgtgagccaccgtgccaagccgtaatctgcatttttagctttttattttcaactgactttagacttaaagttgaaagaatagtacagatttccagcatatgctcttcactcggagtccccaaatttaacatttatatacatggggtttttttttttccaccatttgagggtgagttgcagacgtaatgtcccttcattcctaaataccttcgtgtatatttgtaaagacaaaagactcttatataaccagagtatcattatcagactcaggaagctaacattgctgtaacactgtaatctacagaccttactcaggtttcaccagtggtcccagcagtgtcctttaragcaaaagaataaacttgttttcttgttcaagacctaacccagggtcacacattgcatttagttgtcatttctttttagtctcatttaatctggartggytgctttattctttgtttcttatgaccttgatacttttgaacagtgcgatcaagtgattttgtagactctcccttaattggggcttgtttgtgtcctcaggattagattcaggttatgcatttttggcagaaaatcacaggaaacacatgatgtgtcccattactggtgatgtgcattctgataagttggttaaggtttctctggcaggtttctccactgtaaagttactcttttttttttcctctttgtaattaatactacctcatgttaagactatgttttaactgtaaatattctgcttctcatcaaaatgaacatctactgatgattcttgcctgaatcaattattgactgtgattgttgtcagtgttcatttttctaactctatcattccttctacatttattagttgaccttctaatgcaagaaagctttctcttcttccctattcatttcttcatttatatcagtatggattcataggcctatttcattcagtgggttataattcattgtcgtcacaggaataccttaaatattgcaggttcagttctgcaccattgcagtaggtgaatattataataaagtgagtctyatgaattttttgatgtcccagcacatgtaaaagttatgtttatactgtagtctgttaaatgctcaatatcattgtgtctaaaaaccaatgtacgtacmttaatttaaaaatactttactgctaaaaaatastagcagttggccaggcgcaatggctcaggcctgtaatcccagcactttgggagsctgaggcgggcagatcacgaggtcaggagatcgagaccgtcctgactaacactgtgaaatcgcgtctctactaaaaaaatgcaaaaaattagccgggcgtagtggcgggcgcctgtagtcccagctaccgggtggctgaggcaggagaatggcatggaggcaggagaatggaggtggagcttacagtgagctgaaatcgcgccactgcactccagcctgggtgacagagcgagactctgtctcaaaaaaaaaaaaaaaaaattagcagtcatctgagcctccatcttgttggtggagggtcttgcctcgatgttgatggctgctgactgatcagggtggtggttgttgaaagttgggatgggctgtggaaatttcttttctttcttttttttaagagatggggtctgtttcccaggttggtcttttttttttttttttttttttttttgaaactgagtctcctcgctctgtcgcccaggctggagtgcagtggcgcgatctcagctcactgcaagctccgcctcccgggttcacgccattctcctgcctcagcctcccgaatagctgggactacaggcacccgctaccacgcccggctaattttttgtatttttagtagagacggcatttcaccgagttagccaggatggtctccatctcctgacctcatgatccgcccgcctcggcttcccaaagtgctgggattacaggcgtaaaccactgtgcccggacccaggttggtcttgaattcctggcctcaggcaatttttcttttctttttttttttttgttttgagacgagtctctctctgtcgtccaggctggagtgcagtggttcacccagttcactgcaagctccaccycccgggttcacaccattctcctgccgcagcctcccaagtagytgggactacaggtgcctgccaccacacctggctaatttttttttttttgtatttttagtagagatggggtttcaccatgttagccaggatggtctcgatctcctgacctcatgatccgcccgccttggcctcccaaagtgctgggattacaggagtgagccactgcaccctgccagcctcaggcaatttttatacctcagcctcctgagtagctgggattacaggcaagagtgattgtgctcagctgtggcaatttcttaaaacaacgaagtttgcctcgttgattgactcttcctttcacaaaagatctttctgtagcatgtaatgctgttttatagcttttttttttttgagatggagttttcgctcttgttgcccaggctggagtgcagtggtgcagtcttggctcactgcaacttccacctcctggatttaagtgattctcctgcctcggcctccctaagtagctgggattataggtatgcatcaccacacctggctaattttttttgtatttagtagagacagggtttcaccatgttggtcaggctggtctggaactcctgacctcagatgatccacccgccttagcctcccaaagtgctgggattacaggcgtgagccactgcgcccggctgacagcattttttaaaatgtcagccaggtgatgtactgatgttctaacaaggttcaaggatggcacatctcacatgtaagcgtgaacacccaatgatcacacttatgaactacaaaatgatctgtttgatagcattttacctagaagaaagaactactttctttttttttttttttgagacagtctcactctgttgcccaggctggagtgcagtggcaccatctcggctccctgcaacttctgcctcctgggtccaagcaattctcctgcctcagcttcccgagtagctgggattacagatgtgtgccaccacacccgcctaatttttgtattattagtagagacagggttttaccatgtcagccacgctggtctcgaactcctgacctcaggtgatcygcccgcctcggcctccaaaagtgctgggattacaggcgtgagccactgcgcccagccgaaagaactactttcaaaattgtagtcactgttctcaaaccctgccactgtgttatcaaataatttttgtaatacttctaaatccttgttttcatttcagcagagttcacagcatcttcagcagtagattcatctcaaaaaaaaaaacaaaaaaccttctttgcttatctatcaaagcaactccttatccattacagttttatcataagattgaagcagcccagtcacagcttcaggttccagttctaattctagttcttttgctctttccaccacatctgcagttacttctaccatggaggccctgaactcctcagagtcatccatgagggttagaatcaacttcttccaaactcctgttaatgttgatattttggcctcctcccatgaatcacgcrtgttcttcatggcatctagaatggtgcatcctttccagagattttcagtttactttgggtccttcagaggaatcactatctatggcatctatagtcttataaaatgtatttyttttttttttttgatacagagtcttgctctgtcacccaggctggagtgcagtggcgcratctcggctcagtgcaacctctgctttccaggttcaggtgattctcgtgcctcattctctcgagtttctgggattgcaggtgtgcaccaccacgcccagctaatttttgtatttttaatagagacagggtttcaccatgttggccaggctgatctcaaactcctgacctcaggtgatctgcgtgcttcagcctcccaaagtgctgggattataggtgtgagccaccacgcccagccaaatgtatttctttttattttattttagaggcggggtctctgtctgctgtccaggctggagtacagtgacaggatctccctctctcacccagacctgcagtgcagtggtgcratcactgctcactgcagcctctaccacctgggctcaggtgatcctcccacctcagcctcctgagtagcttggaagctgggaccacaggtacgtgccaccacacctgactaatttttgtattttttgtggagacggagttttgccatgttgcccaggctggtcatgaactcctgggctcaagcagtcaacccatcttggcctcccgaagtgctaggattagaggtatgagccactgtgcccaagcacccagctaatttttagaaatttttagtagagacagggtcttgtcttgttgtccaggctggtatcaaattcattggctcaagtaatcctcccgcctcagcctgtattcttgacagtttgggagggtgaggtgggaggatcaccttattgttattactcttaataataagacttggaagttgaaattactccttgttcaatgggctgcagaatggatgttgtattagcgggcatgaaaacatcactaatctccttgtgtatctccatcagagctgtygaaagactgttgtttgataaatatatttttttgagatggagtcttgctctgtcgcccaggctggagtgcaatggcacgatctcggcttagtgcaatcttcacctcctgggttcaagcgattctcctgcctcagcttcccgagtagctgggattacaggcgtacaccaccacgcctggctaatttagtatttttagtagagatgaggtttcaccatgttggtygggctggtcacgaactcctgacctcaaatgatctaactgcctcagcctcccaaagtgctgggattacaggtgtgaactactgcgcccggcctgttgtttgatattgtttgaacttttatcaattatcttagttagatcttcggagtaacttattgcagcttctrcatgagcacttactgcttcaccttgcactcttaggtcacggaaacggcttctttccttaaacttcatgaaaaagccttgctctggattaggctttggcttaagggaattttattttgtgkctggtttgatctatccagatcactcaaacttctctgtatcagtaataaggctgttttattttctcatcatttgtgtgttccctggagtcacatttttaatgtccttcatgaacttttcctttgcattcacagcctggctgtttgactaaagaggtgtagcttttggcttttgacacactaagcttaattatttctagcttttgatttaaagtaagagacatggggctcttcctttcacttaaacacttagaggccattgtagggttattggcctaatttcaatatattgtgtctcagggaatagggaggtccaacaagaggaagagacgggaacagcaggtcagtggagcagtcagaatacacatttactaagtttgctgtctttttttttgtgcgtgtgtgtgtgtgtgacagagtttcactctggctctcggctcactgcaacctccgcctcccgggtccaagtaattctcctgcctcagcccctgagtagcatgcttcaccacacccagctaatttttgtatttttagtaacgacggggtttcaccatgttggtcaggctggtcttgaactcctgacctcatgatccacctgcctcggcctcccaaagtgctgggattacatgtgtgagccaccactgcatccagccagtttgctatcttatatgagcatggttcatgctgccccaaaacaattggaatagtaacatccaagatcactgattacagataccagaaaagacgtaacaataatgagaaaagtggaaatattgcaagaattaccaaaatgtgacacagaaacatgaaacgagcacatgctgttagaaaaatggcaccctggctgggcacggtggctcatgcctgtagtcccaacactttgggaggccaaagtgccaggatcagttgagcccaggagttcgagactagcctgggcaacatggtgaaaccttgtctctacaaaaaaaaatacaaaaaattagccaggtgtggcatgcacctgtggtcccagctgttcaggaggctgagatgggaggttcccttgagtccaggaggcagaggttgcagtgagccgagattgcaccactgcactccagcctgggttatagagcaagaccctgtctttaaaaaaaaaaaaagagagaaaaatggctcccatagacttgcttgacacagggttgccacaaacttcaatctgtaaaaattttattatctggtaatctagcactttgggaggccgaggtgggtgcatcagctgaggtcaggagttcgagaccagcctggccaacatggtgaaaccctgtctctactagaaatacaaaaaaaaaaaaaaattagctggacgtggtggtgtgtgcctgtagtcccagctacttggtaggctgagtcaggaaaatcacttgaacctgggaggcagaggttggagtgaactgagatcgtgccactgcactccaacctgggcaacaaagggagactccatctcaaaaaaaaaaaaaaaaaaaagcattatctgcaaagcaacataaagcaaagtgcaataaaatgaagtatgcctgcctttcttcctttttcttccttccttcctccctccctccctcccttcttcccttcctcccttcctcccttcctttcttttctttctttctttctttctttcttttctttctttcttgtctcacccaggctggagtgcactggcactatctcagctcactgcaacctttgctttccagtttcaagtgattctcgtggctcgttctctcaagtttctgggattacaggcatgcaccaccacacccggctaatttttgcttttttagtagagacagggtttcgccatgttggccagactggtctccatctcctgacctcaagtgatccgcctgccttggcctcccaaagtgctgggattacagatgtgagccaccatgcccagcctacatttattttaatgctcagtttgtctcatatttggccagagagagctccttgcagctgcctcctgtgttcttttggcatgtccccaacacttttggagactcccttacttttgtgctataaccacgccccgtgttcatcttgtgctttcttagcactgtacttggccatttctccaaggagcccttatacctttagtggagaatggtatttatttatttttaaaaatcagtcaggccaggcacggtggctcacgcctgtaatcccagcactttgggaggccaaggagggcgaatcacgaggtcagcctggccaacayggtgaaaccccgtctctactaaaattacaaaaattagccgagcatggtggcgggcacctgtaatcccaactactcaggaggctgaggcaggagaatggcttgaacccgggaggcggaggttgcagtgagccaagatggtgccactgcattccagcgtgggtgacagagcaagactccgtctagaaaaaaaaataaaataaatcggtcagatttagcagtgctggattgtatgccaactttttagtgacactaatattaataagtattgataacccattagcatcagaccagctgagaatggtatttagaaaccaagatttgggctcagggtggacatgctcagttaccacacgtcactacctgtgagttaccttgatttaatgtccttttgtaagcagctgagtatgttgtgggataaagaccgagaaataggccaggcgtggtggctcatgcctataattccagcactttgggaggccgaggcaggcagatcacgaggtcaggagttcgagaccagcctgacaaacatggtgaaaccccgtctctactaaaaatacaaaaattagccaggcctggtggcacacatctgtaatcccagctacttgggaggctgaggcaggagaatcgcttgaacctgggaggcggaggttgcagtgagctgagatcacgccactgcactccagcctgagcaacagagtgagactccatctcaaaaaaataaaaataaaaaaagaccgagaaataaaattactgggtcagaggttattttgatagatgttgtattatcagagtattttatgtggtgagattatttattctgaggatgttgctttgttgcttaacggtcataaccatggtttccccggcagtcatctttgtgtgtcataggaaaagagtgcattacttctagacatagtggtatgtttacattgcaactttcacagttatcatcacattgctttctgtgactctctttrataggcttagccaagaaaattctgaaaaaattatttcttgtatatgtaataaattgcacctcccaaattaaatatgcctcacatctgtgtgtcagttatccaatgtgtgccagtggttcgttggttggtaaagaagattaagatcttagaatggttatgacagaataaatattcaaccttggactctttgcattttttaggaagatgaactattttattttcctcaaatctattcttgttttttcagatagagtcttgctgtcacccagactagagtgcagtggtgcgatcccagctcactgccacctccgcctcccaggttcaagcgattctcctgcctcagcctcccgagtagctgggattacaggtgcttgacaccacccccagctaatttttttgtatttttagtagagatggggtttcaccatcttggccaggctggtctctaactcctgacctcgtgatccacccaccttggcctctaaaagtgctggaattacaggcatgagccaccgcacctggccaaacccattctttagagcactacttcttgcccatgggtgagttttgcctcacagtgaatatttggcaatgtctggagatgtttgtggttgtcacaaccatgggagctggggtgctgctggcatcttgtaggtaaaggccaggatgctgcttagcatcctgcagtgtgataatcacccagtccaaaatgtcagtagtgctaaggctgagaagctcattttagagtaatttgttaaaagagaagttgtatgaatgaaggagtgaaaccttaaatcttttccatcttataggtagacttgatacagatgatgggcaagggcatctaacaaacttgaaaagattatatgttgggggttctgctgaagaagactacatttgccacaggggtgaaaagtaagagtttggatcacaaaagtgagaggaggtcactttttctggctcgcttttcctggcttcttaatttcacgagtgaagatgtggttttcaccactgaagtgaaaacagacattggcacctcttgagcatgttaaatgtaaattttgatttgtttgcatgcagataggggttatgagcttgaaatcagttcatttctgttctacagaagacctcattttatttactcatctaatttatttatttatttttctgagatggagtctcgttctgtcacccaggctagagtgcagtgggcgatctcagcccactgcatcctccacctcccgggttcaagcaattctcctgcctcagcctcccaagtagctgggattatgggcatgagccaccatgcctgactgttgatttttttttttctttcttttctttgagacagtcttgctctgtcggccaggctggagtgcagtggcatgatgtcggttcactgcaacctccacctcccgggcccaagcaattctcctgcctcagcctcccaagtagctgagattacaggcatgtaccaccacgcctggctaatttttatatttttagtagagaaggggttttgccatgttggccaggctggtcttcaactcctgacctcaggtgatctgccaaagtgctgggatcacaggcgtgagccatcatgcccagccactcatctctttttaatgtcagtttgttgatatggtttgacatttcattgaactagaaatagacaaaggtcaaaatrggtaaggaatgaattttctcatagttcttttttgctgtttactttagcagaggaaggtttggttaattggctcccaggaaagagtaaatgtgtgcacatgtgtgcaggtgcttgtacttgtgatggaagcgtgcgtaaggtaaggagggttgtcagtgcagctttattttacttggaaaaggctacctttaaaagcaaaagacaacttcctacatccttcataagagcattggaaatcgtttgatgaattggaaacattttcactgcagctgatgtagttttcacagtgatttctggccgcaagtaatgttgcacaattcattttattcatggattagattttgtttgataaaatggaaagagagagcagaatctaaacttagggtagttttagcactctattcttgaccttgtatgaaaactggaatttttagtgttttattttttgggtaagctattcaaaaactgttggcctgtgaggtactagtcatttttttctaccctgtaataataaagtctgtctctgttttgtggcagccaccagattatgtgttcacttttattcagaacctaaaggcagtatcagcagggaatgagtatattgggcagaaaggctttcattttagccttttttagcctccctcctagcagagcctaggtttttcatgcgaaactaacagtagttctttgtgggaggtagggttgcaaaaaagtaaacaaatatactgtgatgttttccgcatcaaactagagctgaatttccattgatatttgatgagaggtattggcttgcaatctttctttttttttttctttttttttttttttttagacggagtctcactctgttgcccaggctggtgtgcagtggtgcgatctcaattcactgcaacctttgcctcctgggttcaagcaagtcttgtttcagtctcctgagtagctaggattacaggcgtgtgccaccatgcctggctaatttttatatttttagtagagacagagtttcaccatgttggccaggctggtcttgaactcctgacctcaggtgatccgcctgccttggcctctcaaaggtggcctggccaacgtggtgaaaccccacctctgctaaaaatacaaaaaattagccagatgtggtggcacgtgcctgtaatcccagctacttaggaggctgaagcaggagaatcgcttgagcccaggaggcagaggttgcagtgagccgagactcgtgccactgcactccagcctgggagacagagtgagactctgtctcaagaaaaaaaaaaaaaaaaaaaaaaaaaaaaagcggataggtcaacataactgcgtgtttacatggtttaatttaaaaacagaatctcaggaagctgctcctaatgttggtggtttgaaacccccctccccccattttaagtgattttatatgcaaagccttcttgtcttgcccaaattcaagaagttgtctttgtttctaggatgtgaaatcaggaaatatatgtttgttgaaatgtataaagtagtggtgaatttcagctcaactgatttgccagtatacagagaaaaacacctgttctttgagatacacagtgcctgttgggaatctgcaaaaattgtttgttggtagtcactaaactcttgttaccctgaattttattctctttcgcttcccccactactagcctaataaatatttcagaataataacaaagtttaaagaaagaatacttagcctgttcttctgaartagtctttgtttttcttctctgtttactaacctccttttgaggataaaatcttatttcctttctttatcctgtagtttcctttgtacactcatagcctttcttcagatgcagattttgcagtcagataaaagtctctactttaagcaccaattaaatcaggaaaagatgatgggcctggagttattgtcttcaagttcctgattttgaggaaactctgattatgtcagtagtgcagttatctgatagtaaggttacactgtccaaataaggtgactttggaagaaaataacataaagccatctcatgatctggcagcctttcgctgtttcgctttctgcagagcggcattccttctgcatgtctctgtcagtctctgtgagagtggggtttctatccacacagcactgcggtgcagcttctccgtgttggcagaatcttccatgctctgctggttcgttgtctttccagctgtgctgtgcagtgcaatgtgctggctgctgagctcatgagacacggcccgtctcaactgagaagtgctgtgcgtataaaacacacaccaagtagagaagacttgataggaaaaaagtgtaaggctgggtgcggtggctcatgcctataatcctagcactttgggaggctgaggtaggaggattgtttgcttccagtttgaaatgagccggggcaacatagcaagatcccctctgagaaaaaaaagtgtaaaacatctcattaatttttatatcaggytgggcgtggtggctcaagcttgtaatcccagcactttgggaggctgaggcgggtggatcacctgaggtcaggagttcgagaccagcctgaccaacgtggagaaaccccatctctactaaaaatacaaaactcagctgggtgtggtggcgcatgcctataatcccagctactcgggaggctgaggcagaattgcttgaacctgggaggcggaggttgcagtgagccaagatcgcgtcattgcactccagcctgggcaacaagagcaaaactccgtctcaaaaaatacatacatacatacatacatacatacatttttatatcagttacatgttgaaattataatattttgggaattgcataaaataaaatgtattaatttcatctgtttttaatgtggctactagaaaattcaaagtaacatgtatggcatgccttctatttcttttggccaatgctgctgtttctgagagattgcaggttcattgagggggaatttgcatggtttgtttgttttttgtctgtatagtggttttgccaccatttccagggaattaggttgtgattacatttctctagtgatacatgaatgactgagatcttgtaatttgttttgttttgctagtgatgatggccaaagagaagccaccgataactgtagttggagatgttggaggccgcatcgcaatcatcgtggtatggttatatgtcatccatgtgcagaggtggcactcctggctcttggtcagtaggttgtccactctgggactgtatttctaggaacgatgatccgaatggatccatgtatcctttctcacccaaactcccttgtgccaagtggcagaaacctgtatccaggtgaacatacattaaagtataacctacagataggaaatgagcacagtactcccgtgagaaaattcagcaccttcaccttcatcatgtggattctaggttctttaaaccagctcacctaatcatgcttgagcgttagggccgaaagatgaactgaagatgagctgttccgttttcacaastaagaatgggtgtccccgtgcagactcgttctgcatgttgacatactttttttcccagctctaaatatctgctggctagtgggtcaygagtcctttgcagtagcacactttatttcagttttcttctcatgtcacrgtctatttgaaaaaaaaataaatggaacgctggctatgtgggattcaccagaaacgtgagacaggaaaatgagtgttggcaatcctcagctccagccgtaatgtcacaggtgcttgactgcgcccgcctctgacagacacwcaaggtactgtcaggtgcttctgttgccatttctggatgctcgttctttgacccaggcacacagctctgattttccatcagaaatcctctgaaactgagtgcagaagagagtagagtggtgtgtgcattgacagtatgggctagagggtgtttctttcctaccaactcactctgttctcctcccaggatgacattattgacgatgtggagagttttgttgctgccgcggagatcctgaaagagagaggcgcctataagatctatgttatggccacccacggcatcctgtctgcagaggcccctcgcctgattgaggagtcctccgtagacgaggtcaggctgcttctaaatcttgagccaagatttactgctgtgttttctgggaataataamatgattcagtcaatactaaattgcttaatctgtctatagcttttctagcttttgctggctagcagttcgttgggacagatacatgtttaggaatacagatagtccacgacttaccatggttcaacttagaagtttttgactttatgatgatgcaaaaccattgcaattacgatgtaatgtatagtattcgataaattacttgagacactttattttaaaataatcgcttttattataaaatgaaagcctttgccctagatgattttgccacctgcagtctaatgtaactgttctgggcatgtttaaggtagggctaggccaagttaatgatgtttagtaggttaggcgtattaaatgcttttttttttttttgagatggaatcttgctctgttgcctaggctgggagtgcagtgtggcaatctcggctcactgcaacctctgcctcccgggttcaaacgattctcctgtctcagtctcccaagtaactgggattacacgcgccggccaccaggcctaatttttgtgtttttcttagaaacggggtttcaccatgttggccaggctggtctcaaactcctgacctcaggtgatccacctgcctcggcctcccaaagtgctaggattacaagcatgagccactgtgcccggcctaaatgcattttctacttaaaatattttcaacttataatgatgcgtttatccagacataaccctgtcataagttgagagttatgttgagggtctgtatatgtctatttgcataayggtttgcttgggtactttaatttgacaccctaggagcatttctcttgaggctggaattcttcccttatgatctgagagttttgcatagcactggggctcactgtgtttctgcatggagaccatgccattcctaagatttttgtcttgtgttctgaggccatgtaacttttcctttgcataaaattagttaattttggtttataaaaactatactcggtggaacaaggttttgtagtttggaacttaggctgtgggaactcaatgttagataagcttttctgtgtaaccagcttggagaacagacttcagtaacagcgtttgttttccatcactgtgtgactaggtggtggtgacgaatactgtccctcatgaggttcagaagctgcartgtcccaagataaagactgtggatatcagtttgattctttctgaagccattcggagaatccacaatggagagtccatrgcctaccttttccgaaacatcactgtggatgactagctttcacgagggtctcgaccctggacctcctgagggaaacatggaaaaagcagtgccatgagtgatacagtgtttccttgcaagggaggactcgaaacagcctggagttagatatcytcttttgcccggattgatggggaggagggattaaaagagtcaggaagaagacagagctaatggataaatatcataacatggccttacatgtctgctgtcatcagccctgttccttaaaagttctagctgctttcttaaaaataatctgaaaatcttattgatactaaagaggagttaaaggcacataaagtcttaactctataatgttcatttagttgtttcagctccagggaaatggaggtattgatgttgaacctggttagggaagctgagcgcctgtggccctattactatccagttggcctctcccaaatcaacttcaagtcttttatagagaatcgtatttttctttcagaaattgttatgcctacagccattgaaaaatgaagcattcatgttgttacatcttccaaggatgtcagattagaaaatagcatcccacctctgggtatctgagtggctctgaagttgcaaataaaataatttgttgtcttgctagtcttttcattagacagcagaagaccatggatacagaacagcagtcaggtctgtggctggacacaaacactttcccaggttccaccctcttcctaagtgttgaagctaaatccttgttgaatactgtattttaaatctttaaaaaaaaaaaaaaaaagtctaggtgtggtggctcacacctataatctgagtactttgggaggctgaggcaaggaggattgcttgagcccaggagtttcagaccagcctgggaaacatggcgaaacccccatgtctacaaaaaatacaaaaattagccaggcattggtagcatgtgcctgtagttccagctaccttgggaggctgaggtgggaggattgcctgagccaaggaggttgaagctgcagtgaactatgattgtaccactgccatccatcctgggtgacagagcaacaccctgtctcaaaaaaaaaaaacaggccagggatcgtgtcttatgcctgtaatccctgcactttgggaggccgaggcaggtagatcacctgaggtcaggagtttgagaccagcctggccaacatggcaaaaccccgtctctactaaaaatacaaaaattagcctagctaagttaaaagcataaaaagactacaaagaggccaggcatcatggctcacgcctgtaatcccagcactttgggaggccgaggtgggcagatcacttgaggtcaggagtttgagaccagcctggccaatatggtgaaaccctgtccctactaaaaatacaaaaattagccgggtgttgggggagggggtgcacgcctgtaatcccagctactcgggaggctgaggcaggagaattaattggttgaacccaagaggcagagattgcagtgagctgagattgtgccactgcactccagcccaagtgacagagcaagattccatctcaaaaaaaaaaaaagactgcaaagaactagttattttgataaccccttaaaggcctactgtgtcccaagttattggaatataatgatgatcgaaaatccttcaattaaataaacagtacctctcaggctgaagtgaaaaatctgaacttgaacagtagttaaaatagtacagttattccttacaatccatgggtgattggttccaggactcaacctcctgcccatggatgtgcaagtccctgatagaaaatggtgtagtatctgcatataagctatgcacatcctggatgacttgtaatacctactgcaatatcctgtgtagatggtggtcatgctgtattatttagagaatcatgacaggaatctgtacgtgttcagtcgtggttggttaaatctgcagatgcagagctcacggaggaggctggccatgcatggcacacattcataggttctctttaagtagccttgctgtgcttctgttaggaagttttatttatacgtttttgggaagaatcttgtatggggaagtcatgtctcaattgttaacaccagatttgtctcgtgctgtttaatcctgctttgtaatgagctcaagcacaggcgcttgaccaggtgagtggtttcttttcttttctttttttttttttttgagacagagtcttgcactgtcgcccaggctggggtgcagtggtgcgatcttggctcactgcaacctctgcctcccgggttgacgcgattctcctgcctcagcctcccgagtagctgggattacagatgcgcggtaccatgcccggctaattttttgtattttaatcaaaaaggatttactatatgggggagggggtggtttaaaacttcagatcaagagagatatgcccgtctgggtctcaaaaagtgctgggcattacaggcgtgagccactgagccctgccttcaactggacttttgttttcttggagggacaaatgcatgtaatcattgagtataagtattgtccagtgaacagcaggaagcaacgcaggtcagcgccaggaggtaatagacacgtgcatgtctcaaagccaccttaggttggttctgaaagaaaaagcagaagcaactaggaaggcagctgggtggggaggccaagaggagagacaggaggggaaaaagaggccgggaagaggcaggaagaagaggccaagccccagcaggggagccctnnnnnnnnnnnnnnnnnnnnnnnnnnnnnnnnnnnnnnnnnnnnnnnnnnnnnnnnnnnnnnnnnnnnnnnnnnnnnnnnnnnnnnnnnnnnnnnnnnnnnnnnnnnnnnnnnnnnnnnnnnnnnnnnnnnnnnnnnnnnnnnnnnnnnnnnnnnnnnnnnnnnnnnnnnnnnnnnnnnnnnnnnnnnnnnnnnnnnnnnnnnnnnnnnnnnnnnnnnnnnnnnnnnnnnnnnnnnnnnnnnnnnnnnnnnnnnnnnnnnnnnnnnnnnncctggccaacatagtgaaaccccgtctctgctaaaaatacaaaaaattagccgggcatggtaccacgcatctgtaatcccagctactcgggaggctgaggcaggagaatcatgtcaacccgggaggcagaggttgcagtgagccgagatcgtgccattgcactacagcctgggcgacagagcaagactccctctcaaaagtaaaaaaaaaattatggcagcacagaaaagggacaattagccaccagttagtcatctagtggctaattggaactgcctgaatagtgagtgggttgtcttttccaagttgcttcacctttgattgaacaaaatatgtggactgtctgaggggaccagggccccaggactgcatcccttagacatggggccatagacatggggccaccactctggaatggacgcagctgatgacacaaagcatggttgccaggaaaccctcaagtctttccttatgtggccccgccaagagtgagtgaatcctggcctttctaggttaaggggatggatggagtctagctggatcttaggaggcctcctcagcccgttgccaaggctccccttgtgatccttgtggtggcctttacttccccccgcccccgtggctcgcagggaggcgtgttgttacgtggaatcttcagggcacgcgggggcccccacgtttcaaacgtccgccggcgcggggactgggagtccagggctccagctcggggacccgaggccagcgacagacagcggaggggtggccatcgcggaccccgccggggagcggaggcgcagattccctggaggcaggagctctgtccagtgactcggccggacccggggcaggggcgccccgaggacctcgcagggcccccgaaaggccccaaggcgcggcgtgcagtgagcgggaagtggttggccggcgccccgcggcggcgcacagctcctgacagccacgatgccgcccgcgaccacggtctccctccgggagctggcggacctctccatcggcacgccagaggtgggcgccgtcaacttcacggccctgcacacgctcatcgtggccatgctcaagaacctcgacctccaaaatacccggatcgacttccagccctcgtcgcccgagcccagccgctcgctgcagtccgtccggagctcgttcagcatcccgcacctgcccgcgcccaaggaggtgcccaagggggcgccccgggagaagcgcaggggcgtgggccaggcgccttcgtcagcgctggagagccaagtgaaggacctgggcggccaggtggaggacctgagcaagcagctcaagcgtgtggacggccaggtgcagggcatcgccacgcacgtgcagcacttctcccaggccagcgggcttgacctggccgcgctagagtggccggaggagcaggaggtgggcgtgcgggcgttcgatagggtgcggactgggagtatcatgaaggacgccgccgaggagctcagctttgccagggtgagcacgcacacggaggcacgcgcaggccgtctgcctcctccaggccgccctccaggcctagccgagtccccaccaccctggaggggtgagcggtggtggggacggaggggatggggaccgaggaggtgccagacctcagtgcgactggctaaatagagtggcccatgctctaccttgcagtccacggggctgcaagacgtgaaaatcctaaaagaacgccaccaaaaggcctagggcctccccgagctggaggggcctggggaccccacctcctaagtgtagtggccccatcccaccccctccttcctagcccctgtttacgggagaggttcgcccaccacttatcagacatccaaggacccagagctggctcagagtggggccggcaacttctcagaagattcttagagtgaattccctttttaaaatgaataaggacatgaagagatacgtgttgaggacaaaggctcccagagaaggggagtcaggatggagagttggacctcagcttcctatggccatgacacaagccacagcaggcaggggaccgtttcacttggactttttttttttttgagaaggagtctcactctatcacccaggctgaaatgcagtggtgcagtctcggctcactgcaacttccgcctcccagactcaagcgattctcctgcctcagcctcccgagtagctgggattataggcgcgcgccaccccgcctggctaatatttgtgtttttagtagagaaggagtttcaccatgttggcggggctggtctcaaactcctgacctcaagtgatctgcccgcctcggcctcccaaagtgctgggcattacaggcgtgagccactgagccctgccttcaactggacttttgttttcttggagggacaaatgcatgtaatcattgagtataagtattgtccagtgaacagcaggaagcaacgcaggtcagcgccaggaggtaatagacacgtgcatgtctcagagccaccttaggttggttctgaaagaaaaagcagaagcaactaggaaggcagctgggtggggaggccaagaggagagacaggaggggaaaaagaggccgggaagaggcaggaagaagaggccaagccccagcaggggagccctggccgctcatgccctcctgccatatcaccccaggtctcgagaccgcagcaccaactcacttttgctctgggaagcatgtctgctttccttttcaaactttaaagtgtggtgggggttttttttgttttaatttttttgggtttttttttttttttttttttttttgagacacattctcactctgtcacccaggctggagtgcagtggtgcattgtcggctcactgcaactccatctcctgggttcaaggaattctcctgcctcggcttcccgagtagctaggattataggtgcacaccaccatgcccagctaacttttgtacttttagtagagatggggttttgccgtgttggccaggctggtctcgaactcctgacctaaagtgatcctcctgcctcggcttcccaaagtgttgggattacaggcaagagccactgcgcctggccttttgttttaatttttacgtaatcttagattctagaagtttgcaaaagttataaaaagtaacttgttttatttttgtttattaatatattttttcttaatcccaaatatgatagcaccttatgttgtagcgatttgctttggttcttttgaggtgcttttctctttagatagcacagatgttcagctactgttgaggtacctggcacccttccttccttgtaaggcaaggtgggcctcatcctacaggctttcacaagtgggttggagcaaactgaatcccaggaccaaagggtcccatccctgcagcagcacttactcctgccatgctaccagccaggtcccccactgcatctcacttcccttcctgcacttggctgggaaaagacccaggagcctgggctgactggccaggtaaaaaccaggtagaaagcaggggctcctgcctgtaatctcagcactgtgggaggccgaggctggaggattgctcggacccaggagttcaagaccagcctgggcaacattgcaagatcttatctctacaaaaaaatgtttaaaattagctggatgtggtggtgcatgcctgaagtcccagctactcaggaggctgaggtgggaggatcgcttgagcctgagaggttgaggctgcagtgagctgtggtggcatcactgcact

SEQ ID NO: 95498 - DNA, 14570 bp, Homo sapiens
ctgagattgtgccactgcactccagcctgggtgacagagtgagcctccaccaaaaaaaaaaaaaaaaaaaaaaaaaggaaggaaggaaggaagaaatcaatcaatcaatcaatcagtcagtggtgggtgcaacatctcaggtgtctgagaggtacagggatggagtaagtgtaaggactggggggctggatggctgttggggcagtcagtgcagaggagaaaggcagtcagaggctgggggtgaagaatcactgcttgaaggcaaagtggaaaagccagagggcctccttggcagcatgtaaagaaactcgcctcctgaagttaaggaacagagagaagtcagcatggcagagcctgagagcaggttgaattcccaaccttaatgagtcagcgatacagaggaggcccctggggagaagcgggagacatccagggacagaggttagtgcccctccttccttggggacaatgcctcttccttaggagacatgtactacccccttcccaaccctgagtatatactgcacctcctcttcttgcactgggccagtaactagggctaaatcgcaacctcacctactggtgaagtgctgggtcggctaagggaggaaggaggctctgtcctgaaggagctgcaggtcccagccagagccaggagagtggggactggaatcagaggatgctggctgggccaaggggatcagagcataaagttggataaggaacgtgtgttggtatgggagctcttttccctgttacagaatttatcaccctggcaaggaccctggtacttggaagcttggagaaagtgattcagggctcttacccgcagtgggcaggactgctgacggctcccagctggattttcctgcaactgccctcaatgaagcaagctgttccacccaaggttgatgcaggacaaagaggtgggtccagaagggcttcccaagtctgaagctcctcgggggatgcgccaaggcctcggttacagctgcaccatcacggctcagcttccactgtccagccctctgccctgctccatggtaggggtcgctcatgagacctctccccaataaacttgccgcacacagttctccatctctcatcccccggggagcctgccacgtggtagtactcaggctggaaaggtaaagacgataacgcgagatgtgctcagtgccaggtctgtggggcagacctttagtgcaggggaggagttgagagagaaagtgaccatcgaaaccaccaaaaaaatgcagccattgcacaagagcctgaagagagggctatgcttcctgcacgccgggcctctcaactgctctgcatggaaaaccggtatctcagaggcatcgtcaaggtgtccctgggacatggccatggggcccactccttggtctgccccaaatgggctcccttcagtctgggtgtgaaactgggcagctgacacacggaggggagggggtgtgtctccatgcgggaagctcccagattccaggtccagggcttctgcactgggcccggtggggatgctcactgcccctgcaccaggctctccgggggtatcagcagctgcagcaggctcggtgcccgggatggggtgggggccgtggggaggttttctccaacccccggccgtggcagcgagtcagtgtgcctttaatcaacggcctctgcactccacctctcactgtcaccattaaggccattcctctgcatctggcctctccacccatttctcccttctggaaggattccttttttttttttttttttgagatacagtcttgctctgtggcccaagttggagtgcagtggtgcaatcttggctcactgcaacctctgcctcctgggttccagcaattctcctgcctcagcctcccgagtagctgggattacaggcacccaccaccacgcccagatcatttttgtatttttagtagagacggggtttcaccatgttagccagactgctattgaactcctgacctcgagctatccacccacctcagcctcctaaagtgctgggattacaggtgtgagccaccgtgcccggccttttctggaaggattcttaaaggtcatcggagcctccctgttggcagaatctgagatctgttctccattctttgtggcatttcaggctctatctgccccatttcttggacattctcccctgggttcttcccttcttgtggcttcacctgtgttcctgttaataactcctttccctgctaacagtggacatcccaaaagcttggttctcagctttcgtgtggtgatacacatcctctcagaaccttttttactgtcatgatatcagttatccgctcaataactgtcgtcatcatcctcaccacatctgattaggagtgggatgggggctctgatgggtcagaggtgaggctctaccagggcaggtggggagttaggtagcatggtccctggcagttctctgtgtgccctggacaacccctctccaaactgctatagaatattctggagtcctgcctgggcgcggtggctcacgcctgtaatcccaacactttaggaggctgaggcaggtggatcacctgagttcaggagtttgagaccagcctgaccaatatggcgaaagcccatctctaggaaaaataaaaaaaattagccaggcatggtggtgtgcgcccgtaatcccagctacttgggaggctaaggcaggagaattgcttgaacctgggaggcggaggttgcagtgagccgagattgtgccattgcactccagcctgggccacagagccaagactctgtcttaaaaaaaaaaaaaaaaagaatattctggagtcttgaagtggaagcccagtcacagaccatgattttcatgggaccgaagagccttttgggagaaaactgaaccccacctggcatttgaaatgtgtaaatctgtctgggagatcgaaagaggccaggctgggcggagagacagggggacccctgaggggagccatcatgggtgaggcagggtggcatggtacacactgggcagggagtcgcggtgggtgagttgtggatacaggactttcaagggagctgctgctggagggagaggctgggaacaaagagcctcggcctcccaaagtgctgggattacaggcatgagccacgacgtcaagccatttctgtggtttacagtcatccagtttgtgtatcatctgttacagcacccctgggaaacatacagatgccagcttctccctgtctgtatctatatattttttttttttttgagatagcagtttcactctttttgcccaggctggagtacaatggcacgatcttggctcactgcaacctctgcttcctgggttcaagcaattctcctgcctcagcctcccaagtggctgggattacaagcgcccaccaccacacctggctgattttttgtatttttagtagagacggagtttcaccatattggccaggctggtctcgaactcttgacctcaggtgatccacccgcctcagcctcccaaagtgctgggattacaggcatgagccaccgtgcccggccttgcccatcaggttaggtgtttatcagctgtctagagtgactgaacaggtacgacttggggggcaaaggacacattctcccccccatccccaagatccacctgagaggcagtcaccagaggcgttgccagcactcttaactgcaatagcaggacaagactgggcatctgataaacagtgcaatcggtgtccctggcgtgaggatgatctcggaggtgcttcttttttagagcccacctgaggtcaggattttttttttttttttttgagacaacatcttgctcagttacccaggctggagtgcagtggctcatcactgcagcctgaaccacctaggctcaagtgatcttcccacctcagcctcccaagtagctggggctacaggtgtgtgccaccatgcctggctgatttttaaattttttgtagagacaggggtcttgctatgttgcccaggctggtctcaaactcctgggctcaagtgatcctcctgccttggcctcccaaagtgctgggattacaggtgtgagccactatgcccagccccagggatctccttctctctgtacccatcaccctgttgggcccctcaccctccttattttccttctcattggtggtggtatgtggttttcttcctgttgaccaggacaaaggtcccagcgatcaccctgccctcccctgtctcctctcctgtcccacaagggtttgaacttcccagtttcaccatgtttaacataccgcctcatctttaaaaaaaatttatttttatttgtatttttttgagacagggtctcgctctgtcgcccaggctggagtgcagtggcgagtcactacagcctcgacctctccggctcaagccatcctcccgtctctgtctcccaaagtgctgggattacagcggtgagccactgtgcctggcttactgcctcatcttgttccctgaggttctagacctctagggtgttgtccggaaagaacagggccatgtggaagtcagcaaagagagaggccgattgaacagcaggctcttctcaggcatcgccaagtgactgattaggattggccaccagggggtgccatggagccacagtctatgaagggacagaagaggccttttgggggaccctggaggttgaaggtggggatgcccagctgaggtcttggacatgaccaccccaccaaccaagcccaaggaggtctctggtcggtcctgagaggtctgttgagggtcccttctagcaggcaggtgggcctcagagtgcagaggggccctgggagaaggggacccagagacaggaggaatgcatgtggtgggtgggcgggggcatcgggacggggtcactccacggtcaggggctgtgtcccaaaccgtatgggtaggaacaggagcttcctctgcgggggggtcgaaagagtgcacctgtgaggacactgaaaaccagcaggagaatcatgaagacaggaaacaggagtctcattgtgagatgagtgggtcccaccagtgcagccgtggcagtgcatgtcaggaggctgacccggctttgcccctcccccttcacttgttggatggctctgagcaggttactgaacctgtctgtgcctcggtttccttctctataacgtggttaatactcatttggccgggcttccgtgtggattaaaggagacgcgtatccagggcccggcacatagcaagtgctgtaagcagtggcactcacaggctgccaggacaggaaggaccctcagaggtccgtcccaagctgtgtgggtaggagcagaagcttcctctgcagggggtcaaaagagtgcacctgtgaaatccaacctccaggacccccaggagcccgagatggacacaggatctgcactgctgggtggggcggagaggcaggtgctggcgagagaagagctaaggggtgcaggatggggtgtgagctggagggcagggggtagtcagagccaacagggagaggggcctgcatcccgagggaatgccagcaccaagtgccaaggcctgggcagccctgggaatgggtggagccaaggtcaatagcagagagctttgtagttgagatgtttggtagggcaacctcctgaatatttaaatatttaattaaattaaatatttaaataaacttgaagtagaacgtacttaaagtgcacaaattggtagcttgaattcccaccccctccccccacataagaggtggggttgtccaagactccgagggacagagggagaatcgctggtgcccagccagtcggtgacagagcagggattagagatggacccctgaggcttagccccacgctctcttccccaaaccctggggcctcagtcagcctctggtaatcccttctgtgcccagggcaccagagctgacgtttcccttcagcaaggcaggggccgaggctgccagagccctgctggcgtcatcctgcctgggatagctcgagaggtggggtggggggattacaaacctctaacagcaccacaggctgcccggggaacatctgctactacagccttgcagcccggagtcccggattttactggttcccgtgcctgcggacaggcccccagggctagcggctttgtggagggaacactgggtatcctctccacagtccaggtaggtgggacccccactcctggctctcagcctttaggaacaggagcttctctacttggagcttctagacatggagggaaacatggaagccatggagtttattaagtgtcttggaaggtggagggagggatggcctcctctaagaactgcaaatctgcagggtgtcttgggagacaagagtgcccagaggggaatgtctgatgagctggatgtgtggggcagggggtgtcctatgcactctccttgcctgctcctccccattccccaggccctctgcagcccccggctccctctaacctccccaccccccaccacaaatcctgcatgtgtgtggcccagtctgaggccatctggatagaagtagaggctccctaagggcccactttgattaaggggctctctaggaccaagggctgaggctacctaaaaagctctctgccacaggatcttgcacccaaaggaccagaagcctccctctggggaggtaagataaaccacatgaatggtggtgtgggggaaccgggcgcccacccactgcacagttgcattagacgtggtcagtggagggtcacgagtcctgcctcccctcccaccgtgggcagcagggttggggtgccccaggctccactgagccctgctcatccctgccaccatctctggggctcagaagcacccagacggcaccctgagaccaatgtctgcaggtctgcaaggtggcaaacctccagggatccttctggctgagagggaaaggtggggagacagtgccaatgtttgcaatgcctggtaacagcctcggggaccaggtacctggggaatgtgcccattgatttaggggctgtctccaccccagttcctgctacaaaagaggccagatacatactctggggcctgcctccctggagatgaggatgagacccctgtcycttgctgttctccaacaggtgctgggaggccctccttggcttaggaggacacttccaaagctggggcgccccaaggaggcaccagtggccagaatgtccaygcagagcacccaccccctgaaacctgaggccccaygtctgccacctgggatccccgagtccccgagctgtcagcggcgccacacactccctgccagtgagtttcgctgcctcaccccggaggacgctgtcagcgcctttgagatcgagcgtgaaggtgagtggccccgcacagggtcagagggatgctccactctggtccagttatcctgtggggaggagacccttagtctcctgtccttggaggctgggtcccagagtatcrgaccatgtgtgcgctcaagaaagtgggggaaacagcagccctaacccccattttcctgtggggaacggggcatctgagtggacactcggggtgcagcagacagtggacgcgaggcacagcgactaccagtcacccacctgagcctcctgccacagccttcatctccgtcttgggcgtctgccccctgtacctggatgagatccggcacttcctgaccctatgtccagagctgtccctgggctggttcgaggagggctgccttgtggccttcatcatcggctcgctctgggacaaggagagactcatgcaggtgaggacagggctgcgacgcccagctccagggaggccwctgaagacagaggtcagccagatggcggggaggggagcccaggggctgggatttcttcctccagaactggagagatgagtacaggccacaggcccctcccagagcaagaccttctgggtcttcaagttttctccatggggttgggggtatggctcccaatttggggccctcctttgctggggtgggtgccctgaccacaggcacccaggggacacctgctccctgcctgggttggtggttgggggggagcacgtgtcagcagaagtgacctgggatctcatcccttgctcgctcccaggagtcactgacgctgcacaggtctgggggccacatagcccacctgcatgtgctggccgtgcaccgcgccttccggcagcagggcaggggccccatcctgctgtggcgctacctgcaccacctgggcagccagccggccgtgcgccgggcygcgctcatgtgcgaggacgcgctggtacccttctatgagaggttcagcttccacgccgtgggcccctgcgccatcaccgtgggctccctcaccttcatggagctccactgctccctgcggggccaccccttcctgcgcaggaacagcggctgctgaactgggctgcccacctggctgccaacatgatccccgtctctgccctgggctcctcttagctcagctgagcatggagacagcagtttccagagagtggagagagcagggctaaataaagaggagataaggtggcttctcacggcctgagctggagtggtgtgtcttgtctgtccccacgaggcctctggacctcctgtgttctgaactctgtacctgagaccgggctgggttggtaagcggggacaatgggaggtgctgtggggttcctggctcctttcctcctggcaggtgggcaaaggcaccaaggcggcatcctcacagtagcccattgctcggtggggggggggggtgtccttattctccccagcctcatggatgccgcttcccacccttagcccctagggtgggggagagtggggagcagcaggatggggcagaggcgggaggcctgtgctgtagaggcagcttggggcagggaagctggtgcagggccctctgcccatggtaatcaagtggtcatacccggtgcctcactggccgtcctcagtgtggtgggtgaggcactggcacagggagtggactcgtccccgggtggggtgacaggtcccctcagtgccatccccatcagggcaggccaccctgggcccaggcagccccttccctgctctggagccaaggcagaacaggtaggggtgggaaccccagggccctaaggattcaacccagccctcccaagtggacccctggggtctcccacgtgaccccaatctgctttctggcccaactaattccccaagatgctccacaagttttctgctgtccaccgggccaaactgctgtctctgagcggctgatggctgacccctcacctcacccccaaatcccagtttcatgctacctgaggtctccgttaaagacaatgtactgccataaagaatattatttaatccatgagacatcgtccstacaaagttagcgttacttttaaaaatgaagaccgtgatataaactggtaaaaaacgggcctgatgcgcctcgagcacyccctgggagcaggccctggggtggctccgcccagtgtcgttctacctgaggtctacttgtgtctccccccttgttctctgcccccagaccatggccaaagcctttcccacaatgtcccatctgagagccttatggatgggctcacagggcagaggtaggaggagaaagaggaaggggcatggtgggcacccagccctgggggcaactgagggcacagccacgtccccagcaagggcacgctccagtagtagtgggggagaaggcaccagcagaggcagcgctgaggacctgggaagaaaaggaccctgccccaggagatggtctcagcaaggagcgggatattaggaactgagacccaagactcagagaggcaggtgccttgggtgtgcctgagcttgggtcaggatctcacaggcctcacgccccagaaaaaccccgccttaaccaaccatctcacgcggagtcagcctcgcctggcaggggggcacccaggtccagagcccgggccctgtcttgggtctctggctctctggcacacagagagcgctctgcagagggcagccctcgcaggcagaccctgttccagcagggctgaggggcagccgtgtggcccagcggtcagtgcagcacctggtccagctcatacttctcgcagaagcggctggtgaaggggaagcaggtgaggtgctcgatccagggccagttaatggggtagatgtacagccacagcacgagggcggcgaagaggccggcaaaggccagcagtgacaccaggatgagtgcccgcttgcggtacttgtcgctggtgccgaaggtgatgtagggcaggaaggcgaaggccagcagcaggccactgaggaagccgaagatgtgggcgatgttgtcgatccagggcaggaggccacagatgaacaggaagagcacgatggccgagaggttgaggaaggccttccagggcctctccagcagcggccagctctggaagagctccacgaagaggcaggcgaggaggccgaactgtgagccggccgggcccacctggggcggggcaggggagacgtggcttcaggcatcaggtgggtggcctgggccgggcctgcaccctgggtcatcccatcgatcagctcctccctggcaggcatggggacccctgaggctgaggggcagggggtcggctggagctgctggaccaaagctgggcctgctccgcccattctttcagcaaacactgagcgcctactgtgtacgtgcctggtgtgggtccgtagcaataagcaagacagacaagcctgttccaggccgcacacggtggggagaggacggacactgaacaaactagatcagtcaggtggaactgatcagactgccgacggcgcacggaggccatttcctaccgctcgacctgcagatacctagcatactgtcaggcagtgggcacggttaggaagataaatggggcggtggagggacagggtgactcaagagcatcactgttccctctcactgggattaagagaccagccagtaagcccccagattagctgtccctccgctgtggagcccagtacaggaggggcaccgtgtccctctggcagatcccaggtgggtggaataggagcagcagggctggccccctatgtgcggaaggggtcccatcctccacatccttacctctgcccggtatgggagaaagatggcactggcgaggttgcctgtgatgccactgaggatgaagatgatggcgatacggtgccagccggccagcttctccaggtccctcaggatggtcatttgaaagaccacagacacgaggcagtgcaccacgctgggggagggacacaccaggcagcggccttcagccaggcacttcaggagcagtaggcttcggcaggttgggccggccatgccctggcccaggaacctttccccaggggtccggctgggtggccatcacaggggtcgggttcgggggcagtgaggagcctcttacccagcatgtaggaagagagacagccagagcctgtagaactgatctgggacctcagggttgaggaagggcagcagcccacacaccttgtccaagcagtgcacctgggagtgggcatatggtgctcagcgccccagaagcaggctgagtctgaggctccgacatgrgagggagtgcgtgagccccggccccagcaggctgccatgcccagcgtcctctcctccactactccaggcctgcctcgcctcacctgggagcagagtgttgcttcctcatggaaatagccgtgcatgaactcacagtattcccgggtggtgatctcacagctaagggggtggtgaggcaagaggggacatcagggcgccgaataaccactgcccacctttgcccagagcccagcacctggctacaggaggcatcgctggcaggaagggggatgccgcatccagaaccttcgactctggagcaagcttccttcctccagctcgcaccatgggtagccccagagcaggggagcaaaggacagttattggagggcatcggcccagcggctgtgggtggtgacggtggaggagcagagggcccacaggaagccgcagctcgggggggcagtgggatggctgaggccagggcccaggtcgctcacctgcccttggtgccgatgcagcaggggcggcccttgatctcgcagtccatgtgcaggaagcctgtgtggttgctcctggcctgctctgtgcagatctgccaggagggggcaccggcagggaagtgggctgtgcagcaggcaggtcccccatccctgaccttcccagaccactccccgccagggacactcaccggccacttagtgatgtcatcgggccagatgtgggcaccgctggaggctggctcctcgcaggtcctggagacagggttcagattgggctgtggcacacccagcgtgccacgtccacctacccacgtccctgtgggtggctcagatggcatggctatgcctgaccctgaggcccagcagaggctccaggccctacctggggtcctggtggcagacagcccccgaagtccgcttctggcccagatcagacttgtccatggggggcccagtgtcatcctgccacttgacaaaagtggccaaagtctcctggagggcagaagaaggctggtgggtcatgtcggggccaggtcacccccactggagtgggcaaggacagaggcttttcccatctccccagggctcagtctcatctatgggggtctgggaaaggtggggcggggaggagggaacgtggtcactrcccttgaaggacagggcaagtggagctagtccgggaccagggtctggcaggggtaggagggagggcctgcccccaccgagcagtccttccgctgggtctggatgcatccggagtggtcattctggacacagcagcctgagtcccgctccaggtctcgctckcgcagcaccagctgctcgatctgcccgtccttccggatgcagggtgagaacttggcccccaggtggatcaggtcaatctggggaagggaaagggaggggagagagtgagtttgagccccagacctgggaggggtccatcactccacctctgccccgcagagtctcccctgatgaggggcctgygggtgggtgaggagcccacctgcccagctgggagtgacagggcacagggactcctggctcagatgatgtcccccagcctgggccctcaccgagctggggccaacccagaagttctcctgctggatgtacttcacgctctcgtacacacctttgttccgcagcacctatcgtggaggtagcacagaggagggcgtcagaacagtgtgggccctgggcatggggagctggggcagctgtccccaggatagagcctccaggaaggggccaggctatggtgagcaccaccctgctggggccagattgttgcggtgggagggattaggtacccacgacactgaggcctcctaggagaggctgggacccccagcatggagcctgacccgactcaccagctgggtggtgacgtgctgggcaaagcccacgggtgcgatgccatacgtgcaaatcaccagcagcgtgatgatgacatggacgaaggtcagccagtaggtgaagtagggcctgtgcagagacacctcgggtcagctgagccgagctcctatcccaacccccagtcccggccacagggccaccctggcctggtcacatggctcgcctgggctccctgttctgccccgtcaactcatctcaaaccagaggaacttttaagacgagcctccaagcatctctctcctagcttaaaaccttttgatagctttccactggccttgggacaaattccagaatcaccccctcttgctggctgcaaagctttgcctgaccgaccacctctctggcctctttgcctgcatttcctgggatgtactttgcccttccagccccagggcctttgcacatgacatcacagtttgtcctgactgcacccctccccaccagctgttcactctccctctctatcctcctccgggacacccaccacacctatcattgcttgttcttttcttttctttttttttttttgagacagagtctcgctctgtcacctaggctggaatgcagttgtgcgatctcagctcactgcaaccttcgcccccaggttcaagcgattctcctgcctcagcctccctcgtagctgggattacaagcacccaccatacctgcctaattttgtttgtctttttagtagagaccagttttcactgtgttggccaggctggtctcgaactcctgacctcaggtgatctgcccacctaggcctcccgaagtgctgggattacaggtgtgagccaccgggcctggccattgcttgttattttctttttcttttctttcttttttttttgagatggaatttcgctcttgttgcccaggctggagtacaatggtgcgatcctggctcactgcaacctctgcctcccaggttcaagtgattctcctgcctcaagcctcccgagtagctgggattacaggcatgcaccaccacgcccggctaattttttgtatttttagtagagatggggtttcaccatgttggccag

SEQ ID NO: 95499 - DNA, 94638 bp, Homo sapiens
  misc_feature (1)...(94638): n = A,T,C or G
atcctagacgctgcctttcaatcagaggattagtctaaatgttgtgaaacagaaagcataaaatatgcattggagaagcagctctccccacctcgtggcctctgcactcgaggtggctagtgtgtgagggccagttgtccccgcgcagtgccactgttgctgatttgtacgcggtgtcagtaaatgctgttatgacattattaatgctgcacactacggcaaaggacaatggcctattgcctcgtaatgtgctgtgtgctgctgcagtcggagcacattaaatggggatttcaaacatggtaaatggcttgtttctcttctccctctacacaccccaggccccgtctatgagctctaaaaacaaccttgaagccttcagaaggtaggagtggcagtcgagcctctgatgcccagtgaggctccagcgggaccagtgagggggtccaggggtccctaggaagcagcccagccttcccacccccagagtgcacctaggactgttgactttcctcgctggggcaggcaggtgtctgggcagcttggcctgaggcttgagggtggtggggtagttcagggaagctggacttgccaggtgggtgggctggtgggctcactgctctgccctccagtgacacgcgcagggggcccagatggtaggccttccggtggattttattggtcttgcacaatgttctaaaaatactgagcctacattttaaaattatgcgacttcacaggagaagcccagatttctggcttctcttgaaataactgggcccacagtcacacaatgcaatggtgacgtgtccccttcgggggctgcagcccttgacggtctttagccacactggtcatttgaactaggtccccgtagtgggttaaacagtttcttccccaatccatgtcttcccagaacctcagactctgaccttattgggaaatagagtctttgcagatttaactagttaagatgaggtcctgtaggattagggtgggccctaaatcaatgagtagtgtccttaccagaggagggattttcaggcacacagagatacgcccagagaaggccagatggagataaggcagagactggagtgaggtagctacaagccaagggctgcctggggctaccaggagctgggagaaaagcctggggtggtttatctctcagagcctggaagaaatggaccgtatcaacaccttgatttcagacttctggacttcaggaagctgaggcaggaggatcgcttgagcccaggagatcgaggccgcagtgagctatgagtgcaccaccgcactccagcctgtgtgacagtgcgatgccctttcttataaaataacaaatagataaacaaggactggcatcaggtgtccctgtttccaaaccccatcccttttcactgtttcttgaggctatcaacagacccacaaccagccaaatgcagagcaggaggcacattcgcccaggtgccctaaatatagcacttccagcccctccccttgagcagggtgaatgtgaagaaataaattccagttgccttaaaccacgcaggttgttgtggtttgttgcgattgcctgggaaacaccccactccccttcccttgttttctggcccaccctgtcagtattttgagtttggacctctgaatggcaggacttacctcactgcacccttcccgagtcctctgcctgtttggacacaggcctccactgcctggccagggaattctgctgactgtgggcttcttctgacccctccagccaggccagcaggacccaggggcagggggaggggctggaaatgcttttttttattattgttgttgttttttgagacggagtcttgcaccgttgcctgggctggagtgcagtggcacaatctcggctcactgcaacctctgcctcccaggttcaagcgattctcctgcctcagcctcctgagtagctgggattattgtattagtagagacggggtttcaccatgttggtcaggctagtctcgaactcctgacctcatgatctgcccacctcggcctcctaaagtgctgggattataggcgtgagccaccgcacctggctttttttttttttttttttttttttgagacggagtcttgcactgtggtccaggctagagtgcagtggtgtgatctcagctcactgcagcctccatctcccaggttcaagcgattctcctgcctcagtctcctgagtagctgggattacagtcacccgccaccagacccaactaattttttgtatttttagtagagacggggtttcactatgttagccaggctggtctcgaatgcctgaccttgtgatccactcgccttggcctcccaaagtggtgagattacaggcatgagccaccgcgccctgccaggaactgctatatttagggcacccgggtgaatgtgcatcctgctctgcatttggctggttgtgggtctgttgatagcttcaggagagaaacagtgaagagggatggggtttggaaatgggtacacctgatgtcagtccttatttatttattattttataagagacagggcgtcgcactgtcacacaggctggagtgcggtggtgcgctcatagcttactgcggcctcgatctcctgggctcaagtgatcctcctgcctcagcttcctgcgtagctgggactacaggtgcatgacaccacacctggataagttttaaagtttttggtagagatggggtctcactatgttgctcaggctggttgtctcaagctcttggcttaggcattccttctgccttagactcccaaagtgctgggattacgggcgtgagtcacggcgcctggcccaccgtcagtccttggccgggccctgcagcaggtgccgccgttcctactcccctgttctctggcttgcttccagagactttcctttctcctcaggaggccacaagtatttgtctagaacagtgcttccccaccttgcctgtgtcggcataacctgtggcatcaatgcaccagcgtgcccaggctgcacctcaggtactggatcagaataaggacaattttgctaaattctgcaggtgattctgctggaatctgggctgagaaccaccagtcgatgaggcaggatcttgggatcttggtgtgggtcccccagaaacagatgctcagaataggattctgcaagtggtttatttggatggtgaccccaggaacattgaccggggagtggaatgagacaggagggaagggagtgaacacaggggcatcacagggctggctacaccacgggtgactggagctcaaacttgctgggaacctggggagccacggggtaacacgccgcggagtatcccccttaggaagagggagtgggggtgtctatccactgcttgagggctgctgccagggtgttgatcctttgtccagggtcctttcttcttgcccttttgtgttctagcatattcccacagccattaaaaaaaagtcctcaggcagagagttgaaggtgttctcagtcatctgcctcttagcttgcagaggtgactgcagtgggaaccaggactgggcacaaacagcatctgttcctgacggacagtaacaaccatcagaaccaccatgcttgaaaggctcaggaggtcctggcaacgggctacttacctgcattaagcggctcaatcctcagaacagctctatgaagcaggttataaggagccccacttatagttgaggaaactgaggcatgaagaggttatacccaagactgcatgatgtgggattcacagtttttctcctaatgcctacagcacagtggagagcaagcaggactgtttacactgaactttactgcagacaagaggccaaaaaaaggggacagacttcaaaagggacaggcagctggacaatctggcttgcaaaatgccactggctggcccagcatagtggctcatgcctgtaataccagcactttgggaggccgaggcaagcggrtcacttgaggtcaggagtttgagagcagcctggccaacatggcgaaacctgtctctactaaaaatacaaaaattttgcatttttataggcatttattacaggtatcgtggcacgtgcctgtaatcccagctactcaagaggctgaggcagaagaatctcttgaacccaaaaggcggagtttgcagtgagccgagattgcgccactgtactccagcctgggaaacagagcgagactccatctcaaaaaaaaaaaaaaaaaaaaaaaaaagtcactggctgtcctctgcttgcttccctccctggcccaagccagccgtcaaatggcagagaggctttcccgctccaacttcaaagtccagatctaagggtgtgtggcccaggggaagaggggagtaccttcccctaccttctaaattctggcttctgtggagggtaggccacctccccagatgacccacaccagaggtggccatgccttctagggaaccccatctccaccactgaggaagaggcttcccctttggcctaaaatggcaaccagatataaatgccaccccctaagcctactcaatcagaagaacccccaatcagaagagagacacctaatcagaaggaccatttcattccttagtgtagatatggcttattgccaggatttgtggcagatgtaggcacccaggcatgagatgtgatttacaggcctggcagagacctctgccctccaacatctccttagccagcctgccacgatgcccaaatttccggccaccattcatcactcttctgcacaaaggcacggtcagcatgtccttgttcaatgcaaatttgttacctagcctgtgtaacacattatatctgctaacaccaatttatcacccattttcacattagcagagagcaaggcagtgagataatggaactcagcaccggtaaattttgatgaagaaggagcagcaaagcagagagcgtgagtcatggccagtgagtaatggcccaggaagggggccgggaggtgggcagggcaggcagcaaggggcctgggtatgggggattggaggggaccaggcccagctggaggaaaataaagtctcctcctcgcataagccaggctgcagcatcgtggcctgagctgggaagaccctcagagtcatttgacacatgactgaggctttgggcacttcccagggtggggtggtcagatatgacctcgggaagtgcttttgaagccggagagctttcttcaggctggctctgcgagctcccaggagtctctgtctctgcaactgcaaacacatctccagagccaggaagtacgaggagggggaggggaggacgcctagatgctaagagacgacatgagatcctacatgctttagggttgcaagggaccttggtgagcttctggtcactatcatttcataatggagactctgagacgtgcacacttgatcgcccactggctagtggaggatctggggctacaactcagtacgcccctgcgcctggctctgtgagcgggccccagcaccacaggccgagtttatactcagatcagtaagcaaagaggagccacgggagtttctgaccagggaggggcagaagataggcatgtgttgccaagcgaaatcgtgggaagcggctgatgaggaagcccacggaggcacctggcagaagagaagggtctccgctgggtgcgcatctcttctgtgctctgcgggagccaaagcagctttcggccctcggggctggtggcgccctgggaagctgcttggctcaggggaaggagcagggacccccgcccgcccgtcctcgaagctggtcctcggcgtcccagccccgcacggccccgggcagggcgcacagcggggctgcggccacgaggtggcgccggcgcgccttggaagcgcagctgcagctcccgggccgccccagcgccgctcggccgcctcctccgaggaacaatgcggcgcctccgggcgtagcgtcgcgcggggccggacgccggacaccagagcgcgggcggcggagccagcgggcgagagagcgcgcggcgggcgcgggttgccctcgtcgagagccatgggcgcggcgcggcgcggggctgaggatcggcgcggcccggaggcgctggggaccggggcgcgggcccggggccgcctttagccggcaccgagggcgcggggccggggatgagggcgcccgccgcggggagcccgtctgcgcgccgcggcaccttcccgcccagcgagcgagcccgagcaggcagacgcgcggccggcggtctgggggcgcgccgcctcccggtccccaaaatgtgaagcggggagggcggagacgcagagacggcccggccgggcgccctcgccgccctccggcagccgcgccgctccctccgctgcacgcccaggcctgagcagcgaggccaccgggccgcgcgctcccagcttcgctcggacgcggcttcggcccgcagagggttcgtggcccggacgcggcgagagctgggcccaggacggtgcgtccggcctcgcccgcggctgctcgcaccaacaagtttgaacaatgatcaccgtcaaccccgatgggaagataatggtcagaagatgcctggtcaccctgagaccctttcggtaaagttccctcctggttggttttttccccaggggggcgccgggtggaggtgggcgaggtcggttcctgcgaacgttcaagtcctggtggcagagggggcggttcacacttcaacccctggtgatgaccagtggggctgggctgggggaacggatggcgttggggttcggggtgcggatggggagggttgtgttattcggggacctgtcccgagttgggcagggttggagaggactcggggtgcagaggtaagaatgggggcagaaaacccccaggtcgtggtcctgggcccagaaagttgccccagcctgcgcgccccttcccagcccctcagggtccttcctcaccccgcggacggtcccatccgggtggcaaagttagtgtgcggcgccttggagctccccctccggtccctcccgtcccgcccgtctgcccctaggtcggctaccccccaacccctccgcctgtgccaccctctccccagcctttggtggcactgctctcctccccgcggggctcgggcctggctccgacgagagggtcccgagattagagcgaggactcgctcatcccaggattcgcccccgatcgcaggcgtcggagaggcgggggcaggggcggcgctgcagggctacggggcggctggagccgaggctgcggcggagcgtggtgggcgggcggtggcgaaggcgacacgcttcgggcggccaacacctgggggcccaggccaggcagggctggggccgcgcgggactcactggacccagccaggggcccccagggcccagcggtgccggggcagccccctctcctcccaggcatccgcggarccggcccgcagcggggtggggagggggcgctgcccagtggacgcccggcggggcccgagtgtcaccccgtgggtagctgggcagcgaggaagctgggggagtgaccgccccggcgcgggggccggactcgggacgtggccacaggtgggctccgggcgcgggaaggagcccgagaaggcggagcttgcaggggccctgaactcttgccctccaggtctcggcccagccccactgtggtccccctgccggctccagacggggatgggggcggggagacggtggctcacctggagcccgcctcccagcacaccgggcctgtctgctgggccgaggaggcaaccccaggggacggcaggggtcaggctggacctctgcggtccgggggtccgggaggcccggagagctggtgcaggccgtgggyggtgatgggggcgtcgggagcccatgggaagcagggcgggaagcaggcgtctctggaaagggccttgctcctccagggaaggccttgaatccctggcctgactgggaacgctggagggtcctcgccccytccgaccccatccctgtcccgccctccgggccgctgggtgtttcctggcgcgattggaagcagccgcgagaccccagcaccacggacagtgctcgcgacccagggctgcttccctgtctggtcctgccctggttttctttcaggcccttatctgaaggcaggattgggggtggaggtgcatgggtccccaaagttgtgtaacttcaccccagggtctccctgggctgcccggagacccgcagccatcagtgagtcccttcagttgaggtggggggcaggctgcaatcatagcaccccagcttattcatcctcaaaggcaggctggggtcctgttccctgtggttttcccagggctgctggcagggtctttattccataggtgcccctggaatgttgcttgagtggatacatggatggctgaagccattttaacttgaatccactccaaatggcccccagctgccttgggggacattgaaccccaggatggggttctggcagagggagatgcagatgaggtgtgttagggggcttcaggttctgggctgaagggggtagacacctttctcatagcagggttgttggatcctggcaggcagcccaggtccccagctctaaatacaactccttcactcccctggcctcttctccagggactagagacatgagtgggggaagtccgtccttgtcctcagactgggaggacaaatagctgatttcccctgggatctccctgagcatgggacagcacctctcctgtgccatggccgtggctgttgtctccagagccacctgacttcctctgagggaccccaagatctgagccccacccccaggcttggtggaattccgtgaggcgtccctctgcgctaaggaaagtgtcccttgcgcggtcttgcctactgaatcatgtctcctgtccttcctgctgggggtgtggtcttcgagtctctccttggagctcccaagcccctctctgctttggggttctcctcttctctgcccaaatctctaacagcttcctttaaatatgggctgggaattttgttgtgctttttatttccttctgcaattatatgttttctttaatggaccaaattttaattaaatactgctctgccagtttcaaataatgaagattaaaatgcataaagcaagtcttgcataaagacacaaacaagcatggaacttgagggcggggagtggaggggcaaggcccggaggtctctggcatgacgtggggctctctccagggagcctgactccacacaagatggggttcctcaccctgatctggggttggtgggagggcgcccctctcagctctaccagttcatcaagtcctctgataggttcaagttcccagaagagccccaaggctgtgctggtgagctcagcttgcctgtttggggcctaggattgatgagggaagcagcaggaccctgggtctggacttgaggaaggaagggttctgtgccttgttccctgctgtccccctggggttaccccagagcctggctcctgctggataatcaataactacrtgttgaaggcaggaacaggagtcctgttctgaccagccctccctcccacccagtgtgacagcacacacacctatatgacaccccttgcacaggtatgaggacaccctggccagtccgtggtgcaggctgatgaccctgggcgtgcctgcctaggggagatgtgtgttggggggagcctgggcatgggccgtgtggctctgccctggacatcttaccatctagtggtggaagtggaggggggtgttcaaacaagctcatgactgctgcagcaaggcctctgcacactgcaccaaggctggcctgagtgattgatggggtctggctggcctcaggccctgctgtgtccatcactggttctcaaactttagcatgcagtggaatcttcaggagactttgctaaaacagcttgcttgctccaccccagagtatctgattcagtaatttggggtctgggcccggcattggcatttctaaggagtctcaggtgatgctgactgctcgtctggggactgcactttcaggactgcagctgttaatgaaccagctctgcctggaggctagagcccgcctgcctcatgcctaagtgtgcgtcattctgccttgtggtttctcgtgtggctcgaggccagcatcttgtagttgagctctctttatcctatagtgggggggccctcctgggtctggagctcagcccccatcctttcattctcccttgcttccttcactcatgcrctcattcgtaaaacatttgtgcagccggtacgtggtggagcgtcagggcacgatggcccttcctgccctcctgacccgcctccttcctctccgcaggctttttgtcctgggcatcggcttcttcactctctgcttcctgatgacgtctctgggaggccagttctcggcccggcgcctgggggactcgccattcaccatccgcacagaaggtaccttggtggggcaaggggagtgtgagaygagtgagggcgtttgtgggtcaaagaggaagtgcctctgagcctagccctgtacctggctttctggccgccctgtaggtggatgtgagtggagggggcctgggcttgggccgtatgaccctccatgcactttggctctggtctggctgtggtcatcaggtttcctctggcctggattctcaggccaggctagggcctttaagccagggtcttccaggcctcagaagaggctgccagtgttgcttctttagttgggtgtcaggggtgagaggtctctggatatgacacttgtctccttgaggcacacatttccytgcctttggcccaggctgtggccatgtgggaacgggcctggccatgggcttaaatgtcttatctctgagctcttgggacacagctccctcccaggccccatcactccttgcccacacgatatttgcaaggcagtggaatggagatcagagcatgggctttgggcgtctggtgggtctgggcttgcatccttgtcatcacctaccagctgtgtgcctttggctgagtcacctggcttccctacagagaaggacagcagtgacyttctgcagaggttggattgaaggggctcacacgtggacattacccagcatggttggtgccacatggcacaagagtgaccagctgggagccctcctcctgaagctgggcccagccccacctcatctcacctaaggaggggtgggggtcagaactgagccctgctcactgtatcatgggggttcttttggtcactggtcaaaaggagggacatggggtagtggggaaactgaggcaagtaggtttctggaactgttcgagggttggctctgtgagattcccctgcccctctggggaagtctctccttgaagtccaccttcttgaacttgcagggcttggctttctggctcccctgttctgagtgatgaatattgtagacatcccaagttaaataggttgtcatctgggtgggtgctgaggggctcttattatgccatctgtcatctcatcattagattcattcctctggtttcacatgcacttctttaaacttgcaaaagccctcagaaggaatctcacgcttattagtcattcaagcctgagtgtaagttaatttatcccgtctctgacttgcagagattcctcaatctctgagcctccaaattttcctctggtaaatggggatggtaatacccacttcccaggctcgttgcgaggctgtgcaaagataaagcaagggaaggggcctcagcagcatctgtcaaacggcgagcactccatcaatacttaatggatgtgtcgagtctgaaatgggggcactgcagcaaagcgtgtttatgaaagaggaccaaggaggtgctggagtgtctgtgtgggagaggctgaggattgaggtgggtggggatgggagggagcagtcgtgaaggtgaaccggaagggtggcttggggaagggctggtgggaaaagtggtgcatgggaagatggggtgtagacagagattcataaactacctggctgccacccctggaaaggaggtgtgcctatctgggtgggctgctacagaggccttgaggaagttgaacctccagaaaggtcaggggtctaagaggtgggaattagggatgggggagaggaggggtttttggccgggctctggtttttatgcctatctccctaagggggttagagagtcaaggtaactcacctmccccatggctcttgccccatctgggcaggatcagactcagtgccccagagtgcaaggggtgtaggagccctgctgtgctcsgtgctatgcagttttgcctgggtatgggggtgggggtccaaccccagctgcaggtctgggtctaaagatggatggaaccacataggagagcacttgcccaaggtcatacaattggactagaggtgtgtgtgcattcgtgtgtacatgtgcatgtgtgtgcatgtgtgtgtgcrtgtacgtggtcttaaactttttaatggggtatcatatacacaaatgaacaatccatgcaactaacaacccagagcaaggaccagaacgtgatcagtccccaagtgtccccatgccacttcacagtcattactcacccaaggatagtcacgacttgacttctgatcacatagaagagttctgcctgttttttggactttgtgagcatggaatcgtttcaggagttgatatggtttggctgtatccccacccaaatctcatcttgaatcgtagttcccataatctccacctcttgtgggatagaccctgtgggaggtaattgattcatgggggtggtttaccttggtgctgttcttgtgatggtcagtgagttcccacaagatctgatggttttataaggggctttttcccttttgctcggtacttccccttcctgctgccatgtgaagaaggacatgtttgcttccccttccaccatgattgtaagtttcctgaggcctccccagccatgctggactctgagtcaattcaacctttttcatctataaattacccagtctcaggtatgtctttagtagcaacgttgagaatgaactaatagaggagtagtcttttgtgtgtgtcttttctctcagtagtacatgtgtgagactcactatcttgtatgyggttgtagtcacttgcactttttttttttttttttttttttttgctgkgtagccttccattgtgtgagtacaccaccatatttttatccatccgaccattggtgggcatttggtcgtttccagttttgggcttttgcgaacagtgctgctatgaatatttcagtgcacgtcttttggtaaacatacgtaggcatttctgttgggtatacctaggagtggagattctacgtgttgtaacattagttctcagaccaagtttatccaagccagtcttttcacatttcccaggcctcasaagctgagtgcctggaatacagaactgaagtccgggagaaggaggagacagacaagaaaagggccgctgagaacccaggagagctgaccctgattcactttagatcccgactcgcattgtcctccatgatttctttcatacccttggatcaagctaatctgcttgggcagacccaaggcagggactcaggccgggaaagcagtgtgcaatgtgggtttaacatcctgatcctgcaagagaagcccctcaaactacatccccacgcagtgcctggggcagccctgcagaaaacctaggaggtaccagcatttccacttaggagatgcctgagggaaggattagggcttcacggggaggtgcttggcaaattgcttggctgaatcaggcctggggagggatcttggaagtcctgggccaaggttggattgttggataatgcacgttttgttacccaaaagaaatctgcggagtctagacaaccccagagcagaatcaggagaaggaaaccctctaaggccctgctatttagaaaaaaaaaaaaaaaattgcattggtcaacaaaacaatctgtgtacaaatgggaaaaacaatctctcctcccctgtcaaaccggtgacagaagtggggtcccacatggactgtggctgcgaagggagagggaggagaaggcttttctcgaaaagaagaggagggcgtcattcagcctcttgtggactgtggtctatgtgtggggcctccaaattctcctctgtgcctgtttatacttcatgataaactgcgtactttggggatgaaatgtgactgacatctcattctgtattctgcacactcatcttaaagattcaagagaggaggctgcatggggaatcatgacccggaggagatctgacttctttccctcttgctgcatttgggctgggcctgggctctggggagggctttccggcattgccccctcccaggcagctctgccccacttcccaccccaggtcctcctcctgtttcctgcccttccagcccttctcgcctaggcctccttccccatgtggctgcagatagtgctgtgaggctgtttcctgccctctgacttgtcttgaagaagcagtggtaggaggctgggtgtggtggctcacgcctgtaatcccaacactttgggaggctgaggcaggtggatcacctgaggtcaggagttcgagaccagcctggccagcgtggtgaaaccccatctctactaaaaatacaaaaattagcagggtgtggtggcacgtgctgtcatctcagctcctcgggaggctgaggcaggagaattgcttgaaccagggaggaggaggttgcagtgaactgagattgmgccactgcactccagcctgggtgacagagcaagactctgtctcggcttaaaaaaaaaaaaaaaaaaaaaagtagtggtaggaggctatcttttgggaggggtctgtaggctgaaggtccatggcacagctgcatgtgtctactgggccctgccagacctcccaggcctccaccagggattgaacctggggaaggctacctggctmtgtggatggctctggctctggctctggcccttggtactaaggggccctggggctcttctctcaggcttgatggatgggggaccggggcccggaggtctgaggaagagcctggtgtggcctcccacggcctgtccttgtcttctctgctgcccggagcccagagctcccgtggcctcagctggtttctgcggtgagcgagtacagagagataaatgtgcgcatttctccagctgcacgaacacccagtcacagttcccttctcagtgccagggaggtctctgctttctggagagatgggggctcattcaatttccaatggtaaagggtggggatggggacaagaaaagggggacgaaggaggatgagagagacagagagagacgaagagcgtctggggaggagacggggcctcggtgggtaataaacacatcccgtctgtaaatgagaggatctatttgtatctcccagcgtcccagctttcyttatttatatggaaatatggagggaacgtgtgcctgttctgagttgtatcactggggcctcacattagatatatttcaatttagctgatgccaagagtggtgaagtgactctggggaagcgatgtcagcttgctctgctgacagtcccggggccagtggtggcttttaggggagtgggtcactgggggagagtcggcytgacctgcttccctcctgggtacccaccccctgcytagtctttgggcatttccagagcacaaaatgtgcctggtaccccgagggctcattgggaaggggtaggggctgtctccccaggtctcaggggtttctggagttccatgccatctgcagaagatgggagcagctcctgagcccctggcacggggggacttggtccagtctgatggggtggggcttgaagaactacagaaggggcatctggttccgcaggcatggtcatcgtgaaacccaggctgcaatgacccatgcctctgtatgtcctcagggtttttgtttgtttgtttgagagagggtctcgctctgttgcccaggctggagtgcagtggtgcartcgtggctcactgcagcctcaatctcatgggctccagcaatcctcccacctcagccctgaaagtagctgggattacaggcacatgccaccatgcccagctaatttttgtattttttattgaaaaggggttttgccatgttgcccaggctggtcttgaactcccgagctcaaccaatscatccaccttggcctccccaagtgctgagattatgggcatgagccactgcacctggcctgctgccagtttttataggagcgtttctttcttttcccatttctctaatctccggaggcaattaggggaagacacagaaacagaagtcagggcgatagagactcagagctcartgagcccagccccctcattttacatgagggtaaattgaggccaagagaaggacggtgacctgctcacctgtctggtccgcagcagagcgggcctggagtccaggcttctgccccatcccccttgacygggcccatgccaccatgctgctgctgcagcctccactttgttgactttcrggggcctctgcagctctaggccagmcctcatagtttttggcccatcatctgtttttcagcctgctcaatgggactgggagcgtggggtgtgggtagggagctgtgaccgtgaggtttctgggagggggctcaggcgataggcaggggcagaggaagcttggggtgggcttggagagtgggaccrgtagtgcagcaggcagggtgccaggcctaaggcgctccagggaacacagcgtcaccccaaaagccacgctgtgggctcagcaccactggggtgctgcgtctgcaggaacgagctgctgaccaggctctgtggtcagtcaggcctgagtgctctggccacggcaccgctatggtgtcccagctgtgagacaccttatgggatgaaacattccttttttcatctcagtcctttggggaagggactactccagcccgagctatgagcgacagcccaccagggctgcccagtgaggccasgcaggctgtgcgctgcacgactccacgacagacaccctttaggcggccacaataccagtggtgtcctgtggagttgtagaaagcagtggccaggcaggtcatctgatgtcctccagtttttttagctgaaatgatggaaatctcttcatctactctgtgctacaagcactggttgcaagctcggtattgaatttggatgatgggcttgggcagacatctctgaaacgagagtgatctgaaaaagtaaaccgttgcccccgcctctgggaagctgaaagagagagggagctatctatatcctgttttctcccactcctttggagaaggactactccagcccaagttatgagcgatggctcaccagggctgcccagattaaccgattgagtgtgtgagtgcgtggggagggcctgagaggctggagagacctgagttagtgtcatytaacgctagtatgaaatttcccggtcccagctgagtttttgaaaatccactctgttttccgtagagggacttgtggggaggtcctttgctgcttcagctcttggggtggggaggaaatatgcccattttctccaatacccgaccccctccgtgagccttcctgggcatctctgcctctctctcctccttttcttctgcccgccacatcccccctgctcccattcatgcctgttcttcagagccaggagccctgtgtctttaaggaaatcgcagcttctcctgttttgcagccctagcctggccggcatttccaaggtgtgtgagtggtcccgccccagctcctgtggcctcccttctgacctcaggcgggttcacctggcaggggagcccagccagggggtgacttatatcagggtgggaacgtggcagcagtggctgggccagccagagccagggaagaagggcagaaccaaagcagaggtgtgagagcagccccggtgatgcagaagccgctggctgcccctgctccgcccactgcctctagctccctctctcctytccctgttctgcctcttctcagtggcctctctcgtcaccttcctggtcctgtggtctgcagacggggcctgttattcttgccttgagacggggatgctgaagctcagagccattcaatgactgccctggtcacacaggggtcagcgggcagaggccccagtccccttgcccctccccaggtggggagactgcagtgtgttctacayggtctcagggctccccagcagggctaaggttgggcgcccgggtggtaatattctcggcagtgcagctttccacagcttccccgtctctcttcctcactctcctgctggggtttccattagctcccggttaaactactcaccctcaaacccttgtcccaggctctgcttctggggagcccaacccacggcatcctccattgggcccctggactggcagcctgggagcatcgaaggttcatgttcccaggtgacttggctcgttttgggggagtgatttcaagcctgatccataggggtttgggaggagctgagttgcggattttagtgcctggagcccagcaccctatggactgtgtggaggggcaatgtgaagccttcagatttaattaaaaaggaaggcgagaactcgctcccgcacactggcacrtgcagcgctaatgatcgggaatgattagaaaggaagccgtggaggaytgcaggctggctgatgggatcttggtcgaagtgcctcattttcatktaattttcttcttcataaggtctcccctccccaggctgggagcagagggaagagcagccgcctcagccccagggaacctgcccttgtcagttgatctttggaaatccaaagaccagctygagattcagaacacatgcattatggtttccaacaggagggtccagggaagagggatggggaagagatggagttagggcccagaggccgggcaggagaaggagggctggggaagcaacagggccctgrggccctgaacacaggctcccaacttccctgcatgtccggatccatggggagcaaggaaagtgcagattcccgggccccgggtcctagagagttgaatgggcaaatctagaccaaggcccagaaatctgaattttaacagcctggccagaagattcagatgctgctgggtgattggccacacttctaggaaccctgatctagaagtcctgcctggagcttaccgtytgggggctctggggcttctttcccagtgctgggccttttctgccatctcacggacatgagggttgttgggccccagagcacctcaaaggttacatctaaagttcctttttatggttgacaaaattgaggcccagagggcttaggaaatgatcccaatgtcacatggctagtgggcaacggggctgcccakggctctgcactccgccacgatgctgttctctgcaccrcaaagcaatgcagcaaargggtcagcagtgcctgggaagatggagctgaggctggggtctggtgttggttggtgctgggggactttggggccagctttgtctgagctgccccagctcggacaccaggtggcctccaggctgctcgggcctcccctaaccatacccacactctgcccacagtgatggggggccccgagtcccgcggcrtcctgcgcaagatgagcgacctgctggagctgatggtgaagcgcatggacgcactggccaggctggagaacagcagtgagctgcaccgggccggcggcgacctgcactttcccgcagacaggtgaggggacgtggggaggaggcacacggagcaggggagyggtggcacctgccactccatccggggtgctgtccgtcatctccttttgtgaatctggagaagatttggaccacactgtggtacagcccagagtgcatttctaccacccaaatttaacaaccgttaacatttggtcacatttgtggcctgttttcctctttaaataaaacgtcacagatgaaaactaaarggccttttaatgacttctccctagagacaagtgcctccctgaatttgctgtaagtttttccagtccattccragcacatttgcacatatgtttaacacacacacattataaattcatagtgtgtgattttaacaaattccatgtaagtggyatctcacagcacatattccactgcccctttttttttttttttttttkgacacagagcctggttgactctgtcacccaggctggagtgcartggcacagtctcagctcactgcaacctctgtctccygggttcaagcgatcctcccaccccagcctcctgagtagctgggactacaggcgcccaccaccacacctcggtaatttttgtgtttttagaagagacagggttttactatgttggccaggctagtctcaaactgctgacctcatgatccacccgtttggccttccaaagtgctgggattacatctttgccttttaaattaaaaaaaaaatttttttttgagacactcttactctgggctggagtgaagtggcacgatcttggctcactgcaacctctgcctcccaggttcaagtgattctcgtgcctcagcctcctgagtrgctgggattayaggagagcaccaccacgccagttaatttttctgttctttttagtagagatggggtttcaccatgttggccaggctggtctcgaactcctgacctcaggtgatccaaccgtctcagccacccaaagtgctgggattacaggcatgagccaccccgccttttttaaaaaaatcttttcatgatgattttgaactctgtgttgaggggcatgtgtggatactatgtacccctggccatttttgccaagtagaactttctggtttrtttcttctaaatattctcctgcttcggccaggatgtctgagagcccagagtctgtgctgctatcctacaagccccagggacacatgaggtgtgacatccaaatcatgtgtcctaggtatataaggcatctcctggacctcagagaacaggagtgsgggaggtcaggctgtcccarctggcccctagaggtggatgtggaaggaggggctttgaccccaccctattccagggagaygagctccactttccctcttttatatattggggttctttgtgaaattgatttgctaaatgtattctagctgctaaaaattaagcttgaaacgcacttttagacaatttgcagaaaagctatttctcagccagcgtgtgtgatggaaaagccaaagctctaggcatttctaaagtacggagttgggtgaaacagaagaaaatgatgacccacaggaggtcactgtgcccgtgggagggttggagggaygcctgcctgagtcaggcctgaaacacagtgcgcccatgtggactggtgtgggatccgttgccatgtagcctgctggtgctgggctgctggccatggggccaacctctaactggccttgccgattgagtgaacgtcctggatgcctggtaggccagcctggtgtgagcatcattaccctcatattagctgacatttactcaaaacacactaagcacctggcatggttcttactgcataagcttaagataggtaagataagatagatcttacctacctcacaaccatcttatggtttaatctttaaagatttaattaaatctttactctcccagaggaggaagctttaatctcccagaggaagaaactgaggcacagagaagttcagaaactcacccaaagttgcacagctgtaagaggctggacttggctttgggttcaggctaactggctccacagcccacatttctaagcactgtgctcttgatgattgattcaatatgtggttatatgtggtttggtttttgtccctttctaagaggttttatttatttatttatttatttwtttgagatggaggcttgctctgttgcccaggctggagaccagcagtggcacggtctcgggtcactgcaacctccgcctcctgggttcragcaattcttctgcctcagcctcctgagtagctgggattacaggtgtgtgtgccaccatgcccagctaatttttttttttttttttttgagacaaagtctygcactgttgcccaggctggagtgcagtggcatgatctcggctcactgcaagctctgcctcccgggttcaagcgattctcctgcctcagtctcctgagtagctgggattacaggcacatgccaccacacccagctaatttttgtatctttagtagagacggggtttcaccatgttggccaggatggtcttgatctcttgacctcgtgatccacctgcctcggcttcccaaagtgctgggattataggtgtgagccactgcgcccggcctaagttttgtatttttagtagagactgggttttgccctgttgcctaggttggtctcgaactcctgacctcaggtgatccgcccatctcggcctcccaaagtgctgggattataggtgtgagccactgtgcctgggctactggatttattttttaaaaagatcattctgactgctgtgtgaaaactggataaacagggtggcaggaggggaagcagtgaggccgtggtggagatggggagtgcctgcaaagggatctgagcttccttggaaatccccctgaggcatgaggccgttttcctctctgtgtgcatggatccttcttctctgacactgtctgtgtgccctcggatccagcccctgccccccagctccatctttctccctcagatccagtcctttgcccctctttcattcttttctgctttcctgtctgcctccagcggtgcctctgatgcagcctctgtccgcaggcctgttccccaggtcaggagcaggcctttttggtctctgttgaggatattgctgcaggcagcagagctgarggtccagtggacccctggactccaggtctgccttcttgggctgggggtggtactgctggcgcatccagtgtttctctgatttttttccggtcctggcctgtgcctccctcccctgccctgccctttgtctcctcctggggaaggagggaacttgtagggggagggggaatatgcgccacctcccagctccctcctgggaaatagcaaccatccatcacgaccggcagagcccatcacacccacaggcagagccatcaatttcagggacactgtggttgctggtttcagggagagaaatggtgggtgtgtcccgggcctgtgaaagccgcctgctcacacgctcccgtgcacaaacactgctgccccctccgcaccctgaacctgactccaggttaaccaacctgcagctagaccggcaagaatcctgcaggagtgcctgctgctgcatttccagaaaactctcaggtgcctgcacttggattccccacttagaaatttcctgtggcttaaaaaaaacacgtcccctgttcttcctcagcccttttggaagcttctgggctgccgccttccactcatggctggtgtttcctcagggaaagtaaatttgcaattttagcctaggaaaacataattagagaggcagatttgcttcaaatggcatcgtattatgtatcctcaagccaaatagtaatgatctttgaattttccataaggccataaaaccaccgaaatttgaggctgtctggattgaagaggtcagtccgtatttgttgaatgcctagtgtgtgcagagtctgggctggaggtttgagagcaggtggaggggacacaaaaaagatggaattccactgcatgcccggtgcccagcctggccrgtggcccctcagagtggggcagacctgggcggccttgggctctgcgagcctcaggttcttcacgtgtgtgttagagatgatgctgatgggaggcctgggccctgtgcttggcgctcagaagaatagtttgtctcctttcctttccttgtaccgtgagggtccagagaagggggtgacccaaccactctttgggaggcttagaatcaccaagtccccatggcacaggggagtttgggatagccttgaaggagagacattttgactggggagacagccagcactctggacagcgggaaggagcagatggctgaggtggctgagcccgagggaggtggaccagggaggaggggccacctgggagcactgtggccggaggacctggtgagtgaggggcagtggtgggcttgaaccctgaactttgatggctctaaagaccaccttcaggctgggtgtggtggctcacagctgtaatcccagcactttgagaggccgaggtggtcggatcacttgaggtcaggagttcgagaccagcctggccaacatgatgaaaccccgtctctactaaaagtacaaaaattagccaggcgtggtggcacatgcctgtagtctcagctacttgggaggctaaggcaggagaatcgcttgaagctgagaggcggaggctgcactgagctgagatcgcaccattgcactccagcctgggtgacagagtgagagtctgtctcacaaaacaaaaaacaaaaaacaaaaacaaaaaaacaccgttgtcctctagactccccagtttatgtcttaagctggcgctgtagccctggatgctgctgctctcagaataggcacctgctgacccacctgggtgtcctgggaacactcagacgtggggtctcctggttgcactcaggatccccttctctcccagcccccatctcaggctgtatcagtgccattattgccatggctcggaccccaaccttgcagtcacccctggctcttctctctcatacacttgccccrtccctcagcaaattctcccaccttcagaahacgccttagaagcccacctcttctcaccccactgactgaccccaaccagctattccaactcagcagccgctagggtctttctttccctccctccctcccttccttcctccctccctccctcccttcctccctccctccctccctcccttcctctctccctccctccctccctccctyccttccttcctttcttttttcttttctttttttttttttaacagaatcttgctctgtcacccaggctggagtgcagtggtatgatctagactcactgcaccctccgcctccagggttcaagcaattctcccgcctcagcctcccaagtacctgggattacaggcgtgcaccaccatgcccggctaattttttttgtatttttagtagagatggggtttcgccatattgcccaggctggtctcgaactcctgacctcatgtgatctgcccgccttggcctcccaaagtgctgggattgcaggtgttagccaccgtgtctggcccagtggggtctttctaagtcatcaataagtgtccaggtccctcctctactccccgctccctcatggccccccagctcactcgagtaagagcccaggtccttccattggccccaccatgcctggccccatgtccctctggctcctcctgctggttctgccactgtccctggagcacagtgatctcagaatttgcttccccgggcaggtggtaatgacaccacacacagcccaaccccagctctgctccttttaacagggggagtgcatgtgtgcacgggtgtatttatgtatttatttttttgtttggaagagaggagtcctctctgctctcacttggggagggggcctccccagcatcagggtggggagctctggatgggccaaggaggagctgaagcagaagagagcagtgcgaatgcaagccaggctggatgctggggtgggggctccatgtcccgtgtggtgtgtgtgaaagagacagaggcggacgcagagacatggcgacagagaggatccgtctcccctgctccggcgctcatgtttccagccgtgtgcactcaggtctcccggtatgcgtgtctgtaggcacctgtgtacgtgagtctctgtgttttaaaagaaaagtgatcagtttcataacaaaataacagccccagcaagcaccctagccagcggcggggagatcaatatccccgttaattgaatgcaactctcgtaaatcaggagagggagtcagaattaaatctctttcctgaggtggcctggagagctcgttctcaggggaagcagactggaccagaatcagtgattacctcgtggggcagggaggaaggggctgagcctcaggggcctctttgagggaccagcctgaagggagttgaggattggggcctgcgaggaagtagtgacctgccactggccacctgcggaaccagagttccccactggagggccgcgttggtggtatagtggtgagcatagctgccttccagagttccccgctggccccggcccatcaccctaggcctcaggtggtggagggaacagagcatctgggtccggcctgtggcctgcagtgttggctactctttgktcccttgggacagtgccyggaggctggctgcacgagggtcggccttgggaagaggggtgggcggtgatcagaggcctcgcttggcattcttttactttccgagtragaaacgatggttttggtagaatgcctggggcttagtatrtgtgcagaaaatatactcaggcccaggtctcccatgccaggtacaccgagctgttttgcagatgcagtgagaagatgcagggctggcgcaggggcagtgtcagycctgggagctcgccgtgtgaccttgggaaagccactatatctgccagacatcctgggaccttgggacccaggcaggctcttgaggtcacagtgcccatgggaggtgactgagcccacgggaggtcactgtgatgggtttgggcccaccaaggggtggctccagcaggcagggagggaagagctctcagggaacacacctgataacctgggaagtcactgtcccctctccccatccctgcccagagctgtctgcaaagccctctggtctcagaagctgtctcgggccaccgtgggtaccttcactgggagagaggcgtgtggttggcaggtcaggggcctctttcagccagtgccaccccagggcagccrtcggcccccaggggcatgttctggattccaacagactttgctgcagagctggctgaagtaataattattaatcatcataataattaatgatgataataatcaatgacaatagcaaataataataacagccaccctctattgggcaccaagctcactagagcttggtgaggaggatcccatccaggtctgatccaggcctgcactgttgtcacagccccacggtgccgagagccggaccarccacatgacagccacgtttattggggatggggtgtgaaaaagtcccaagttcccagtgcagtccctgccgggctgggagggaggtgggacccttcaggctgcaagtatgtcctgttggccctgagggcttcctgatcatgacgaatgtccccagcttttctgttgaaggcagggcgggaccagagaccttcactcccctactgttggccatgccgtgggtggtctcctggcctggcttgggaataacstgtcactacaggatcatgtgccatggcctgggccagactcactgccaccaagaacccaggccccacagagtcctgggtctgaagagggacagtgagtggtrgatctcagggtcaccccctcagaaggggctgcagtcctgtcctcggtccctctgagccattgaaacctcgggtggagcaatttcggggtcgggagactcactgctttctgatgtggtccattctgctgttgggcaggtctaactgggacttcatccagaagggggtgagacctcactttgactgaatgtccattacgagtagtgataataataaaatcattaaaactaggtatgtgtgctaggtacatctaagtataggtatacctgtaactacctataggtctcttaggagttcaggctgcaatagcaaagttccatagcctcgggggctcatagacaacagacatttctttctttctttttttgagacagggtctccctctgttgcccagactggagtgcagtggcacaatcacagctccctgcagcctctgcctctcaggctcaaacagtcctcctgccctagcctcctgagtagctcagcctgcaggtgcatgccaccatccctggctaatttttatatttttgtagagatagggtttcactatgttgcccaggctggtcttgaactcctgagctcaagcaattgggccayctcagcctcccagagtacttggattacaggtgtgagtcaccgtgcccggcctcaagcattcatttctcacagttttggaggctggaggtctgagaccagggtgccagcatggtcagctttgggggaggatcctcttttgggttatagatgatcagcttcttgctgtgtcttcacacrgtgggaagaggctgagagagctctctgggggccttttttttttttttttttttggagactgattctcccaccgtcacccaggctggagtgcagtggcacaatctcggctcactgcaacctctgcctctcaggttcaagcaattctcctgcctcagcctcctgagtagctgggattacaggtgcacaccaccacacccagctaatttttgtatttttggtagagatggggtttcaccatgttggacaggctggtctcaaactcctgacctcagatgatccacctgccttggcctctcaaactgctgggattacaggtgtgcaccactgtgcccagtcaggggcctcttataagggcactaatgccattcatgagggctccaccctcatgacctaatcccccttcaaaggcctcacctcctaataccatcacattgagggttaggatttctttctttcttttttgtttctggagacggggtctccctctgtcaaccagtctggagtgtagtggtacaatctcggctcactacaacctccgccttctgggttcaagcgattctcctgcctgagcctcctgagtagctgggactacaggcatctgccaccacacccagctaatattttgtattttagtagagtcagggtttcaccatgttgcccagggtggtctcaaactcctgagctcaggcgatctgcccgcctcggcctcccagagtggtgggattacaggcgtgagccactgcgcccggccctgggggttaggatygcaatatacaaattttgtggggacacagacatggttcatagcagcaggcaagacaagtgccttctattgcttactccttcacgcagccctccaagggttgcctcctttgacagacaagggagctgaggctcagagaggcttgtgggtctaggacatgcagcacggggccagcctggtggcttggtggctccaaagttctcggtgcttcgaacacagggttgttcctcttccaagccctccgtgaccctaacaggccttgaggagggcagggggcttcctggagtgtgtcccctgaccccactgaataagaaaaagccagcacagtgaggctggtrtggtatcagggccaggaggtaggaagtctctttttgagacagggtctyactctgttgcccaacctggagtgcagtggctcgatcacggctcactgaagatctcaaccttctgggctcaagcaatcctcccacctcagcctccagagtagctgggaccacaggcatgtgccaccacacctggctaatttctgtatttttaggggagatggggtttcaccatgttggccaggctggtctcgaacacctgacctcaggtgatccgcccgccccggcctcccaaagtgttgggattacgggcgtgagccaccacgctcggccaggtaggaagtctttagaaggaagctccaggactgtgctgggccagtgacctctgccccgcaatgaagccccaagtgccaggcaagaaggaaactggcagagcctgtgtggagaggagaaggcgacctcaggctggtcctggggctccagatgcagggcactggcacagaacatttgggatccccaaggccaccctgaggtccagtgatttgctaggaggactcagaactcagcacagccatgatcctcrcagtgacagcttattcctgtgaaaggatatggatgaaaatcagccaaggggagcggcgcacgggcggggcagagccctggagacccgcatggagcactggtgttcctctcccagtgaagctgtgacagcgcctgctctcccagcaacgatatgggacaacacacatgygtgttgccagccttggtgcccagtgatgttatgggggctcagtctcagagacatgactgaccactcaggggctgacctcagtctctggcccttccagagatcaagctgaggtggcatgtcccaccgtcaatcacagggaagcacagactcytgggggtggcccaaggccccaggtagaaaaggacactcttatcaggggacactccaagggctgaggggtgagctcccgggagcaggtccagggcaggcctttctttctaatgtgtgggtgtggacatcccggagctgcccagctcacytgttactgcacgcacagtacgggctcttggtacctgtgtgttcttccctgtggcccttgagtggctcagtgataccctttgatgtaccccagggtcarcccacacagacacaccccagrttgctctctcctctgccccctctccctgataacccccctcagggtgtccttgaggctgggcctgcgtttggttcatctgygtttggttcctctgtgcccagagcccagcaccgagcaggcacatggtaaatacgtgtgtatgcacgtggatgatggggcctcctctggggacaaccctcctgagccctccagcctcccctctccctgactctcatgggccagatcttcactgttcatgttcacgctgctctgccagaagcagccggttcaagctcacctgggttcacagccttcctctcttaaaatgcatgtaacaaagacataaaagaaaagaaaggaaaatgtactataagcaggaccaaagggctcaggggcatctgcaccagctggagaaagactgggtgcacttggtggtgggagtgaggcccaggggattgtcccctgtcccccgtgccggggtagattgaattcaaggtttgtaccctggtaatggattcttcagggttagggtggttgttgcctgggaaactccttctgccagagcagtttcggccttgcctcctgcggggagtgttggctgttatcccagtggaaatagccctgaaagtcccatcccccaggatgtcactttctagactgggggcggggggtgccagccttttgctcggtcttggccttggtcctgatgtcctgcccccaccctgtgcatggaccccttccaggtgaaatggtgcattcctgcctgtctcagagcccacctgttggcaccaccttcccggggtgtaagaggtggaaaatggattttcttccagcaacccagcgtgtctcagggcagctttttctgattgattgaagccagtgttccacttgtggctccagcctgcttyctttgctgaggaccaaggcctggaggcccctcrtaagcttgtgggcactgcacttgtgtccaggcattcattagggccacccggctccctgttcccccgccaggaacatcctctccagctgtccgtctccagccatgttgcctgttcagcagccttctgggctgggcggggtgaactttggggctaggctgcctggttggactgatctctcatttaataactgtgtgatcctgagcaagtcactcagccttgctgtgcctttgtttccttcctgatctgtccaatgggagcattaagagggaccaggatgttgccatggacattaaatgagatcagagtatagaaagagcttggcaagcgagtgctcaatgcctgttggctgtgtaactgtcattatcgttagtggcatggttttctcgtgtcctcctaaaagtctaggaaaagtcctgcctccctgggtggctttatgatgtcaggtaccttcctccatagaaaagattttaggcyrtgcgcagtggctcatgcctgtaatcccagcactttgggaggccgaggcaggtggatcacaagatcaggagttcaagaccagsctggccaagatggtgaaacttccatctctactaaaaatacaaaaattagctgggcgttgtggtgcacctgtaaatcccagctactcaggaggctgaggcaaagaattcattgaacccaggaggtggagattacagtgagctgagattgcaccagtgcactccagcctgggtgacggagtgagactctgtctcaaaaaaaaaaaagaaaaaaagaaaaaaaaaggcaaaaaaaaagaacagattttaaatggcattgrtttcctagggcagcacaaactgattgtgttaaaccagctgtccccaaccccctggcatggaccggtaccgctccatggtctgttaggaacctggctgcacagcaggaagtgggcggcaggcaagcaagtgaggcttcgwccgtatttacggctgctyctcatcgctcgcgttaccacttgagctccgcctcctgtcagatcagcagcagcattagattcttataggcgtgaaaaccctattgtgaactgcacatgtgagggatcaaggttgccttcttctgatgaaaatctaatgcctgatgatctgtcactgtctcccatcacccccaaatgggaccatctagttgcaggaaaatgagttgcagggctcccactgattctacgtggtggtgagttgtataattatttcataataatgaaataaaatgtacagtcaatgtaatatacttgaatcatcctgaaaccatccccactgcccctctccctgggtccatggaaaaattgtcttccacgaaaccagtcctgggtgctaaaaaggttgggaaccactggattaaacaacagaaattgatcgtttcacagttctggaggccagaagtctgagatcaagrcgtcagcaggcagtgctagggaaggatctgttccaggccctgctcctggccttgactgatgggagcacaatttgagtcttcacatggtgtcctctctgtttgtgagtttcagaccaaatttccccttttgataaaaacaccagtcatattggatgagagacccacttcactccagtatgacctcatataatcactcatgacatctgcagtgaccctgttttcaagtaaagtcacatgcttagctattgggggatagggctgcaacatacgaatttgaagggggkgcatcatttaacccatggcaaaaattatattttataatatatgaaaatcacattaaaacattttctttgatctacaaggggtttttttgtcccccgatttttaaagaaattcaaacattttcgagggcccctaaaagcagcgtgggccctggcctgcacctcctggccctggtggagaagtcagcgctggtgctgcctaccccacggtgacaacaccaaggccctgggttccccacacggtgacaacaccaaggccctgtgttccccagaccacatwggctgaaggccattggccaccatcccccyagtccagcccctctttttcttttccaaccaagcatttcccaggtcatagatctgttgaggtttgaggctttacgacatctacttttgttgtcacttttagaaaaacctctcagggagagaagcctaattgtatatgatttgaaaatagaaagggctgtgcaaatggtaagtccagtataataatagtgatgccaaataattgtgttttgaacaagttgaacttgttaaatcagacagatgccatctgcactatttaaagcctgtgctggcgatgggttttacacagacatgcttgtcgcaggaaaattgctgaatcccccaaaaagtaaagtgctytgctttgtagtcgggcgtatgatgcttcctctcaggaatgggatgactgctgtccctggggagcaaaagcatatcaagcatgtattgagcacctcctgtatgctgagtactttgcatttggcctcacagcttatcctcaccaataactccattactcagatttcacaggagttaaagcctgtgttcagagaggttaggtaacttgcctaaggtcacacaaatgtgaagtgcagccaggatttgaacccaggacctctgacttccagggtttcactctttccaatacatctctggctaatgtggagagtcactgacccmgcgcttgaaactcaaggacatcccttgatttctttctttcctgtgagagcggcaggagaattaaagcttggccttcagcaagagcaacgtggttgctgaaaagaacttcttgacagcaggagcatccaggagaacctagattttctctctctctcttttttttttaaacaaagtcttgttctgtcacccaggctggagtgcagcagtgtgatcatggctcactgcagcctggacctcacgggcgcaracgatcctcctgcctcaatctgagtagctgggaccacaggcgcacaccaccatgcccagctaatttttaaaattatgtatagagatagggtatcactctgttgctcaggctggtctcgaactcctgggttcaagtgatcctcctgccttgccctcccgaagtactgggactacaggcgtgaacctctgggcctggtcctggactctcttttgcggtggattaaaaaccatttcccctcagttctgcggatggtgattatcttagtttcgtagagttgccgtaaaaaatgaccacaaaccagatgtcttaaaccaacagaaatttactctttcccagttctggagacagaagtctgaaattagggtgtcagcagggccgtgttccttccaaagctcgaggggagactcctccctgccccttcctggctgctcctggtggatgctggcagtgcctggccttcttcgtcccacagatgcatcactccrctctctgcctgcttcgtcacatggtcttttcccctggstgtctgcatgtggccttcttagaaggaccccagtcattggacttagggtcagcctgatccaatatgacctcacctgaactaattacatctgcaaagaccctattcccaagtaaggccactttctttctttctttctttctttctttctttctttctttctttctttctttctttctttctttctttctttttcttttttttttttttttttggtttattaaaaaataagtttattggccgggcatggtggctcacgcctgttatcccagcactttgggaggccgaggtgggtggatcacgtgaggtcaggagtttgagaccagcctggccaacatggtgaaaccctgtctctactaaaaatacaaaaattagccaggcatggtggcacatgcctgtaatcccagctactcgggaggctgaggtaggagaatcacttgaacccaggaggcagaggctgcagtgagccgggattgtgccattgcactccagcctgggcaacgagagtgaaactctgtctcaaaaaaaaaagtttattgaggtatatttttcataaagtacactaatattaaagttagaacttgatggagttttgatggagttttacatatggacagattcgcctaccaagattaggttacataggatatttctagcacacaagatttcctgtgttccgtcagcggaagtcattcttagcccctaaacctaacttccaccctgacttctatcagcattacttttgcctgttcttgaacatcatataaatggagtcacagagtacataatctttttatttttttttttttttgagacagagtcttgctctgtcaccaggctggagtgcagtgacgcgatctcagctcactgcaacctctgcctcccgggttcaagcgattctcctgcctcagcctcctgagtagctgggattacaggcgcatgccaccacacccggctaattttttttttttggccaggctggtctcaaactcctgacctcaggtgatccaccctccttggcctcccaaagtgctgggattacaggcgtgagccactgtgcccggcccataatcttttttatttggcttatcatgctcaacattctgactctgagattcgtctatgtcattgcacatagcagtagcttagtattttttttatgtccataggttattggggtacaggtggtatttggttacatgagtaagttctttagtggtgatctgtgagattttggtgcacacatcacccgagcagtatacactgcaccctatgtgtagtcttttatccctcacataaggccacattctgaagttccagctggatatgaattttggagacactcttcagcctaagtgatggagccccgarcacagggcccacgctggccagcryctggttccacacaggaaagccaagtccctgtcctggaggactcaggactccattcggggtttcaggctggccactcacaaccacacccaccgtgggtcagggggttcagaaagtgacctggctcttgcaagacggatggagaggagcctcgctccagggagaggtgcctccaggaagggctgaaacrggttgaggtccgttccaaagtctctagttgacctggcaggacccctggcttggcttgtcttgacataggttgtttgtgccctggggtctctggttagaaggtaggacaggcgcccagtttttctccattttgcgtgcctcctgtcatgatgggagccttagagcccggctcgtctccagctctgagcctgcagcagtggaggtttccctgcctctgcactctgtccttgaaatattcattccaggctgggtatggtggctcacacctgtaatcccagcactttcagagactgaggcgggaggatcacttgagcccaggagttggagaccagcctgggcaatatattttctacagaaaattaaaaaaaaattagccggacgtggtggctcatgcctattgtcccagctacttgggaaactgaagtgggatgatggcttgagcccgggaggttgagactgcagtgagccatgattgcgccactgcactccagcctctgtccagggtggcagagtgagagcccttctctctctccctctctctctctgtgtatataaaaaaatattcattcctgtcaaaggagtgtccmtcttgcccctgtaggtcagcatggaaagcagctccacgggcttcatctggactgatgtcagagcctggcagacatcaaatcggcatgtttcttcttggagkgaacccaggcattctcggtgggagcacatcactgccaaaagggagaacactggttcttgaaacaatcttagctgtaagaaacctcctagacgggcaataatgagaaaaggttgatgtgccctggtctaacccaagtccctgtggctgctgcttcaaccacatcaatatcagtgctgatcacgaatgcaaacagtgctgatgtcacacaggtgccgctggccacgcactttacagctctcttcattcagtcctcaccatggtagctgcccttatgtcttaaaagatgagactggtgagcacagagaggctcggtgacctgcccagggtcacatagctcataggggtctgagcttcctctcatctccttgtatcatactggtaatgaaccttgatgagttttggatagatgaaaaatactcctacttccttctkcctgaggactttttgagcaaatgaakcaggtagcttttaystctcttctctttctttgtaatctcacagaaggctgtcgtgcattcaactttgtgctccaaaaagccatgtccaartcctagccccaggacctgtgactatgacctyatttggatataagctctttgcagatgtaatcaaattaagaggaggtgctactggatttggatgggccctggttccatggctggtgttcttataaagagaggaaagtggacacagacacacacaggggagaaggccgtgtgaaggcggaggcagaggtcggggtggagcagccacgggctgaggaacactgagggctgctgctacctctggaagctgggagggaggcctgggggaggctcccctagagtctaaaggcgccggccctgctgccrcctcgytgtctgatttccagcctccagagctgccagaggagaaatgggygtggttttaagccacctggtttgtggaaattattgcagtcaccccaggaaactaacacaaaaatggtggcattttttattttaagagttttatgtttgtttgtttttgtcaaagtttgccttgggcactgaactagagtgagaggacagactggattgtgtgtgcatgtgtgcgtgtgtgtgcatgtgtgtgcatgtgtgtgtgtgcgtgtgtacatgtgtgcgtgcgtgtttgtgtgtgagtgtgtgcgtgtgcacgcctgtgtgcatgtgtgtgtgcatgtgtgtacatggggggcttgttccccattcctgtcatctgccttttgtcccctccacttcggtgtctgctttgctcccacctgtcaccctgactagtcccccgatgtgtatggggccactgccctttctttccttaggaaaggtggaggtgggagagtgtgatggctgtagagggcgggtggccattgagggttcctgctatgccttctctagtggacagctcactaggctcagaagaggaggagaggtggggtttgcagacccgaacggagcccaggttggaaaaatccttcatcgaattcccattatgtgcagccataaagaccagtaccttgtatagggataaacggagcttaaactgggcctgcaaagccacggggtgaggtgagaatcaaaggaaaccgaattaatgtgttaaaaaaaaaaaaaggcaagcagcttcctggagaaagacccccagggctatctttgtgtgagaagatctgccagctgaggggaatccatctcaatagaagtttgcaatgagataaatactgcatatgacggctaataaatgtccctgagagctgagtagtaatcaacacaggaaataaatcctccaaaaataaaagcaacactggtatcgatggtgaggtggagggctgtggtggtggcagtcacctcctttaagatcctgggaaggatttgttctcaggaagccagtgataatttaccggagttttaatacctggcaagttcccaggcttctgygggtagaatttattttggcacaatatggcctcttgggaggaaatagagacagactcggagaggcccggctgtgcctaggraaaggcctctgtcacctgtgtgayccctggacagaacctagccaggctcttgaatggaattcctctgcctgtttcagccccatgcactgcccttcagcacacatgcagtaatgcacggacatgcctgacacgtgcagatagggtcacatgtgcagatatgggcacaygtgccattgtgggcacacatgcagatgtgggcacatgtacagttgtggccacacatgcaaatatgattacatgtgcagttatgggtatgtgtgcagttgtgggcgcacatgcagttgtgggcacrtgtgcatatgtggggacatgtgcagatgtgggcacctrtacagttgtgggcacacgtgcagttgtggccacatgaagacatgttctctgactgctcagggaaggtggayrtgaggcctggggccgaggggtgggggatgtccactaaagggctctctgcagatatgatcacacatgcagttgtgggcacaacatgcagttgtgaccaacatgtgcagatatgggctttcccgtatgtctgtaatgtgtgtactggatggggtgggctgccagctccatcttctcacccgattcactccccaccatttggtctgcttggggtcagggtttgggagcctggggcattgcagagcctgccgcctttgccygtgggccttactggcaggaccctcatgggaaggtcaccccrgccggttctgtggctcacctctggcttttcccacttaggatgccccctggggccggcctcatggagcggatccaggctattgcccagaacgtctccgacatcgctgtgaaggtggaccagatcctgcgccacagtctgctcctgcacagcaagggtgggtgccagggggcgggggtaccctctacccctagggggccaatgaactgggtgctggstgggccctgggagggtgggacacttggggygtggccgacttctcctgacagcagctctgctggctcttcggggccccagtttaggctttcagcaggacaactgggggttcactcccccgacccggcaggagggcgctgaggacagaggaggtccctggagtctcagcttctggggtccacagttccaggagtgaggccacctggggaagggtccctcggcggcccctccagtccctgtgatgtggggagcagcgagctgggggctgcaaacctcatttctgcctcctcagaaaacgctggggatgctttygggtgggtgcatgaggtctgcccatccaggcagctgctgagtggctgttcgcaccagctcctcactgcatctgaaccccctgaggaggccgggggcaacctaggcccgggwtgaccttgtgggtgggttgtgcggctgatgagctttaaggtgggaaagcctggcagcggattgtgtgggaagctgcctccygcacscaggcctccctccctgggctcctccttggaccagggacttcagcaaggtgacytctccctacagtgtcagaaggccggcgggaccagtgtgaggcacccagtgaccccaagttccctgactgctcagggaaggtggaggtgaggcctggggctgaggggtggggatgtctacagctagggcctctctgtctggccctggcccctcacccaggcacaagctggcagaggccaacctcagggaaacagcttctctgctcagtgcatccaccccacccatcaatccaaatcccccagraagagtctccctcaggtgtcggtgctttctcacagcaaatgattaaatctccaagtgtcaccgccagcagccggattcccccagagactcagaggagtggccctggctgccctgtccctgctcctcctggcccagccaacagctggacggagagtcttcctgccccatttctggggccaccrctggctgcatgaagtctgcccttgtaggagtcgtccacagccgtgaagtcagctccccactggttctgaacgccctaaggggtgggcggtggtgccgcagaccccttccttggtgaccatctgggatcactgcaggtggatcccgccctggctccagccctggccrccttggaggctgctccctgaccttggcctctagcccaatcctgctctggtagcagggagacggggaccagagggagagggagacagccaggcctcctggctctttgccccagacctttgagccagtgttctctcccagtctytcctctttccagacatgagggctggtggtcctgcccctgccatctctggggtccttcaggcgggtcctggttcaatctcttctctgccctgtcccctgttgcatcagtagggtgggccacatgggccccatccttgacctcagracccctgggggtgcacgtgcgggggagtccccgagggtcagtggggctggygcagccccctgcccagcctggccctctctgcagtggatgcgtgcccgctggacctctgacccctgctacgccttctttggggtggacggcaccgagtgctccttcctcatctacctcagtgaggtcgagtggttctgccccccgctgccctggaggaaccagacrgctgcccagagggcacccaagcccctccccaaagtccaggtgggcctgggaggtgggtgggccggtgaggggctggtgtggctggacattcttaaggacagtggacagaaacctctrtcmtgagggaatgagactgagctgcttgccaggtktgtgggcaggtcygagcccaccctaccgggcagacgggargccagcctgccaaggcctgtctgccttctttgagatgccaccaagctgggcctgtttgcagggcaggtggggggcctggagatgcccccttagtggactagaatagtagtaatagcagctgtcacttattgagggttttctgtgtccagatgctttatttgcacttaaagttcccagccatccttgtatgatcgtatttgacagacgatgcatctgaggtttacaattgaattaatgggttcgaggcgcatagttgctgtggtggccacgtctgtccyctgccatcrgagtcctggctatgaccaccaccctcactgcctccctgtcatggctgggaacctggaaactgctatggttggccacctccgtggaagggctaggggcccatggttagagctgggctggggagggtgtgttgacagggcgggcagggctccctggttttgggggctaatgagccccttagaaagtgcaggagaagctggagcaggccccagcctcatgggagggtgccagcccstgtccccaggccagcggggaatgatggtggccgcaggttgargggcagagagctgaggtctggacccctccaggcagttttccgaagcaacctgtcccaccttctggacctgatgggcagcgggaaggagtccctgatcttcatgaagaagcggaccaagaggctcacagcccagtgggcgctggctgcccagcgcctggcacagaagctgggggccacccagagggaccagaagcaggtgcgtggcccctgccccctcatgtgcaggagctgagaaagctcagggcccccacttctgagtgggcatggaataggtcttcaaacaagctgtagtgggcttctgaatttgatcagagggagagaggggtagggatggcagagtcgggatagatgtctgtggtggtggcccctggcccttttcaaggttgggaccaaatgacaagcccccaagaggtcctgcattctgtgtacatctggttcatgtcaggcagaaaagtcatggtattggcctggaaagttgggaatgttctggggagcttcgttagctcatgcctccattcttccttccctccttccttccctccctccctccctccacccagtagatatttacgtggctctcacattgcccttttatttctttcagagcccttatcatttcatgaaattatctcttgtctgtgttcactgttgtctacctcttccatctggaacattagctccatgagggcaagcacgtgactatcttgttcgcccgtgtccccagtgcccgatctggtcactctggtgccggaaagcacctgctggggcccagcctggagacagggtctgctgccggctggtctcctggccggtgccccgggggggcggggctcaragctgctgctcctcyctgctgaccctctgtgttccgcccacccagatcctggtccacatcggcttcctgacggaggagtccggggacgtgttcagccctcgggtcctgaagggcgggcccctaggggagatggtgcagtgggcggacattctgactgcactctatgtcctgggccatggcctgcgggtcacagtctccctgaaggagctgcagaggtgagtgctggggaaagccactggcattaagtggggcagggaggggatgaaggggaaccccacccctccctcccaggggctgtgggagyacctgctctgcctgcaggtcccacggccctgagaccctgggagacatcctggtgttccgcaggacatcaccactcctaatccccctcctcctgcccggtsttgggggatgtggcagggaagtgtatttgcatagcrctgtctggccagggcctggctccttctctggtgtttctgctcaggggctgacacgtgttggcttgtggaattgagccacgtctgcacgtggggtcccctctgcctgccgtcctggaaggcttggtttctcttctgaacctgggctccttcttgggtctactttagggtctggagaccagtaagacatggaggatgaaggggcgtggttgggtgggtggtgcctgtcccttacccagtgctgggcttttcacggtcccttggatgctgtgggaggtggaagggcagtgattagaggctcccctgagtgtttgagggtaggatgggggtgaggctgagagtgtggggatgtcaagggggtaagagtgtgtgattgggtttatttttaatcactgtttctgtgggatgtaggaatacaggagattcttctctttattaatatttattgtaagatatatgatgcatacaaagtctatgtaaagtatgttgtgaaacacaacagtcaaatcacctcccatgtgtgaccatccatttaagatcatgctgtcaccaaggactctgggtttgcctgagagtgtctgccratctctctgcctcctccccagatgaaaccttaacttgaactttgtgtatattattcctttgcttttttttttttttwaatggagtttctctcttgttscccaggctggagtgcagtggcgtgaccttggctcactgcagcctccgcctcccgggttcaagcgattctcctgcctcagctcctgagtagctgggattacaggcccacgccgccacgccaggctaatttttgtgtttttagtagagatggggtttcascatgttgcccaggctggtcttgagctcccaacctctggtgatccacccgcctcggcctcccaaagtgttgggattacaggcatgagccaccgcacccagcctgcttttgtaaaaaaagttttttgttttttcttaatagtgtatccataaacagtttatggtttgcttttgttttgttctggtttcaagctttgagaaaatggcatctactctatgtggtctcctaacttgctttcttcaaactcactctgtttcaaagactcatccatccatgttctkgcatgtagctttatttcattcattttcactgctatataatattccattgtgtgaatgtgccataattatgtatcagtttttcctgtctgcggatattttttcctgtttttgaaatggttttgaacgttgccgtggtggacattcttggacatgtcacctgatgtacytgtgtaagtttttctgggtatagacttagatgcagaattgttagatcttggcatggtgaaaattcagctttacaagataatgccgaattgtcttccaaagtgattgctccaattcagagactcaccagtgcatgagtttccgctggttcacattctcacctacacttagggttgtcagacattctgattgaggcatgatgatgtcttattatggctgcaacttgcatttcctgaaagataatgggctgagcatcctgtcctgtggttctttcgtcttgatgagatgcccattgatatgggcatcatatgataagggttatcattttcatattgagttgtaagagctctttatatattaaggatataaattctgtggaagttacatgtgttaaaaaagtcttctaatttgtggcttgcctttttaatttctttatggttttttggggagtaacagaaattcttaattttaatgtaataaaagttatccatctttttctttatagttagcaattttgtgttttgtggagttctctgttctctcttttctttctttytttcctttctttctctttctttcttcttttttttttttttttcagatagggcctcgctctgttgcccaggctggagtgcagtggcacaatcatggctcacagcagccttcccctcaagcaaccctcccacctcagcctcctgagtagctgggattacaggtgtacgctactacgcctggctaatttctgtatttttagtggagacagggtttcactatgttgcctaggctggtcttgaactcctaggctcaagaaattcgcctacctcagcctcccaaagtgctgggattacaggcatgagccaccgtgcttggctttattcctccttttcattgacttaaaaatgtttctattgatacataatatgtgtacatatttatggggatgggtgatattttgctacatgcatccaatgtgtaatgatcaagtcagggtactggggatctatcatcttgagtatttattatttttatgtgttgggaacattttaagtccactcttcaagctattttgaaatctacaatacattgttgttaagtatagtctccctactctgctatctttttttttttttgagatggagtctcactctgtcacccaggctggagtgcagtggtgcgatctcggctcactgcaacctctgcctcccgggttcaagcaattctcctgcctcagcctcccgagtagctgggattacaggcgggtgccaccgtgcccagctaatttttgtatttttagtagagacaggatttcaccatattggtyatgctggtctcgaactcctgacctcaggtgatccacctgctttggcctcccaaagtgctggaattataggcatgagccactgcgcccagcctctgctatatatatattttaaatcttatttattttaaaatagagatgggtttccrccatgttgcccaggctggtctcaaactcrtgggctcaagtcatctgcctgcctcagcctcccaaagtgctgggattacaggcatgagccatgtgcccggcctactctgctatctaacgtagaacttattccttctatctatctatatgtttgtacccattaaccaaaccaacctctctttatccctcctccccaccacatttgatgagattattcctcagggccttccttcagggccccagaactgtttgcatgtgaatcagcttttcttcattaacttctacacaggtggtttccttgtgagtccccaccagagcctgcctactctcttgctggtctgattggccttctckccactaatgctaatgctctgtagcacaggagtgttggagagcagaggatgctgatgaggacagagccatggcaatcttaggtcactagggcccagcaagcaccagtcttgggcagctactcagtttctgcctttcttcgctgcaactcagagtctgccagtaactcaggtagaacgtctgtgactccgatcagagggaggagtctgggccagctgtattgagtagtgggagaaggaggctgggtctggattgtgttgcttaggaggccactaaatgacccagggctttgaaggttttcatccccgtggcctgaaattcacagcactggagtcatccttttaagtgaatgcattcgatgattaggcttagtaaagaaaaagtgtctccagagaggaacagcacgtgtaagtgaggctatggggcagaggcaggttggtgccagagactaaagaggcagctacacgcctgtggctgtgttgagaagcactgtccaagtcgggggcgggctctgggggaggaaattctcaccttgaaatagcaggtccaggagctgcaaggaacccggctgggagctgtccccgagtgctagtgctgaacccacagatactcccaatgctgggagagggaaacagcacgtccctcactctggctctcaccctggtgacatcttgttgtcagatccagctgttcgcactgtgcaggccacttaagagmcaaggtgtggggcccactcgcccgcctgcacccactgctgcacactaaactgtctgccaccggctccctctgaacagagagcctggaatatgcatcgatgctgtctgtggagcagaacgctgcagaggcagttaacatttgcagattatgaaaagaggtgtatacactcatgcagcctccacatgcacccatgcatacacgtgcatatccaccacatgtgtgcacatacatgcatactcacccactcacatgcacactcatggacacatactcatrgcctctgcacccacacatgcacacccactcacacacttgaatatgcacacactccacatacacatgtgcaaatgcatgctcctgcatgtgcagacatgatgcatctatacagacacacatgcacactctcttgcacacacatgcatgtccacaccccacagagaatcagtgttttctaccaagcaaggctccacttcctctcaagctcttgcagatctaaaggtgctccagggagaggttgccccatctctggtttgcagtttgttaaatgggcaggcccagggctgtgctccgatgccctggcccttggtcccctgtggggtgtatgtgtgaatgaacgatctggctcagacagggcagaatggtgtaaacagctcagctacctcaggggatcttaggaaggtgatttctaaatctgctaccaaatacaatttaaaaacaactaaaagaataaaaataaaagcaaaaccaccctccccaggagaattccccagttatgcctacaaaagtaacagcatcagctatggttggaatacattcagggtgggggttcttaaccctggctgcagcaaaaccacctgaagcactttagaaacttaccagtgtttgggcccctgtctaggcatctctgacttcttccatctggggtgggggcccaggtaacaaattgaagctcccagtgattctaatgggcaccaaaggttgggaattggaaaagcttgaggctgtggcttttctaagcccctcagcccagtacacagtctggcggtggggttgggacattgtagaatgcatggcttcttcagaaggccttgtctgtgtccccagtgcagtcctgggggatgggattgaggccccaggctcagggccctagaaaagatgtagaaagaatgggaggattcatcctgagagcacccaggayacccttggttgctagagtgtggcttagtggggggttgggccacagaggcaccctgtggaggtggcccagatggtggggcgtctggcatcatgcccagggcatcacgtgggaacctgctggcctggaatgcactttgtgccacacactttcttggatgtactttcttccttcttcctttctaaagtgggggcattgcattggtccccatagttggcggggtcagtgacagatgtgaggccagggtggaggcagaactgtgagctcccaggcacattccctgctggggcctctctgatacataaatgcaggcctttcctcacagtggagatgtcaatacagtttgagatgtggatgagcctcctagagctgccataacaatggagtgcacactgcagggcttacacagcaggaatgaatgaacagcaggaatgcatgaactgaatcctggcgctggagcgtgctgcaagtccaagagccaggttttggcagggcagggctggggcctcctgaggctgcaagggagtctctgcctcaggcctctctctgggttcctggtggtttcctagtgaggaacttggtgacccttgtcctgcagctacatctctacaatcatctctgcctttgcctggtggcctccctgtgagcgtgtctgtgtccagatttcccctccctataaggacctattggattagggcccaccctaatgccctcacgttaactccattacctctgtaaggaccccaactccaaataaggtcatagcctgaagaactgggggttaggacttcaatatgtcaatgttgggggtggaggacacaatgtaaacccataataagatggcaaccactggggggccctgggcagagttcccagcgagcaaccgcgagcccttcagggagaggcagaagcacccagggcctcacctctcagccctgggagccgttctgtgggagcagcaccaggttaatttgaaaacaggtcaatgggatgtgaaggtaatctgaattctgagtgtctcagcttggtttctgcgacagaaatgtctcccttggctggcgaaatgacctgcgtgggaggcggtgggacaaagacgcggcttgtacatttgttgtagtttattcgcagatgttcacggcagatgtcctggccactgatggagcaacaaggctggacggatgagccggtcccgctctgctcctcgggtctcggtgtttcaattaactggctcactggagtgacgtttggggcaatgtgcaggatctacatctggctttgctgctgcaagatgcttccggggtgagggaggtggcacgagggagccgtgcgctctgtgatgagactgcagcaaggtgatgtcagccagtccccgcccgcgccccgccgtgtgcggagggaagaagccaaaccctagtgcctgcccagccgctgcatcctgagacggcctcgtgcatgtgcaggtccagggtgggcgttttaaagttaagcctttcccttcctgctttcctagcatcagctgtgctcatcaattttatttgcacaatttcaagcatcattaatagtacatggcatgagaaaacattactgagctcttyctccatccatgagtgaaattgggtttagtagaaaattagttgacttaactggcaaatgatgaaagcttgagaggagaatgtttaagtaaggaggactaggagggacaactcctggctgtcaagcatgcagccaggctggaaatctgcctcctgcctggggccaggtgcccaaaggaaaggctggggaggatccccagagaatgacgaaggtggggactccatctgcttcctcccgcacaatccactgtgaccagctgaggcaggtcttaggtttggaacccagagatcagttctggatatgactggcacagactgatctgaaccaatgcaaactgggcccagctgctggaaaccagcttgagctgaccagaaccaggctgacctgggcagctcaaaccagctccagggcggaggatgctgctcttctctgaggggagaggagaaaagcactgggtctagggcacacatgttgaaacagaggtgccccatggaggccactgggtgacgggcccaggggaggtgtggcatggagacagggtcttggccgttgacagtggttgaacacagtgtggttgaaattgtcaaaggatgggaaaacaggcttgaggggcacagacttgggaaatatcaacacagaaaggcctcttacaggcaaaggagactgaggagtagccaagagcaagccagatgtggagtcatgggtgcctgtgagaagatgcttctagaaggagatgtggccagcaacacattgctcattgaaaagccaagtaagaagragactgaaaaatgtccaaagaatttggtcacatgaggctgggtggggcggctcactcctgtaatcccagcactttgggaggtcacggcgggaggattgcttgattccaggagttggagaccagcctgggcaagatagtgagacctggtctttaccaaaaacaaaaaaattagccaagtgcgcctgtggtcccagctactcaggcgactgaggaaggaggatcacttgagcctgggaagtcgaggctacagtcagccgtgatcatgctactgcactctagcttgggtgacaaagcaagactgtctcaaaaaaaaaagagaagaagaagaagaaagaaagaaggaaagaaggaaggaaggagagagagaaagaaagagaatttggccacaaagatgtcattgctgactttggaaagagcattgtggtgcagtcgtggggacaaaggtcctaaacccagtgggctgtgggagtgtggaaggcgggatggggaggacacagcagtcgtgagtgtctgcactcctccaaggagcttggccaggagccgggaggagaaagagcgcaggagcaggggttacagaatcgcaggcaggtgtgtttgcctcctgggggtgaccagtcaaaagaccacatgctggggggtgtaaaccacacaaatgtgtcctcttacagtcctgaaggctggaagtctgaaatcaagactccctctgaaggcactagggaagcgtcagtcccagcctctcccctgtcttctggtagccgcaggtgttcttagaggggtagatggtgttctccctacgtccacatctcttcctccctccatgcatgactctgtgtccacatttcttcttcctcttttttttttttgagacagagtcttgccctgtcccccagctggagcgcagtggcgcagtctcggctcactgcatcctccacctccgggttcaagtgattctcctgcctcagcctcccgagtagctgggactacaggaatgtgccaccatgcccagctaatttttgtatttttagtagagacagggtttcaccatgtgggccaggctggtctcaaaytcctgacctcaggtgttccayccacctcggcctcccaaagtgctgggattacaggcgtgagccactgcccccggccacgtttcttctttttataaggacaccagtcaacttggattagggtctaccctaatgccttcatcttaacttgattacctctgcaaagaccctttttccaaacaaagtcacattcacaggtacggggattaggacttcaccctccttcagcggccacagttcagcccacgatcaaaggtgtgcttgtttatttttcgagataagagagtgcactcatgtttaaatgtggctgcaaaggagccagaacagtagggaggttgtggacataggagggagagagtattgctggcagtggcttcaggggagggtcccaggaggagggacagggacagctcttctgccctgagaggagagaaggagaagagaccagggtatactgtaaatgcagcggggtggggggcctgggctgggggccggggatcgggcactcctctctgacggtttctattttatcttcgatgccggaggggagagcatttcccacaagccaggtggaggcagcgggagacgcgaggaagtggacaagaccgaaaaacaaccctcgggctctaccagggtttgtaatatgctatccctcgaaacaaacaggattcgaaccaaatatggcaaaatgttaaggcttgacgaggctgggaagtgggcgcattggagcattatatgattttctataattttctggatgcttggaatattttgtaacttataagcacacagattaggaaaaggtggggaagaaccgcatcttggcacctagacytgtgaatggcagctctcctgcatcaccctccccgttccaagaggaggcacgagaggccgacgattacaattcactaaaaatccccggcccctctcctgtctcctttttccttccccttccttcagtttcaaggaggcattttaacctcctggctgagcggggagcgagcgcaggagcacacatcccagcggagaggcctggcagccagacacctgacccaagttggctggcggtcagaacccttccccaggaaattcagacttgggtaggcagaagacctacctagactgcgggtaaggggacagagagggagcaggcgccggcatgccgagtgtggcggggtcacgttgagtgccgccaaatgtcgtgggcctctgctgctggggcctggggctgccctggcccctgcccttcatccttcctcgggatccaggagagacccttccttgcaaggcctcgtctcccctyatgctccacatgctgcactgccctggcccctgcccttcattcttcctcgggatccaggagagacccttccttgcaagggcctcgcctcccctcatgctccacgcgctgcgctggcgtcacagggagtctgtttcttgcaagtcaaggccccccrgccaagtctgaacattgaccaataagcaagaccgatggaggccgtgccgtgtcrcctttcccagctctggcctggcctgtgttgggragggctgcaagggaagactcrtggaaatgacgtcgctggccctcatgagagatccatgcaccccaggtggagtggggagaacttggggagatcagataagaaatgaggacagaccaggccctcggctcatacccgtaaccccagcactttgggaggctgggattacaggcagatcccttgagtctaggagttcaagaccaacctgagcaaggaaacctcatctctacaagaaaaaactcagaaagaaatgaggagaagggctggcttctggatgctcctgacggaggcaggattcatccctggggaggaggcatcagggcctctgtgaatctcaggggtcgtgggttctcgagaagggatgaggggaccagtgttcttcctctgccaaggacagaccaagagagcgtcttgtcagatggtggctggagaggaggaaggtggcagtggacgagcttcaggaaccatctrtcagggagactggaaggagccacccacgggaagggtcaaactcaggggttcccgcctcttagaaactggggccagggctggtctggggctttttattctgggtgaagccggcagaagcacagggtggtacgaataaccccctagcactcttcccgactacgctgtcaggtttgagtcagcctagttgtgctaagtccaacgccaggtgggaggtttcactgtgactcagtggccaattaaatgctctcaagtccgggtttagtgtgaggattttgcacaccaaccatcactgcaaatatattcagcacacacaggccagtggctcgggatacgagtgcgctgactgatgagccaggcaggtccgaatgttcctcgaagtcagtttctttgctgtgtctccggcctctgcagggccgtccatagtcatttctcagctgcccctggcttcactttcttgttgggtctcgggggtgccttcccacagcaggtatctcgtcaccccagtccagcatacatttatcactttgaaggatcagcagtttgaccgtgggctgagtcacttgtcataagtgactccattttgagattatttaggatcacaaaacactatcctatatcaccacctgcccctcaagtcagagtagctttggtaaaaggaatgcattttcctgcaagccagactgctttttcctcggcatctctagcgtggagccagcggccctcaatatccgaatccaggatgcaggggctgsgtcttagcttttrgccctcatctcccactgagactgctcgagtgggattgacagcggagtcttaccccaaggtccctgcacaggttggttctcagcaaaggttggtggaaccggatagaatagcaagagcccctggcacacaggartcacccgaggarctgaaaataatccccgacgcccaggccccagcccggagcaaatagagggaccctcggggtggcctgagcaccakgagctaaagcctggatgagaaaacctgggttcgggctcagcatttacaggcatttattctagaaattgaggcctgtctgtaaggaagaggactgggaacgaccggagggccgagttcccgttcctcttcctgcagccgtgctggcagccagcggggtgagtgtgyggtctcctccagctctcctgggagcatggccctattcttagcactgagtttgcttrctaggaaagaacgctggggaagaaagtgccagctttggacgccagccccactttgggtctgcagtgttgaggatacgctgctccctcagtttccctttcggaggctcccccccaacaactgcacgccttgtaccgcacccccaycccygcacccatgctttgtggtagcttcggctaaagagcacccagactgtgcctccatctgcctttggactcccttttcctctgagccagggaccctgagggggcctggcagttctcagctgtagccctgaaccctcgagggcacagggtacatgctggggatgctcaagggcatcgccttttcaggagatgggagctgagggcagggccatcccagtgactgcgtaaagcaactctgggctgcttctgttgggtacagggaggtcagtccatcctgggcaggaagaaaatgctgcaggacggtgtaattctttcctcattagtgatcctaacccctgcttcctaaagcagctcattagatgtccagttcaacctctgagtttcttctttctgcccccatctggtctgtcagggaccagacagtggcctgttgtggtaatgggccatggcagggttgggggctgcccatgatacttgggaaacgggcactggtcaggtttggaggatttcagggccctggggagacagaacgtcccaggctgccccagctgtgtgttccccttgagaggcacccagtgaagttgtggatcctgcctgcacttcagcccctggagtcaaagatctctgactactttgcaaggattctttttaattaggtccctcccacacaagagaaagagagagagaatagtgtgttccacaatttgagcactacctggagagattatttctagccacagaccaaaggcacagagagaaataaaaccagggaatttttagcttagaagagaccrtggagatttgcctgagcacgtgtcccacatgtggaggcggacaccagagcgatgtggtggctcgtggaaggctacccagcaaatgcctgctggagctcctgcccagggatatttttcattgccagaattcagcatttgaattcctagccgagggtttcttctattaagtgaaggtttatttttctcctccctcatcccatctccccatcctcctctttgatattttagcaaagagtgcctgagccagtccttccctggatatttacagagcccctatattgtttatggccagctgggagtcccaggcaggtggggaacgtgacagctggagaagatgggacctcagcccctctgggaggcagagtgcttggcacgggagccaggaatgtgaatgggttgacttaaaaattatttttaaattattcgtatttttaagaccgggtctcactctgttgcccaggctagagtgcaacggtgtgatcacagctcattgcagccttaacatcccrggttcaaacgattctcccacctcagcctcctgagtagctggaatgacaggtgcatgccaccatgcccggctaattttttgtatttttggtagagatggggtttcgccatgtcatccaggctggtctcaaactgctggactcaagcgatcctcccacctaggccacctaaagtgctgggattataggcgtgagccgctgtgccgggctggctttttamaaacttgtagtaagatgcacataacataaaatgtgctgctgtaaccactttgaagtgcacagttcagtggcaaagcacactcgcattgtggtgcaaccatcgccaccatccatctccagatttcttcttgcaaaactgaaactccatacccattaaaaaataatttcctattccttcctgccccaagagggtagcttttccgggtggattaatttgggcacagtgcaggggccaactctaaccaggtgacctgcggaaatgctcmattcccctggaccaccctacccctacccctttcctcttgggatttagactcctattcatctggcctggggacactcagaaatatattctaaccagccagtttggcaattccacacaaacttccccgtccttcccaagcactggctgttggcagtgggcagatggaggggtatgcagcagatgcatttcaagttccttctgcccctgaggtcctccccccrccaccctcctatctgtgggggctgctgaaccgtcctcttgasccagcccttgactgagagtacaagagaaatgaggacttggccttggaggtgcagaaaggtctggacgggagtgttttgagttttcagcaggattggtggaaatgcacagccgagcctcccgggcacctttggttgaaggttgtcgggggacggcrttttcaattcatgtcactgctccagccaatcacttagcgtaaaattgcccatraaagtaaacttaaattacaagtgataaaactacagcctcctctcccagcagctgacctctctgctctccagggggtgaggctcagatttcttctgataagagcaatgaggccgctgcagacacctccagggacgtcctgcccttccattgaaaatccttgttttccagggctggggacatgtgggcttctccttaactcctcctgggaaggggatgctgctgtctccgggccgatttgtctccctcctctcccgtgatgtcctttgagcacgtggaaggccactgggctcaggtccagacccaaaggccagtgagtgaccaaggcaccttcacccctgggcccctcactcacccatactctctctccagagaggcttttcttggccaactattaaacattgaaaccagttcttctcatctaccactttgtgtatagcttcataaatacagcagatgtttagtgggtcaggtcctgtccctggtcctgaatgttaaagatgacctgaccctgccctcctcaaaggggcctccaggtgggaagaggtgacttgggacattgaccaggtgtgtcccaggtatggagggagcatagcgggaggggtgtctcaggtaaggcttcctggaggaggaggcaatatttgagttaagcacgtggaggtgagaagagtcttctagacccagggaacagtttctgtgaaaacagggcaccgtcgcaggagaaccttggtaggatcagaggggagggtttggccgggaccaccttgaaatttctgcggcacctggcctcacgtgtgacaggtacaggaagtgtccggtctcacttatcttagtcgcacactggtgacagctgctgtcttattgtagattccttctcccccatccgttaatattcctccctttcttctggtttagtcaagactttgacttcacactgagcagggtgtgcatgggggaagcgattgctcagcagggggccccttttcctgcccggctctggatctgggtgccaaggtttagggctgatacttcatggggtgaggcctgactgcccaagcgggtcctgcatcaggtggggctcagcgggggtccaccttccacccacttccctgctccctccatgcacacccagtgggcctgtgctggagaggctgctgcagatcctggggggcgcagggtgtggtgcaggggctgcagctgttgcttccacaggggttaggtggggaagcatcctcgaagtcctggctcagaggcagtgggaagcctcggaaagggtcagaacccctgggagatgtgataaagtttccattgtataaagactctgatcccagctctgctccttcctggctgtgtaaccttgggtaagttactcagcctctctgtttcctaatctgtaaagatgggaacaggatgagaatgggtctgatctggtagggtagttgctaagatgaaaggagctgatgaatcagtaagttgaaagcacatggaatgatgcttgtgtccaaaacgttagccttgaagatggcgaggatgatggactcaccttagaaccgcagcgtggtggtctcccaggagagggctgtgacgtgctacaacccctctgtcctctcagtggccctggtgtctgggactagggtcagaggtgtgctcagtgatggggcagcaaaaggaagctcccaggacagagagataacatgttgcctggaaaccaaccagagatctgtagggaagccagtcatgttcctggtgcaggtagcagctcctagacccacctacggtttgtattttcaggattgtcttaattttactagacccagattccatgtgggaggagcagccacccccttcctggtttctgcaaggaaggatacagagggagtgtctttgtgtccttttgtgtgtggttctcagttgggttggggaggtgaggaagaggggacttctggagccccagggcaaacaaatgaagcttctttctgggccatcagttttactggaggagttttgggagtgagaaagtccatgcttcacaggaaacaacagggatgtcttgcagagtgaatgcagaatttgttcaacacttaaacctaccaccaaatatttcatgaagtctccaggttgtgggagttgttccctgtgatggctccagacccctggggtctgtgcttcttctcctttgttttctgggtatttcagccaaaaagctgaagaggcaggcactgccttagaagccctggatcagagaatcccgtgtggcaggtggtctgtgttggaaggaggggaagacaggaaggttggagggatggaggagcccttggccatttttaagtttatagacaagaaatgaggaggaaatggtgattaggttttcacattcccctctcacacttagcagcaaaggttctgacatggcggggaagccagtgtggggacagctcaggaggctggtgggggtactagctggaggtggggggcaaggcccagagaaagcgcctcccctcttgctgcccttctctgcagggcgaggctgacctctgatggcttagtccctgtgctggcagcttctctccacctctttccatcacagcgctgtcggcaggtgaccagaaacatcatcgacacggcaccactttggacggtgtgctaacgggatggtgygcacagtcccctccccgagcttctgagcatgcgcaaagcgagcatgcacctttcaggccggtacttttccacctggcctgaatggtttcaaggagcccagacacagcccaggaaactgaccaatcctggccacttgccgttaatgaggaggtgaccttgtcaaagctcatcacctccccagcctgactctgcttatgatgtgggtccctgaagggcctccctagtaggaggtgtcctgggcctcctgcagagctggctggcacmtgaaccctgaatcctggggaggtgggcatccccgggagatgggrcccgatggcctggctgcttcccagtctgggttgggagcaaaggatggtcacatccagccccatgaggtgatgcacccaccaagagctgttgagagaggaagatgaagacagggcacgtggccttctctgcttgggcatcccccctgcccatccctccaccaatgggcctctcctcaggacgcctccaccgtgcctcagcacacgctgatcagatctctgctccagcacccccaggtgtacacacctcacacggcttgtgctcctggggctggggacacatcccacgtgtctctgagttcgtgatgtgggcamarggcctggaacccgacgtgcactcaagaaacatttgttaaagagaattatcctgaggacccagtggggagggggtgtttggggaagcgggtgcctgaccgggttctgcatgcattctgagctcccgggcrtcctcctctggtggagtggggatgggaacgtggaagggccgtctctgyggaggacggtacatcccacctgactcaggggctcggcatagacttaactgaatgaataagtgaccggatgcctcrtcatcccctgcaggggagaaaccgaggctgtggagttggaataagcaggggcttctggcgggaggagctggtttgtacggatgctggcagggggsgttgtgggcagaggartttaaattggcagctgtggctgctgggacagggggctttgaacccttctccagggaggtggactgagcagatgtggggattctagaggaagccatggggtgtggtcatgtccttccatgtcctcctgtccatacccctggagctgggggcctggggggtccagcaggaggagatgacccagcagctccagccggatgggatgccagatggcagaggggcaccacccctcctctggccaagctgcgtcttccaggtcaccagaggcaaccttgtcccagatgaaaacctgtgtgtaaataacccggcaggtgaaggcaggcaggtcctgtgcggtgcccggggtgggaagcaggtaaccagtggcctgcagcagctcgcrgcctcagccagccctgggcgccrggagctcagtcagcactgcaagactgcacttttctgaggcaggaggtttggggccctcatccagacaaacacgtagctgcgctgaggactgccgccagcatccatgggatttgtgaaagttagagaaaggctccctctctgggtagccacagccctgcgggagcacatttgtgtcgatracaaaaggtgccccttcttcctggcaggtaacccaggctgggtgmacgggagcccacgctgacctcagtcccacctgccccttgctggattgccttgtgcagtgaaaaacctacgttaccrtacagggccatcctgctcacttcctttctgagagtctgtgctaagctctctgcacttktacagttcattctgggctctaaggaactggggtggccggttgggcaggtgggtttcttggggcccagaatctgaagggctcttctctcagtaacttaggggtaccgccaggccgsggaagctgcccgctcaccatgcccctgcccttcgacctcatctacaccgactaccayggcctgcagcagatgaagcggcacatgggactctccttcaagaagtaccggtgagagggcggccagagggtgggcacgtggcccacatgccaggggagaaagctcctccttcacgccctgcccccacgtccccactcagccagctgggcccaggtgggagaacatactgtcctgcatcctgccctatagacannnnnnnnnnnnnnnnnnnnnnnnnnnnnnnnnnnnnnnnnnnnnnnnnnnnnnnnnnnnnnnnnnnnnnnnnnnnnnnnnnnnnnnnnnnnnnnnnnnnnnnnnnnnnnnnnnnnnnnnnnnnnnnnnnnnnnnnnnnnnnnnnnnnnnnnnnnnnnnnnnnnnnnnnnnnnnnnnnnnnnnnnnnnnnnnnnnnnnnnnnnnnnnnnnnnnnnnnnnnnnnnnnnnnnnnnnnnnnnnnnnnnnnnnnnnnnnnnnnnnnnnnnnnnnnnnnnnnnnnnnnnnnnnnnnnnnnnnnnnnnnnnnnnnnnnnnnnnnnnnnnnnnnnnnnnnnnnnnnnnnnnnnnnnnnnnnnnnnnnnnnnnnnnnnnnnnnnnnnnnnnnnnnnnnnnnnnnnnnnnnnnnnnnnnnnnnnnnnnnnnnnnnnnnnnnnnnnnnnnnnnnnnnnnnnnnnnnnnnnnnnnnnnnnnnnnnnnnnnnnnnnnnnnnnnnnnnnnnnnnnnnnnnnnnnnnnnnnnnnnnnnnnnnnnnnnnnnnnnnnnnnnnnnnnnnnnnnnnnnnnnnnnnnnnnnnnnnnnnnnnnnnnnnnnnnnnnnnnnnnnnnnnnnnnnnnnnnnnnnnnnnnnnnnnnnnnnnnnnnnnnnnnnnnnnnnnnnnnnnnnnnnnnnnnnnnnnnnnnnnnnnnnnnnnnnnnnnnnnnnnnnnnnnnnnnnnnnnnnnnnnnnnnnnnnnnnnnnnnnnnnnntcccctcccctgccacttccgtgtctgcctcccggctaactcaatgataattaataaaccacccagggagttgctccatcacccctactgctgctttgaggctgggggcaggaggccggggtcatctacatggagcggggctgaggaattggagagaggggtatgagggaacaggacattaaccagggctgtgaccctgctgtggggaccttggggtggggagagttgctcagcacacccctctcttcctccaccccaccctctctccgtctggaggaaggccaaggccatcgctccctgtctcactgcagccagtgggatgtggggcttaatttagcacagagagccctgctatttattacgtgtgctccagtcccattgacgatcccacatgattttattagggaaaaaagtgacaggcagtgttattgcttttattattaatgcgagttctctatgcactcggctctctcctcccaccccgggcctcttccctgggggaaaagtgccaacctcagcactctgcagacaattctgggtcaccaggaaggacgctggggtgaggagctccttgcagggcctctgagtcttggcactttttttcaggtgccccttccagggagtagggagggcagagggggtggctctggggctgtggcccattgagaatggcctcggagttcgtctggccctgtggttggcttatctatagggacaagacccctctgggttttgaacttgggcctccacccctggagacagcagagggagaagggccctgtggagcagagcctctgcccagctgcagggtccagccctgctgggaccagccttgcagaggaggctcagaagcgctgccctcccaaagacagcccatgggcagtgcctgggaccctgccttttgcatcctggccctatagactgggcacatccaggggtgtcaggctcctgagcagaggggctatgactccctacccaggcagatgcaaattgtatagaggacccaggggacaccagagagggaccccctctccaagcagtgcctcccttctgggtggcagtaatggctacaattcctgagtgctaaccaaggaccatgggccaggagcttccctacaaccctgagacaattgggctgttgtttttcccactggacagatgaggcagcacagagaggtgaagacactcacctgtggtcacacagcagggcagtgtcctagtccaagtgctaacacacactgtgctactctgactccaccactggctggtgacagtgctcgtggctggggcaacttcagcccagggacacacrgggaggttgctgaccytggttcctggtcccctgggggggcaggtgccgaatcagggtcatcgacaccttygggacggaacctgcgtacaaccacgaggagtacgccacgctgcacggctaccggaccaactggggctactggaacctcaaccccaagcagttcatgaccatgtttcgtgagtgccccacagggcaggggtggggtcggaggtcctcctcatggttctcagaggtgacacgagaggcggccagggtctcgctcctccctctctttccttctccagccagtggggttggtgggacccagcaagcatcgccttctcctgctccataagtgtgtgaaccaggaaggaagcctctggtgctatttggggagcaggaagcatggagggggtgtccagggcggggtgacctccccgactccagcagatgtagccttcaccctccaggagggaggttgggcacacagttccagaacacgggggactccgcggccttccagaaagagaggctttccagagtaagctggagaacttccctgggtagaaaggagcaggcaggcagtgggaacagatgcagtaaagagggatgtgggaagaactggaaggttctggaaatgcaggaktgggcttggcttccagggctccaggcaaggaacgtgagtggagctgggcttcagctatttgtttgtttgttttttgagacaggatctcgctctattggtcaggttgcagtgcagtggtgtgatctcctcggctcactgcagcctcgacctcctgggctcaagtgatcctcctgcctcagcctcccgagtagctggctttacaggcatctgcccccatgcccggctaatttttatattttttgtagagaaagggtttcaccaggttgcccaggctggtcttgaattcctgggctcaagcgatccacccacgtaggcctcccaaagtgctgggattacaggtgcaagccaccgtgcccgggtttcagctgtttttaatgatactctaaaatgtatacacacactgacctatcctgttaaacgcagctcactgaaaacaatttcaccttttcttgacagctcagggtcagttctctgcctcccgggcgcatgggcctgcccttctggacggcagaggtgtgcggagctgcgtcccctcctcgtgtctggttcacgctgcgctcttccaccttgttgggaggctctcagctgtcacttttaattgttgtcagtacatctgcctccagcagcatcttgcgtgtggctctttcaaggctccaggccagaaagctagataagyagccttgttaggattgcatctrttaaagtaagagcaacgtagactctgagcrgagtcctgacggacttgcttgtgagtaaagtatgtgatttgtatttggcctgtcaaattcatggcatctcttgtgggtgcttggactattcttttttttctgattctctagactctaggctatattaggggcagatgtgatttttgaataaataagtaatggcatcattgaatcccagaaggttgggaaagtgggaaggttcctggggctcatgcagtccagatgagaaaactgaggcccagagaggtagagcatgcagcctgaggtcacacagctcagtcgggaccagactccttctgcagggcccgtttcaaggttgcatgagacttcttactgtsctcccagcagaagagtgcttggggtagagcaagcacagggagcagatttctggagggaaaggaaatggggagtggaaatagaggcagggaggaaatgatggtgctccgggctgtggaagaggaaaagctacgaagttgagaagcttgggtatttagatcacttagaagggaagcagtcaagccaggcgcggtggctcacacctgtaatcccagcactttgggaggctgaggcaggcggatcatgaggtcagaagctcgagaccagcctggccaacatggtgaaaccccgtctctactaaaaatacaaaaattagccgggtgtggtcgtgggtgcctgtaatcccagctactcaggaggctgaggcaggagaatcacttgaacccgggaggtggatgttgcagtgagctgagatcgtggcactgcactccagcctgggcaacagarcaagattctgtcttgggggaaaaacaaaatagagaaaaaagaaaaaaaggaagggaagcagtcagattggaggctggtaagaggagcatggaggatcagggcaccgaggagtggggtgttttagccaaggttcctgaattcacgtcggaggaccactgaaggttcttcagctagagaatgtcatgaataatttttttttttttgagactctgtcactcaggctggagtgcagtggcgcgacctcggctccctgcaacctccacctcccgggttcaagcgattcttgtgcattagcttttggagtagctgggaccacaggcacacgtcacttagcctggctaatttttgtatttttagtagagagagggttttaccttgttgcccaggctggtctygaactcctgagctcaggtgatccacctgcctcggtctcccaaagtgctgggattccaggcgtgagccactgtgcccagccagggcaacatttttattgaggtgtattatcctgtcggactgcaggtggccaaagatgatgaagcagggaggagggggaagcagagatgggttaagaggcttctgcaatatcctgcactgagaaaatgaggacttgtcccagggtggagcccgctggatgtggatttccagacctggcaaactcctactcatccttcaaaacctcaagtgaaatgtctcctctttttaccatcactttcactgatcccctcatctcctactcctggcagaatgtattgcctctttacctctatttttataattcttaaacttaactccgttaaagcatatgttgaagtatgctagttatttgcttatacatttcttttccctgatagatcatgagccactcaaaaaggggccactaattggtttatctcaatctctctggagccaacctaggtcctcagagaacattaattgattggataaatcgaagaaagtggggacaaaagggaagagggaggctggccagttttaatggcacagagtccaggaaggaagtcatgagcaggcctgttcccatctagctggctgatttctccagggagctaactggggggctgctgcctctyctggccttaccctcgctctgcccccaggagctcttggcttaatggtccctgttattttaattggttgcaatacttccctgtccctctctgactggcttagctaattgtgttctaaatctgcctcttctggtggagttggtggaatgaaggcagtttagtgaaagattcttcagcttcagagagtggtgggaacaggggagagggctgggtggcagtcttggagaagccagaggggaggggaagatggtgccggacaggtaaacagggtcgggcaggggctgctttgcctggcatggacagagcctcctgagatgggagagctgtcctgaccctgaccacccacagaaagaactccaggcttccagggctcctcctgaccctcccaaagctctagaggagagatcgtttggttctgtagttgaattttcaggcccaagaatctgtgagctttgggggcacttacacaggaaagcatcatctcttctaagctgtaccagatgttgattattacgtcttgtgggccttgaggggtgggtgggaatactacagtagatttacacatttgatgaaagcatgcatcccaattggagaaacgttaaaatgtgggggatgtgcattcgaaatgaagaaatagggtatttagaatcaargctgttgtgggaaatcaaggctgggcagctgctcccagcctcctcactcaccatagccccttccgtgcgggaaggtagattaaatatccttggactcaataaacggtttattcgggatcccagtgcgcagaaggcagggctcgtgtgcctgcagattcgtaggtctcatgttcctcttaacccctccgtggsggacagagctttagcagtcactgcactccacacacggccatggaattggagcgtgagatcaaacatgttccctggccttggtgtgtaggagggtgtgtgtccttatggacaaataagtcaaatggcgaggaaatcccggggcaatccctgctgtaacagagacctaactgccgcagatggggccacaaagggaggcacagtccacccmagagaaggcttccaggaggaggtgtcgtgtgagaggggccccgaaggctgagtagaatttcctcatccgagacaagggaggagggcagtgcaggccgaggggacagcagcaggggcaacgcttggaggtgggaatgggaggcttttcccctgtctcatccatctttgtccagcattcataaagccagcccaggctctgtttcaggtgctggtggcacagaagtgaacaaaacagaaccattgtccacaaggtgcttttattttaacaattattattattgtttttggagatggagtcttgctctgttgcccaggctggagtgtagtggygtgatctcagctcactgaaacctccgcctcccaagttcaagtgattctcatgcctcagtctcctgagtagctgggataacaggtgtgcgccaccacacccggttaatgtttgtatttttagtagagatggggttttgccacgttggccaggctggtcttgaactcctgacttcaggtgatccacctgccttggcctaccaaagtgctgggatgacaggcatgagccaccacacctggcctatcctgacaatgatacatgaacaaataaatgtatagtctaatgtctggtcggtaagtgctgtgatgaaaaataaagctgttaggggacaatgagtgactggggtcaggagagacctctcacwggcccatgagcacagttctgtatggagaggggttgtgtccagcagggctctgggtgggctggatggtcaaaggtgcggtgggagggaaatggaggcagagcctggtgattgtcgggcggactttggcatatggggttttgtgcrgaggaggaacctgatatggcctagattcaaaastgtcatttcagagaaaagactctaccaagagagccacaggaatgaggaggcrgctgtcagggtggtcccattgagagctgatatggcctaggccggggtgcagtcacggagaaggtggagaaagttctacctgggatgacagatgctgcctatgggcgcaggtggagggcgaaaagatgggtcagaagcttggggctccagggactgtgaggagggcagagtccctactggtcacccgggggcctcagcctcaaacagggggacttgatgacctcttaggctgctgctgctactgctggtggtgcttcttccttctttcttcttcctcctcctcctgttcctcctcctcctctttctcctcctccttttttcctcctcctcctcctcctccccccccccttcttcgtctttgtcttcgtcttctttgtcttctccttctttcttcttcttacacagggtcttgctctgttgcctgggctggagtgcagcagtgcgatcatagctcagctcactgcagccttgaactagtgggctcaagcgattctcccacctcagcctctcgagtgtctgggactataggcgcgtgccaccatgcctggctgatttttaaatttttaaatagagacagggtctcactatgttgcccagggtggtctcaaactcctgggctcaagggatcctcctgcctctgcctcccagagtgttgggattataggcgtgagtcaccatgccaggcctaggtttccttcmgctctgatctttgtagcagtctccgggaagggggtcrcaggccggggcactgattacaccctccccaccgcaccctgtgccccgccccctttcccacccctgccaaaagaggacctcttgggcggggcagtccagggaggcctggggctgcccttggttgtttggtgaccccattccttctgcgtgctcgggctgcagctcatacccccgacaactccttcatgggcttcgtgtccgaggagctcaacgagacggagaagcggctcatcaaaggcggcaaggccagcaacatggccgtggtgtacggcaaggaggcgagcatctggaaggtgagcgcggcccctgcgcgcgggaagcaccagcctgctcggcacaggcccccgcctgggtcccgcatctcctccttccaggatgcggtgccctcctcccgccccagccctgcatgctggaaatgtctcccatgaaccagttcaggacaaaaagttcctaactgctatttaaagacacccagcctaggagctgacagcttgtctcccggactctcgtaataaatgattccttaattgaggactgtgactaaatcttccacccttccaagaaacagatcaatagacaatgtaagcccagcaagggcgtcttcggtggatgggggggtggtcaggctagacttgggagttctgtgagattagaggcagagagaagcaggagaggcttagagattagaaccccatcttcagggttgggggccccagagaggagctgcctgcatggggtgttgtctgcgaatcatcactaacctgctgtctctctctctgttccttgtgctccccctggccacgaggcagctccaggtatggaaaccgcttgccgcctgccccctctaccctctgctcccttcccctctccagcagccrctccaggggtctctccttgtgatgttctcctgactcaggctctctggggcttgtggctcctgtggatggaccaaggtggggaagagggtgatggggacagcagggtcctaggagccgtctttcctggttcctctgtcacagggaggcaagtccygggaggtcaaggtcctgcttggcatggccacagggcagcccttgggcatgagagggaccagcgttggatgggttattacatcaagcaggtggcatgaggtcaaggttaataacgaagctactgatcaggggaagcccctgtatcctacatcaggcctgttacatgattattggatttaatcactctcccagctgtactggttaggattagatcyggctgtcgcagggaaaccccaaaataatcgtgatttaaacaagatggaagtatattttctttcctgcttgcaaatttcagaggtcgggagggctggtgtggcgttccccggggtcttcttaccttgacccatcgtgtttagtttccaccttggccttgcctcatggttcaagatggctacaggtattmgagtcattatatctgcatcccagccaacaaggagaaggaaggagcagagcgggacaccacgtttcccacactgctcatcagctccatcttggccacagggccatgcccacttccaggggatgctgggtggcattatttccaggcagctcagctcaatgtgcccagccctgttctgggttctatgactgaggaaggaggagagaaggaggactcagggggatctcaccrtctgggttgtgtccacccaagacgctactgttcactgagagcttgctatgtgccaggcattgtgctaagggctcacgtgcatctcttatttaaccttcacacaatgaggtaggtgctgcatgtgatcctgcccactctayaaatgaggacaccagggcacagtgggttagaaggtgacccatagctagtaagcgccgagctgatgttccagcctacatcaatctaagtccagagccaggggtgcttggccctgaccccacagcctgttcagcattatgaagccttggagaatggcagagagaaggcttgaaagcaggaatcaaggtccaagacctctgctgagatgtcagaggtcactgtggggtgtggagcggggagctgggagatgaggctccccatgccgattgccacagctgcagggaagcccgggaagctgtgggcactgggtgctggagaagagggcagagtcggagggtcgtggaacacacagggtctacttttatcagaaaatgctgttaagaaactggcccaagagaatgagaggttatgaagtctggaaagagaaacgttttatctctagcgctggaacttctgtgatagcccgaggcaatcctgttcagctagagacctcaaagaaactgcttccaaaaaaagacatctttgcyctggtgtttgtaaccaaaggaagtcagaggtggctggatggagagaaaaatgaaagcagcatcttgggagagatgccttccagagtacaggggatcaggtggccgagaagcagaggaggaaggaggggagatggaaggtcaggtcatttatcatccttccagggagcaggagctggggacccagggcaaggcgttgggtgaactttgtgctaagcgggtctgtcttattctgcattccccagaaagtggagcctgaggctaaggcttaggtgctattttagtagagtgtagtcccaggaagcgaggggtgaaggatcaagggaatgaagcaggaaggaggcaaaggcagctggttcaggcccggggcaaacccaccctcatccctggaggaaacattccaggccctcagacagtcatctgggtgagcttgggtggaacttttcaatccgtaggtggcaacccatggataaattgtgaagccaactcagggagtcttgactagcctttttggttcgtgtacaattttttgtagaaacatatgctttcatttctcctgggtaaatgcccaagaatatmatggctggttaatactgtagaagtgtgtttaactttttttaaaagttattacgaggctttcaattcttgaacaaattcatcaatgcttgggatggtcagtcttgtaaatttcagccgttctaacaggcatggaatggtgtcttcttgtggtttaaactrgcattttcctaatgactaatgatgaagatatttttgtgtgtttatttgtcttccatatatctttttttttttttttttggkgatgtgtctttttaaaaacttttgcccattgaaaatattaggttgtttattttcttactatggagttgttagagttctttatatatcctggatccaagtctcgtatcaaatatatgctttataaatattttcttctagtctgtggcttgtctctctctttttaaacatatatatattatatatattatataattatatatactatatattatatacattatatatactatatatattatatacattatatatattatatattatataattatatatacattatatatattatatattatataattatatatactatatattatatacattatatatatatatatgtagatagagacagagagacggggtctcattatgttgcccattcgggtcgcaaactcctgggctcaagcgatcctcccgcctcagcctctcaaagtgctgggttacaggcatgagccactgcgcctggccttgtctttctcttaacagtgtctttcagccgggaacggtggctcacgcctgtaatctcagaactttgggaggccatggcggggtggatcccgaggtcaggagattgagatcagcttgactaacaaggtgaaatcccatctctactaaaaatacaaaagattagccacgtgtggtggcgtgcgcccgtagtcccagctactcaggaggctgaggcaggagaattgtttgaacctgggaggcggaggttgcagtgagtcgagatcgcaccactgcactccagcctgggcgacagagggagactctgtcccaaaaacaaacaaacaaaacaatgtctttcaaagagaaaagttcttaattttaatgaagtccagtgttttcttttagggattgtgcttttggtgttgtatttaagaaatctttgtctaacccaaggttacaaagatttctttcctgtttttttgtataagttttatagttttaggttttgcatttaagtctgtgatccattttgcatgaacttttacatataataagtaaaaagttcttttacgtttttgcgtgtagatatcatgtttcatgaccatttactgatgaaaccatccttcctccactgaaatgttttgcacctttgtcgaaaatcagttgaccacactgtgtgtgggtctatttctggagtctgtattctgttccattgatctgtttgtctatcttgatgccaataccacactatctggattactgtagctttataagaagtcttgacatcggtaatataagcctgctaactgtgttctttttcaaagttgttttgtctattctaggttctttgcatttccaaatgagttttagaatcagcttatcaatttctacaaaaaagtactgggagtttgattgggatttcaatgttttttttttttttttgagttctggaaaatgaatatgaaaaattgtagagataatttaagatcaaggatgactctattttactccagagagaatttacttttactcttggcttatagctgggggccctagcaatctcggatcaccttgatcaatatggtgattaagacaaaatggattcagcccctgcaaggactggtctagctctgtttcatccttttctctagggtggaattcctctgagttctaattccaaatatggagcttccatcagaggtccccctccttcagtgaaagaagggatgggcagataagatggatgaatgagaggatggatggatagatggatgagtcgatgggtggatgggtgagtggagggatgtgtgagagggatggatggatgaatgggtgggtggatgagtggatgggtggatgtttgagagggatggatgggtgaatggatggatgggtgggtggacgcatagagttatgggcaggtggacaaatggatggatggatggatgcatggatggtgggtgcatggatggatggtgggtgcatggatggatggtgggtagatggatggataggatggatgggatgggtgagagagagagatggatgaatggactacagagagctccacagctcctcagaggagcttagaggtcattaggggttcagcagatgccaagtggcaccacgtgaatccatttaaatgttggtccccatagggttcctttggaaagaaaacagtttcrtggctaaaagtaatcctgaagcctctgctctagtccaatctctgccattcataggttttcagggccagagaggggcggggcctttcccagtgtcccacagccagttaatggccaacctgagactgggtccacatcttctgacttccagaccaaagggatctcctccatggactttgccttctgtggtttgcatgtggttcccatctcctcctcttctttttccaggggaaggagaagttcctgggcatcctgaacaaatacatggagatccatggcaccgtgtactacgagagccagcggccccccgaggtgccagcctttgtgaagaaccacggcctcttaccgcagcctgagtttcagcagctgctgcgcaaggccaaagtgagctcccatcccccrcaccattctcacacttgccggctgcagacactgaggtcaccacccatgcctgccaccaccactcaggccccttccacatatggacataccccagcatgctctgctgccctgagccccacatctggccagagcccaggggcagagatgtgggtgcccaccaggcaggagaggtcctatagagaaagggacctgggcagggccagcagagcagcagagccgtggctcagtgatggggaagtagagttggactgcccatcctcccccttgcagtaccagtccagccaaatggactyctgggtcaggcctagcttttggagacactgagctggggggtggttgggtgggtggagagaagggtcctggctagagtgccattgagccactagtcctgagtgactgcttcaggggtccctgagctgtactgctggagcagcagttgacacagtgggcaaaaccctgactggaccctggagtatcagctgaggctggagagtctccagccagcttctaggcaccccctcaccctcttttttatgagacagggtcttgctctgtcacccacgctggagtgcagtggtgcaatcagggcccactgcaaccttatattcctaggctcacacagtcccctcacctccacctcccgagtagctgggactattggcatacaccaccacacctggctaatttttaaattttttgtagagatggtgtcttcctacattgcccaggctggtgtcaatctcctgggcttaagcgaccctaccacctcggcctctcaaagtgctgggattacagatgtgagccactgcacctggccccaggccctctcttgatctcaccatagcttgtttcccaaggcatcttgggggtgtgtgtgtgtgtgtgtgtgtgtgtgtgtgtgtgtgtgtgtgtgttgggggcagtggagatgcttgcatgcagtgaataacctgaacaacctcacagaacagccctggattcagaatcatttattaagtgcctttgaggccagccctgtgcactcctagcacaagttacttaaaaaataataattttggccaggtgcggtggctcacacctgtaatcccaacactttgggaggccgaggtgggcggatcacgaggttaggatatcgagaccatcctggccaacatggtgaaaccctgtctctactaaaatacaaacaaacaaacaaacaaaaaatcagctgggtgtggtggcgggcgcctgtagtcctggctactcaggagggtgagacaggggaattgcttgaacccgggaggcagaggttgcagtgagatgagatggtgccaccgcactccagcctggtgacagagcaagactccgtctcaaaattttttttcaacttttattttaggtttaaggggtacatatgcaggcttggtacctgggtatattgcataatgctgaggtttgkgatatgaaggatcttgtcacccaggtagtgagkatagtacccagtagttaattcttccgtctttacccccttcctcctccccactcygggagtccccaggtgtctgttgttgccatctttatgcccataagtacccaatgttcagctcccacttataagtgagaatatgcggtatttggtttctgttccagctttaattcacttaggatattggcctcctgctgtatccatattgctgaaaaggacatgattttgtttttttttatgtctgcgtagtatcttatggtgtctatgtaccatactttctttatccaagccaccgttaatgggcacctccgttggttccatgtctttgctgttgtaaatagcctcacacaagttagatgctgaataaatgtttttgggatgagtgagtgaggttcctggaggtctcttgcaggtgcgggcctgcagctttcttggcctgaaacccttgttcttttcttcctccctccacaatcataaatcatagcctgatagagcaagaagagaccattgataatacctaattagacccccttatttcacaaatggggaaactgaggcccagagaggggaagtgcttgcccgtggcacaagatgttctgggctggcttttccagccctgttatagctcacataacaggctgagcaaaaataatcgctccaggcccagctgcctcctgtgaatatcccgaagcctcaccttgtccccggcatcctggtgctyactgggctgtggcggcccagccctccctgatcactgcgccccttgactctgcagctcttcatcgggtttggcttcccctacgagggccccgcccccctggaggccatcgccaatggttgcatcttcctgcagtcccgcttcagcccrccccacagctccctcaaccacgagttcttccgaggcaagcccacctccagagaggtgagtggaaagcatcctggtccccratcaggaggggccgggacagagacccctgcaggtcctggaagaggcagactgagatgtggggcaaaaggagataggacaagtgtatggggtacctttctttgtccctgtcccactggcaggcacggggggcatctgcaatctctgtacccttgccaggtgttctcccagcatccctacgcggagaacttcatyggcaagccccacgtgtggacagtcgactacaacaactcagaggagtttgaagcagccatcaaggccattatgagaactcaggtgagagcagccacatacagttgagaccccccactagtccacactgctggtcttcactctgattagaaaacggtgcccccctctgggtgagttcagacttgcaggcctgggttggcaaaggtgtccatccctcccctggtcagacacagccctgagccagggcatgtggattggagaatggaatgggggatcccattcatctactcaggtgtgatgtgtggggaatgcctttgtgcagtgagcaacctgcacaaccttacatggcagccctggatctcaaattgtttatggagcacttttgagggccaggtgctaactgaatgttttcacgatggatgtgtggaggttcttgaaactgctgcaggtgtggctttgcagcctttacacagcacatttcaaaatataatgtgcatacagagcgtctgttaatgcggggcaacgcttcgagtagcaagggggcagaacaccctgggtctccagcgaacgtgggtgctggtgtgtgtaggtgcacatgtgtgggctgggtgagagtgaggaggggcttgtgcctgatgctcatctccgcagtggacatgtttgtggcttttgatcgtgccttgtgcttggctggttccttcattctggggaggctcagacctggtgaacgagagagcctcctctcactatggttctcctggatccccttcttgctatagctcagatgataggctgagcaaaaataattgctccaggccgggaatggtggctcccgcctgtaatccagcactttgggaggccgaggcgggcagctcacttgaggccaggagtttgagagcagcctggccaacatggcaggtttctcaaagttagggactgtctgagattggattcctccaggaagtaacatgaaaacagggattttagcagtagcttatttgggaggcaaccccaggaagcaggcacggaggtgccaggtgaggcagggtgtgtatcagcaggtggcacctggagctcatcaccacgggggcctctgcaagatggggtaggtcacatcccagagctgtcctgcccgaggagaaagaggctagggtaggtatcctcctcttcccatccatctgtggctgagggtggtgcctgggatgccagttcctgacacttttggcctgcacacagatgggctcggcaggccagagacagccttgaggtggagtcaccggtgacggagggtggggcgctgatggccctgctgcagggagaggttgtgtgaccttgtaatgctggatcctagcaaagcaccggcctagacagagtggggagggataaaaagctcccttgctagctctcaacgcagtgttgtcccctgtcctgggctggtggcttaagttctggcaaggccttgtagagcaaaagcaactagaggccaggagcrggggctcacacctgtaatccctgcactttgggaggccgaagcgggcggatcacttgaggccaggagtttgagagcagcctggccaacatggtgaaaccccatctctactaaaaatacaaaaagaaatttagacaggcgtggtggcacacgactgtgatccaccaagaggctgaggcaggagaatcgcttgaacctgggaggtggaggttacagtgagccgagatcatgccactgcactccagcctcggtgacagagcgagactccatctcaaaaaaattttaaaaagataaataggaacttggccccttggccacgccctaggaagagggccaggtatttgactggtaccagcttataggcttaaatggggctagaagtaccagtgccaggaaggaggccttaggtagggacctcagtgcataggaaagaagagtgaagggggttaactgattaatttcactgctggaaactgaccaaccccagccccctgcacggggaagctggcaacaaggcgtacaggtaggcaagggggctcctgtcaccccacagtctcctccagcttcttctcccacttctccacccacctccctctgctctcctccctctcccctccccttgcaaaccaatcctctaagacttctcctgcagaggggctcgggcaaggctggggagggggactacatagacttttccaatgtggggagcagcgtttggcccaacytccaagacacattgttaagctaaaagagcgagacactccaccttggggataacttgcccccccgggaggcccagaaagcggggtcgggggagggctgtgtgcatgaaggtgctgsgatagtcgcgggtatttctggtgggacacacaagaaattgataactgggggaaggactgactgtctgcggtgagaggaaacttccctttcattgctttcctgtttggtttttttttacatgaacatctgtttaattttgttaattagttaattaaaaaataacaattacaaaaggattaaggaagcaaggtattgcaaatctgaccagctgagatttgtgctgggccccaaaccaacggaggcccctctgccttcagacccctcccttctgtgggccccacccctccgcataacagctcaccccctcagctcacagcagctcaaaaacatttatgtgcccaagagtcacccggggggagggccttaaatgcagatcctcgagcctatcccgcaccttcccatttaataggacccagcttcgcgtgggaatctgcattttaaacaagaactctgggtaattctaatcttcccattttattatttttttaaaattttctttttatattatttgaatagagatggggtggggtggggggggggtctcattttgttgcccaggccagtctcgaactcctgggcacaagcaatcctcccgcctcggcctcccaaagagctgggattacaggcatgagccaccatgcccggcctaataattctattttagaaaacagatttagggacagctggtggaggctgagagcaaatgagggctgccatcatggggagtggcttgttctgcaagtcatgtggccttttacagggagagggagggaggagcggccaggatggggagaaagaggtgagaagaagaggtgagaagagggaggtctaagacacagcgagccggccccgggcctgacagccatggaaaaccagggcccggcaccccttctgtgtctctgcacctccctgggtttgcctgtggacrtctctgtgtccagagcaaggccattcaaggtgatgccaacactggcttccgctgcacccctccctgctgtcattcccgcaggccagcagttcccaggcaggatcagcacctgtcactctgtcgagactgattagggcgcacacctgtaattagacctaatgggggtaatttccaggccaggcaggctggctcctccggcaggagattcgtggcaggcggaacgtcgtcgkcgtcgttggccgtgagtgtttgcttcacacagggacctttgaattatcttgtgacaagggcttacagacacaggagcaagagtaactcagagatttgctgtcacggagccggggagcggcatttggaggggaaagctcttctctggggagttttatttataacctgagagtgaarccttgtccccgcaagacccccagaagtgtgtggggctcagaggctcccaggacttcgtcatgagtgtttagggaaccagctggggcagcaactggctgccagggtcttcttgggccatcggctcgggaatgagagcaggtcgggacagggctgtgcagagcacggggcttcaaggctgggctggggatgggacctgcagattctccgggacttcgaacttgccccagcgttgagaatacccacgcacagtgcagggggacgtcagtgctggggcaatgtccggcttcaaggacatcagtgactgccgcttccctgggacccttgagtgtcagggatgtccccttggccagaggccccaggacgagtctcctaagaagtggggtacacagaargcaggaccgagcttggcgcagttggactttctagcaccacccaacgctgatgaggaagaaaggaggtggttgcaggcttgagtcaaacagttagatttcacccactggctaaagacgggaaagcggcctcattaggagatgggctgggccaggtcaggtgccaccaggcatggtgggrtggggaggttgaagcctaaaacagacctttctctgagtccgggatggctccttcctgagtcctgactgctgcccctgccctttcaggtcagtgattttctccacggtggctctgcactgggcctgagaaggttaatggaacaggaaggggttggttggttaagaagtcggggggaggcaggagtacccccttactcctctgtcactcttccctccactcccctggtttcttttacccaagctactgcatgcatctgcccacaggacaggttgctgtgtgactattagatatttatttatttatttatttttgagacaaagtctcactctgttgcccaggctggagtgcaatggtgcagtctcagctcactgcaacctccacctcccaggttcaagtgattctcctgcctcagcctcccaagtagctgggattacaggcacctgccaccacgcctagctaattttttttgtattagtagagccgggtttcaccaygttggccaggctggtcttgaactcctgacctcaggcgatccrcccacctcggcctcccaaagtgctgggattacaggcatgagccaccgtgccgggcyaactattagatatttagacagacaacctgtggcctctgtttgggggtttgtgcctktgggggcagggtactttacaaatgtcatctcattcccgctgactgggagatgcccctgtgttcctctgcatgaatgtcccatgtcttgggcaggatacaggcagagctggggatgccttttcattccatgactatttcctgagcacccactgtatgccaggcactgtgccaggcactggagattcagtgtgaacaagccatagtccccaccctcaaggtgtccataagtttatgagagacatgacgaatacacaggagacaataacacaggggctcattctgtgctgggggaagtctggggtgctgggagtcaccaaggaaagtgttcctgtaacaggagtgggggtggggctcagggaaagctccctggagcaggtgatgcctaagagggtgggtgggctgtgggaagaggaggtgtcaaagcccagtaggggacacagcgctgagctttatcctcattgcagttgggacagggacctgggagggggtggggagggatgaggctgggccttgtgggtcctgagcctgagtccyggagggctactggagggtgtgcggggaacggggactctgagctgggtggaagggccaggtggatggggtggtcggctccctgggcatggcacaggatgtgagagcccaccagacctccacccccaatgccgagcatggcagggcccccgacggctgggccttctcccgccccatgtgtctgcccatccctcccacaggtagacccctacctaccctaygagtacacctgcgaggggatgctggagcggatccacgcctacatccagcaccaggtcagtgagccctctggtccctgccccagatcctgtcagaccagaggagggggctgagccagcttcattgtctgcccakggccctgcacccgtgaaaccatccaactccctgctccctcctccagcctgtccagtctcttcccagagttccctcagggctggagacaggcaggcctgactgcgggcctggaaagcagcacactccgggcactcctgctgtctgggcccagccttagagcccaactccacggcactaacagaaacacaaagacttccrttcttagaaaacagtggttcgaaagtctgctaactgattgggatttggtaactgaatgggaagtgaagatccccagactctccgcccacctgctaaggatggcagtgagactggaatgggagattaggatctctgccctgagaaaccaggggacagccccacggtttcaaaaactcggccacctcagcccccgagggagcgcctgggcagrcacctgtccaaggagtacactccttctcctcccacgggtgctcagagtgcctggaagtcgtgggtgaggaggagggcgtgccctattcctggggagtcctggccctccactgcatcctggtggatctgagccaccatgagggctgcaggtggcccagatggagcrtggctctgcaggccccgggtgtccagggtgatgcctggggtgggccttgggctcagggccctggggcaggtggccgtatggctgtaagaaatttccacagatagtacgtgacctccctttccatcttgttggccccaccaatattaggggctgagagagtctggttctcccctgtccctttacagatgggaatactgaaacccccagaagggagagygtattcaggtgagggggtgagggtcagggccgtggccagaaccyaggactggacccagactggaagctcacagaaaagcattcgcggggccctccggcccctggagttgaaccctgcagggagagcctcacagccagcctggggccctgtccccayggagggcagggctcgtgggccccagggtaggaaccccagcctgacctgagcatcgaggcagctccagggcacacaggatgcagagggccctgaatccaagtcctgttctgccatccaaccccaaggccctgggcggatgccrtgacctctgagcctccataattcctgtaagcgatctggagacacgagtgtccatgagaagtaaatgaaataatgcaggtaaagctacctggtattcagtaagcgcccagtagtggtggctcgtactggcacggcagggccacaccttcaggtgtctcccaggcacacctgggtcgcacttccccaccctgacactgctctcctccttgcaggacttctgcagagctccagaccctgccctaccagaggcccacgccccgcagagcccctttgtcctggcccccaatgccacccacctcgagtgggctcggaacaccagcttggctcctggggcctggccccccgcgcacgccctgcgggcctggctggccgtgcctgggagggcctgcaccgacacctgcctggaccacgggctaatctgtgagccctccttcttccccttcctgaacagccaggacgccttcctcaagtgagtgttcccccaccctccccacccagccgctatcatcgctggcccagccgggttcactgagagctctcatgcccagaaccggccctcagccctgccagtgtggggggatgtaatgctttccaatgagtcaggaaggatccagaagggatcctccaggccattatccaggtcattgctgccctactcttggccaaaccctaaactaccagggaaagctccttccattgcctgctctcttccacccactcagccccctgcccagcctgtgggcatcgtcctgtcccagaccatgaaagctgtcccaggtgctcctcctactgggtctgcctgggtccccagcccctccaggccaggcccctctcttctccaggggtcccttggacagcaggtgggataaaggagccgtaacacatytccttacccaggctgggatgggatgggccagagaaggggagcaggcaggactaggctgggggcagcccctaccccgccccagcccttctgcccaagtgaccaacgctgagtgacggtgctgtgyggtcsctgccaggctgcaggtgccctgtgacagcaccgagtcggagatgaaccacctgtacccggcgttcgcccagcctggccaggagtgctacctgcagaaggagcctctgctcttcagctgcgccggctccaacaccaagtaccgccggctctgcccctgccgcgacttccgcaagggccaggtggccttgtgccagggctgtctgtgaatccgcctctgccrccctgcctggcacccacgctggctctctcctgccgcgggagaaagcaccagcaggttctgagccctggctgcttgtcctcctcgcaacccccccaggccggagcttccttccttagccgggaagctggcagaggagagccgtgcccgggaataggaggaggcagcatgccgagcccctgggacctcccaggcaggctccggttctctcctggggactcacrgmagcatcgtggccaagcaggtgtcggactgctcagagtccgcatggcccaggagcaggtggtcggaggcccctggctttgtgcaaggccggatctgggccaggtggcgaaaggggcccagtcgttcttgggcccaggatggggcctctagacttgcaagggagaggaacagggaccaggctgccccacggtccctgaagggtccaaggaggggccctccccatggccctggagagtgggcctgggtggtacctgctccaggcagggaaactgggggctcgcccttctcctgtgaggggagccaggcacacagggcccattggtgtttgggatgtggacagaggggcagggggctgggagaaggctaagccgaggggtcctgtttgtgcctccccttagtcccttcccgattcccccaccctccctctacacttgaggaccacagttgggggtgtagggaccacccagaccctggttgaattgtttctctctcctgcttgttccaacccttttcactctgggcttctcccaaaacccatcctggcatgacctgcaactccaggtggtggatttgttccaaagcctcaatccctaccccctccaaggggcaggtttccagtccagcctcagagatcaggctctgggacccctgcctggggggtggccttcatgcacyagccacttccgcaggtgctgactcccgcactccctggcattttttgcagacaagggcttgggatggaccctcagccccatggtacgccctgcccagtttccagwtgccctgtccacttaccctaggtagcccccyaccccatcagtgccgagtccttgtccctacctccagcttcctccagcctcaaaccgcctctggatctagctgtccttctccragtggcacgcctgccccaggatgccccctttccctcccccccatgcccagagccccgcctgcctcagcgggtcaggccttcagaacactgccacccacccagttttataatcccgctccctctccaggcaaccccacccaccagcctaggcctgctcctccacccttcccgggaggcagccccgggatgctgagagttggtggaggggccaggctggacgcttccygtgggagtcccctccagacctggctggcccctgcagccacagaaaccacgatggcaaaaaatctcattggttctcaaggactaacctgtgggggaaagcaatagagacactctttttctctctttttttaaagatttatttcttgaaataataaatattttattgggatgtgaggtgcagaagaggaactgtgctggattctcgtcttttcctgcggcatccggagctcgcccagggtggagggcagacagccggggtccccgggttctgctccatgtcacttggggcacatggggtgctcaggtctgcagagctgggtgctgtctgctccaagccgcccaaaggaagtccctgctggtggcagtgacccagggtcatctcctggctgccccagagccgtgactgcaggcaccctgacaagcagtggtgaactcagtcatgttcacctcaggctggcctctgcctacctccagctggctgtgacagtggccgcacgaggtcagagaacacaaatccattttgctaagagcctgagccacataatgagaaaatgagccggtgtttacctcctcgggcactgggctgagagtttgttccatgcttgagttgtcatttcaagcactcagctaccctagcaggtaagtactattatgttaatatttccattttacagcgagaggcacagagagttcaagtaacttgcccgaggtcacacagcttgtaagcagggaggtgggatttgctataaaatggggatcattttcaagtcatggtgaggagcaaatggctggatagagtgacagcctggcatggtgaccctgcatgcacgtcttcgctccaggcttttttttttttttttttttgagacggagtctcgctttgtcacccaggctggagtgcagtagcacaatctcggctcactgtaacctctgcctactgggttcaagcgattctcctgcctcaggctcccgagtagctgggactacaggcgtgtgccaccacacccggctactttttgtatttttagtagagacggggtttcaccatgttagccaggctggtctcaaactccggacgtcaggtgatccactcacctcggccaccaaaagtgctgggattacaggcatgagccactgcgccaggccttcgctccaggttttatgtgatcctgtatttgagtcactgcacaatcagggccttccttcccaccaagggttctccactggggcagttttgttccctggaggacagctggcactgttttggattgttgtgacttgagacaggggtggcatgctattggcctccagtggggtagagtccaaggatgctggcagcatcctccagtgcacaggacagccataccacgtaggatgatctggcctggagcatcagcagcgccaagcttcacacaccctgttccaggccagtggttctaaaattttggcatgcatcagaatcacctgattcctgagcttactgaaacacatgttgctggcccccacctgcggagtttctgattcagcagatctggggttgggccctgggatttgagtctttaataagctccaggtgggcgggaggcttgcttgagcccaggagtctgagacgagcttgggcaacgtaatgagacctcgtttctacaaaaaaaaaaaaaaaaaggccaaggtttgtggcatgcgcctgtgttcccagctactcgggaggctgaggtgggaggatggtttgagcctaggagtttgaggctgcagtgaaccatgattgtgccactgcactgtagcttgggcaaagagcaagaccttgtctcaaaaaaaaagaaaaaagaaaaaagaaaaagaaagaaaaaggccaggcatggtggctcacacctgtaatcccagcacttgggaggccgatgcttgagttagagaccagcctgggtaacacagacctcatctctctaaacaaaaacaaaaacagaaaaaacctctgggtgctgctgctactactacagggggccagggcccatactttgagaacagctggtctagaccaagcaggtactagtaggtatttcaaacgtgagagtaccaataacttggtaccagtttttaattaacagtgactatggccattttcttctgttccagcatgtaatgccaggggagagacctcatacaaccaaatctgctcacagagatcaaagccacaggccatcagaattcctcctgtcccctcattttacagatggaggcccgaagagaacaggggcctggtccatatcgtacagctggaggaagagcccagatctcagtccctctctgtctctacctctgtccctctctgctatgctgcttaaaagaggctgagaaaagaatagctgagccaggcattttccatgatcttgtccagcaggaggggggtagggctcagaaacctgaccaaggccttcttttaggaactgagcctagttaggggaaaaaagaaaaaaaaggccaggtgcggtggttcacgcctgttgtctcagcgtttttggaggccaaggtggaagaatctgaggtagaaggatcacttaagcccaggagttcaagcaacatggcaagaacccatctctacaaaaattgttattatttttatttttttgagatggagtctgtcatccaggctggagtacagtggtgtgatcttggctcactgcaacccccgcctcccaggttcaagcaattctcctgcctcagcctcccgagtagctgggattactgggattacaggcacctgctaccacgcccagctaatttttgtatttttagtagagacagggtttcgccatgttaaccagactggtttcaaactcctgaccttaggtgatccacccacctcggcctcccagtgctaggattacaggcacgacccagggcgcccggcctacaaaaattatttaaaaattagctagtgtggcaagtgccggtggtctcagctacttgggagactgaggtgggaggatcgcttgatcacttgagcccgggaggtccaggctgcagtgagctgtgatcatgccgcaccaccgccctctagcctgagtgagagtgaggccctgtctccaaaaaaaaaaaaaaagactatttttttgagcagttttatgttcacagcaaagttgggtggaaagtagatttcccatatgccacctcccccacatacacaggccacccccaccatccacatcccctaccagagtggtccatgtgttccaatctatgagcctacactgacgtatcatcaaccaaacacagttcacattagggctcactcctggtgccgtgtattctacgtgttttgacaaatctttaatgagatgtatccactattatggcaccatacagagtggttccattgccctaaaaatcctctgtgctacccctgtacatctctgcctcctcctaaccctggaaaaccatgatcttccgaccatctccgtagtctcaccttttccagatcatcaggtagttggagccctacagtttgtagccttctcagattggctcctttccccctagtacctcgtaacatgcatctaacattcctctgcatcttctcgtggcccggtgcctcatttccatttagcactgaataatattccattgtctggatggatcacagtttgtttacaaattcacctactgaaggacatcttggttgcctccaagttttggcagttctgaataaagctgctataaatgttcacttccaagtttttgagtggaatccattttcttttctattttcttttctgcttataacagtcacagtcatttgttttgctcacagatctgcaatttgggcagggcctggtggaggtaatttgtctctgcttcacatggcatcagctgaggtggctcgccccaaggctggagaatcacttccaggacagctcactcatgtggctggcaagttggtgctgtcagctggggagctcagcaggggatttgggctgggggccatggttcccatccatgtaggcctttccaaggactcttgtgcttccgtgcagcatggtggctgggttccaagagtgaacatcccaggagaataaggtggaagtgaaaggcatttttttgaactagccttggaagccacatgctgtcaatgctggcatactctattggtcaagagagtcacaaagctcctcctgctgcagctcatgaggaggggacatagatgccacccctcaatgggaggggtgtcaaagtcacagcagaagaagtgctcgtggaatgggatatagtgttgcctctatctttggaaaatataatctgccaaagatgcagcttggtcttccagcatttctggactgttgtcctcatccggtccaagatgggtcccctctaaggcctcattccatccaatgaaagagaaaaaggagagggggagtcagctcatgctgcttctgattgtgctccattggccagagcttagtcacatggccatacttaggtttaccggtttattgtaaaggattttacaaagagtagagatgaagagatgcgtagggtgaggtatgaagggggcggaggacacggaacttccgtgccctccctggacggccacctcccaggaacctccacatgttcagctgtccagaagctcctggacacaatttccaacaactaattcgggtaaatgccaaggaacacgattgctggatcgtatggtaaaagtatgtttagctttgtaagaaactgccaagctgtcttcccaagtggctatagcattttgtattaccagccctgaatgagaattcctgttgctccacagcctcaccagcatttggggttgtcagtgttttggatttgggccattctgatagatgtgcagtggtatctcattgctgttttaatttgcatttccctgatgacatatgacgtgacatatatatttgccatctgtgtatcgtctttggcgaagtgtctgttcaggtcttttgcccattttttaattgagttgttttcttagtattgagttttaataggtctttatatatcaacctacttttgaatcctgtctgaacttttaaatgaagctgaaggggctggctggcagtagtgggggagaagttgagaattagaaagaatttgcagcccagatgtcagtgccaggcagagctgcggctcccacaccttcctctgaagctggccacgcctccttcagccctggcccaactctgaacagtggagggaagggcaggcacrggccggcctcaccaccgccctgccaggtgaccacccctccccactcacaggtgaggaaacaggtgtgatgaagcccctcagcccatggactcacctgagccaattaaaccaaaaaccaaaatatctaggcagggcggctcatgcctgtaatcccagaactttgggaggccgacgtaggcagatcatttgaaatcaggggttcgagaccagcctggccaacatggtgaaaccccgtctgtactaaaaatacaaaaattagctgggcatggtggtgcgcgcctataatcccagctactcggcaggctgaggcaggagaatcgcttgagcccaggaggtggaggttgaggctccatctcaaaaaaaaaaaatttcctatttttagagtcagggtctcactctgtcacccaggctggagccctcaaacttctgggctcaagcaatcttcccacctcagcttcctgagtagctgggaccacaggcatgcgtcaccaaacctggctaattttttttatagagatgggggtgggggggcgtctcactatgttgcccagacttgtcttaaactcctaggctcaagtgatcctcccacctcggcctccccaagtgctgggattacaggcgtgagccaccgcacccagctgggcatcagcatttcataaagcactcctctatgtgtctagtgtggttctactgtgaaccactgcacttacccatcatacctggctagctcctctctgcagccctcatggctttgccctccaaggagggagaggaggttgagtaccaacttggggaggcctcatttgaagccttggcctccagccccagcccctgggctgaagcaacttctcttgcagcccagggcccactaggctgaatccagtggaggaaaaggtgggggatccagctggacctgggggcaaaggatgcaaacaggcctcggctggctccaagacagtcctgaagty

SEQ ID NO: 95500 - DNA, 18095 bp, Homo sapiens
ttgaagggtttgaccttcagaagacaagcctccaggggaggggaatttctattttttggcatgtggataatgaacacaggggagggcaatccctgctccgggctccatgtctttttccagcttgtcaaaataggacgtccacaccctcctttgcccccaagtccccccactaattggcatcaatcgaggaagtctgagcgactgcatgtttaggtaaaagaggaaaggggtggggtggggcgcagtggctcacgcctgtaatcccagcactttgggaggccgaggcgggcagatcacaaggtcaggagttcgagactggcctgaacaacatggagaaacaccgtctctactaaaaatataaaaattagccgggcatggtggtgcatgcctgtaatcccagctactcaggaggctgaggcaggagaatcgcttgaacccaggagacggaggttgcagtgagccaagattgcgccactgcactccagcctgggtgacagagcaagactccatctcaaaaaaaaaaaaaaaaaaaaaatagaggaaaggagtgaacccctgagtggccagctgggtgcctcaacggggtgtctccaaaggcagcttgtgcttgtttgtgaccagggtgacaaaggacttcactgtcctgtagcacagatgaggttccaccctcaggtgggtggaaacagcccaggccattagtgcaaatcccctgcctggcccagggccacgttcagcccactgtctgtttgctttgggacccacccaaggtcacattttagcttttgagaaatgtgaaagtggaaaacattgcaaaacaaaaagcccctggaaaactgtgcacacacccatcccctcagcctgatgctccagcttggctgctaggagatcaatgcagctctgccttcctgctccctgtgcagaggtgccggctcctgcttcctggttcccagctttccttttgggaactgcctgaggtggtttgacacacagctgttgggcttctcttcccttgaggtctctgaaccagggcacccatgcaggtaaacacaaaagcggagtggggtggaatgggggtgctggctgtagcctcggcagaaggggacccgcctctctcctcacgagtatccaggatgtgggactggatattgaccagaccagaacccactttgggcccacatgggagctaatgtcagcaggggcctgtggactgttcccattgaayggctcttcctgctagctgtggttctcagtgtggctggcctggtccagcctggcacaggacaggacctgggagggccacacatttcccacctccattttgtgcccaggggacctgtgccagcagcaagcccttcctgcaaagcagtgtggggaattctgccaggctgcagatggatgggccggtctgcttccaccccttcctcaggtgcaaagttggggttttgcgatcctgtaattactatgtttagcaaagttgccaatttctccctttagggtaattttcaaaartggaaaccaattttctttgtaggggcttctgctggataaaccaaccaccacaaagtctacagaaacatgtctccaccccagcctcactccacaaatgcttctttggtggaaggctggttcctggtttgtgttcatttgggtagagctggggagggagtaggagtcagaaatgaaggttctggagcccaaaagccactgttcccagactaagtttgcctaatcatctgtggttggcaaaacccctcaaagatgtccacgtcataatcactggaacttgtgagtgcgtgttaccctatatggcaagagggattttgcagatatgattacggattttgagaaggggagattgtcctgggttctctgggtggggtgaatgtcatcacagggtccttatatgagggaggcaggaaggtcagagtcagaagagttgtgtcaatgggagcagaggtcacacagagatagactggaagatgctatgctgccggctctcgaggtaaaggaaggggccctgagccaagggatgcaggtggcttctagaagccagaaaaggcaagggaacacagccctgcaattcatcttatattaggttggtgcacgaggaactgtttttttttttttttttttgagacggagtctcactgtcgcccaggctggagtgcggtggcgcgatctcagctcactgcaacctcccaggctggagtgcagtggcgcaatcttggctcactgcaacctctgcctcctgggttcaagagattctcctgcctcagcttcccgagtagctgggactacaggcacacgccaccacgcctagctaattttttatttttagtagagacggggtttcactatgttggccaggctggtctcaagctcctgacgtcgggtgatccacccgcctcagcctcccaaagtgctgggattacaggagtgagccaccgcacccggcctgtttgttttttgagacagagtctcactctgctgcccaggctggagtgcagtggcacgatctcaggctcactgcaacctccgcctcccaggttcaagcgattttcctgcctcaccctcccgaatagctgggactgcaggtgtgcaccaccacacccagcgaatttttgtagtttttagtagagaggaggtttcactacgttggccaggctgatctcgaactcctgacctcaggtgatccacccgcctggacctctcaaagtgctgggattacaggcatgagccaccgcttctggcctggggaaattgcgttttttggcattaaaagtaatggtattagcaaccattctaatacttctgatcttctgcaagataaaaaatttgtgttgttttaattgtgtgtagcaataggaacctaataccccatccaacacgacactcagctttgctcttccaaagactggggaagaaacccatctgctcaggaagctgaggatgccatacgccaaggtgtaagataacatctgaaagtcaagggagcaggagcacaggaagtctggctgccagcataggcataaacaactcctcccagtagatcacaccttggcaaggctgggaggatggaggcctggcagccaaaaacccctttcctcctgtacccttaggagactacactatcttctatcaagacccctggtattgttacatcttttcattcaaaacttgaaacactggccaggtgcagtggctcatgcctgtaatcccagggctttgggcagctgagacgggatgattacttgagcccaggtgtttgagaccagcctgggcaacatagggagaccacatctctacaaaaaataaaaaaacaaaattggctgggcttggtggcatgcacctgtagtctcagctactaaaggggatggaggtgggaggatcacttgagcccaggaggtcgaggctgcagtgagctgtgactgtgccactgcactccagcttgggtgacgatgtaagaccctgtttcaaaaaaaaaaataaataaataaaacatgaaacactgattcacactagggccctaataactcactggttttccctccgagtcatctgtagcagaaaaagaacaggcccacgggccctacggaaaaagttccaactctttcccagggagagggccctctgaaggtgaaggcagagacggggacgacgcagcagcaagacacggatgaccaaaggctgtcggcaaaccaccaggacacaggcctgggacagagtcacagcctcagaaggaaccaaccctgccaacaccgtgatcgtagacttcccaacctccaaaactgtgagacagtcaatttctgttgtctacgccaccaggacactaatacaaatgcctatagatgctgggcaggcagctgagacaaatggagtgggtagggctgcaggtcgccaccttgagagggctctgaagagaatcaccctgaattgcagccacagtcagcagcctggaggtgagggcatgtgacaggcagagcccagaggcccagaagagacctgggtccccagcctcagcaaggacgacaaggacaaggagaccacccaagggatagagctagggtcaccccaccatacactcatcatagtcaaaccactggggagaawcagaaactcgggcaaagcacacactccctgcaagcagccaagaatctcgcatgaccagtctggtcctctggatctccacatgtggccacgtgtggcgcgtggcatcccctccaccccaatgcctggtatggtcgacctggaaatgacatctaggaaactgagaatggaaagccatgtgggggcagcgctaagctttttttttctttttctttttttgagacggagtcttgctctgttgcccaggctggagtacagtggtgcaatctcggctcgctcttgggttcaagcagttctcctgtctcagcctcctgagcagctgggactacaggcacctgccaccgcgtccgacgaatttttgtatttttagtagagatggggtttcatcatcttggccaggctggtctcaaattcctgacctcgtgatccacccgcctcagcctcccaaagtgctgggattacgggcgtgagccactgcgcccaaccagccctaagcttttttttttttttttgagacatagtcttgctctgtccccaggcaggagtgcagtggcaccatctcagctcactgcaaccttcgcctcccgggtccaagcgattctcctgcctcagcctcccaagtagctaggattacaggcatgcaccacaacacccagctaatttttgtattttcagtagagacgggggtttcaccatgttggccaggatggtctcaaatctcctgacctcatgatcacccgccttggcctcccaaagtgctgggattacagatgtgagccaccgtgcccggcccctaagctcaaagagcttgtgagatagaacctcccccttccccggtccttgcaaccccctaggcagtaaagtaccataaaaagggaaaaaccggagtggtggctcatgcctataaccccagcactttgggaggccgaggcaggcggatcacttgaggtcaggagtttgagaccagcttggccaacatgtgaaacacaaactctactaaaaatacaaaaattagctaggtgcagtggctcacacttgtaatcacagctattcgggaggctgaggcaagagtattgcttgaaaccgggaggcagaggttgcagtgagccaagatcgcgccactgcactccagcctcagcctgggcaacagagcgagactctgtctcaaaaaaaaaaaaagggaaagaagttgaggtcaaggaagaccttgaggccatgcaattagggagctgaaatctcctagggaaggtagcttcagggaagggtgagatggcaggaatcctctcctcataaaagcaagtaatttgccatctggcagccttgactccaagtttctggagagctgggaccaggccaggtgaatgcctgctttctttctcgggaaaagaaaaaagggggttctcaggtgtgtctccctggggaggctgcccacaaggaaggggaggctggggaagttagaaaaagtctcccacctgtgaagcagattacctgcaagccaagctctgggttggtgatcaaatcagacctctctgccggcccaggcctgttcccaggcccacggtgggccttgctgagcacagcggctgctcagctgtttccagactcaggatgaagcctggggagggcttggagctgcttcctctttctttttttttttgagatggagtttcgccctgtcacccaggctggagtgcaatgggacgatctcagctcaccacaacctctgcctcctgggtgcaagcaattctcctgcctcagcctcccaagtagctgggactacaggtatgcgccaccacacccggtgtagagacggggtttgagacgggtttctccacgttggtcaggctggtctccaacccccgatctcaggtgatccacccacgtcggcctcccaaagtgctaggattacaggagtgagccactgcgcccggcctgctgcttcctcctcctcagggagacgccacagctctgcggcaagcaatccaccaggcaccagatccccagatacctgcccttcagggagaaatagcctgggatacagagaggcccagaggggagctctggctggacttggcttctcagcgtggggtctgggttcacaggtttgcttctctgctttgtggggaactggttggaggcttgtgcaagcctcttcacctctcagggtttcaggcccccccaactccttcccgccttgtccttttttcttttttaaaaaaggaagtaaagtacagtgggaaacgggccaagctggcagcttgagagatccaagtgcccgccccccvacccgcaaccgtgggaaggggaaccatcttgctcttggccaatcctgcctctctgagcagggatgcagctgggggagtttctggagataggatcaaattctttagaaagggagaaggggaaaggggtctggagaaaggcagcctgggttgggggaagtgaatgacaagaatgaggggggcaaaggccttggaggtgaggggggcagggggttaggcgccagggaggacagaggacccattgtgcggcctggaaccggggccagagggctttgcccttcgcctccctcccgcggggccttccagagccaggaggggagctggggcccggaggcgttggataaagagcccgtgccccgcctccccttgccaactcagtttgcagtcaaccccgcccccgcccgctccgcggactcaaggctggtggtagtgggcctggaggcgcaggatccgacctttctggggccccaggaggaaaaaaaaaggggggaccctgaaccaggtgggctttatcaccacgaactcacagtgcttccctgtgcctcagtttcccctcttcagactctatggctaatgacagagcttttcagatttggtggaaatgctctccggggcggggagcagacggggaaggctgccccagctaatctccgcagccagtmccctcgaaggctgagatctcggggagcacagcctccgattcgcgttttctaggcaccaaagtccctcgctggaggaagaggaggggaagaaggcagaggagaggggaggggcggacggatctggtcctgggctcccgcgcggagccccctcctcccacagccgccgctcgcgtccccgcagcgcatgaccgcggcactgcggctgcagggctctctcccccgcccgcgccggattcctggagcaagggggtggggggctcggaggtgcaggacccatcattccgacacgcgccgcgacgccaggagtcggggatgacgcccctgctccctcccctcgttcctgtttctcggagtttttcgacccctgagcgcgtcgctgagtcaccttcccggaacgcgctcgggacgctctggacccagcggggactgcccgggggccgcgcaaggcgaaggcgcacccgccgatacgcgcgcggagctgcggccccagggaccccgcgtcccagccagtgccccccgacccgcccggggactctcgggtcccgcccgtctgaccccccaagtgttgggaaacggggccgagctgcctgggtcctccggaagagaagacaccgcggaggcgtgccggagttcagggcgccgcccggctaattggctgcgtgctcctcctggacctgcctcttctcgactttaagaagcgatgagagaggtgtgtgggggcgggtggggccggcgggggcgcgcgagccccgcagcctcccgcaggggcttggtttctcctaactctggccctacctgggcaggtcaccaatgggccttggcaacttcttcctccgtctccgccgtaaccccccagggatctaactcgaggtgctcgcggacacgttctgtggcttgccgcgataagtgtatcacaaacacactgacaaacgcgtccctactggcctccaaagaagtgacaacttctgagcgcgtttccggcgccccttcttcacgctgagccagagggggcggggggcacgtaccacatgcttggctttccaatcccgacgggggcccccaggcccatctacactgtcaagcctcctctccggctcggagcccccggcctgtcgcctgctctacccgggacagcgcgctaggcggcctcaggctcggtagcccagctgcagcgtcgggaagttaaaaataacctccgtgggagcgcgggggaggaagaaagagggaagctggtgggcggcgggcgagacgccccggcctggagaggcgccccgggtggcgtgcgggcctcgaatttcgggtgggctagggcagagcgcgcaaaaggggcgctgcatcccggcgccgacagcacccgcgggggcgaggtcgtggcgtcgaggtgaaaccaagggtcccccgggagagcggagccgcgcgcgcccggcgctcgctccgacacgagttcgcgcggagcccgcgcctccgtctgcgctgcgcggtcgctttcgcgcgccccagacactgcgctcgcggccgggcccgggactccgcgcctcgcggcctgccgcctcagctcacccggccaggtcgcggcgccgccttctagccagacgcctaggacgagcggcgggggcgcgcttgccgcttcctaggacccgggcgggaaccagctcgtggcccggccgtgggcgcgggccgtgccggaggcggcgcgctgaggccggaggcgggcagaggccgaggccgcgccgggctcaggttccacccccgggagcgcggggcggagccaggccggcgccgaggctcagtgccctccccgctccgcggcgccggctgcgaagttgagcgaaaagtttgaggccggagggagcgaggccggggagtccgctccagcggggcgctycagtccctcagacgtgggctgagcttgggacgagctgcgttccgccccaggccactgtagggaacggcggtggcgcctccccagcaaaccggaccgactgggtagggccgcccaccctgccttcgcgccgctcgtggctcctgtgcggcccgccctcgcggggccccgggaactgggccacttgtcgcttgggcgagagcaggcggcagctggtggcccggttcgggcttggctttggcgcgacccgggagcggctcccacgagcgccgcgcgcgtcgcaacggagcggggccctgagaagcgcgcgccgcggctcccaccgctctggagctccgggcaggggacacggcaacctggatggctggggcagggatcctctcccagaacttcgtgcccagcaatgtccgctcaagttctgggatttttacgcagctggactcccctccccctggcagccccgaggggtgaggagctagtccgtcggagggagccacggggctctgactcatccgtcgggccggaaccgaaccccaagccccagggagaaagccccggagcaggcgcccttctcagggattgtaggcttagtcacacggcgggggcgccctcggaggcaccggacctcagctctctggacttcccgggaacctggctccccgcgcgtggtcccgggatttagtcgggcgctccccacctctggcagctgcggccccggactccgccagcgctgtcttctctccctcaggtccagccgccgcagggaatgacrccggtgctcctrcagccacggctccgggcggggaaggcgagccccacagccggccctgcgacgcccgcctgggcagcaccgataaggagctgaaggcaggagccgccgccacgggcagcgcccccacagcgccagggaccccctggcagcgggagccgcgggtcgaggttatggatccaggtttgtggggttcctgctgggaagggctgtagggggattcctgttcctcgccaggaatgatggaacgcccagctggacgaaaggggctgtggacgatcgggagaaacattatccctcacgaggccagaagccggccgaatctgagccaaggaagggggtggcaggggcgccgcgtccccaccccaggtctcccagcaaaggccgctcctctggccagggtcaattaccggggtgtttcgggcaccaagttcccacactagtgccccattgttacccgtggccccctagtggtcggttgcggacgtggcctctttggttttgttttctcagcgggcggcccccggggcgtgctcccgcggccctgccgcgtgctggtgctgctgaacccgcgcggcggcaagggcaaggccttgcagctcttccggagtcacgtgcagccccttttggctgaggctgaaatctccttcacgctgatgctcactggtgagtacctctcggagggggtttcgggagcatcccctggcaggggacccccccagtcctgatagctgccggtctccctgcagagcggcggaaccacgcgcgggagctggtgcggtcggaggagctgggccgctgggacgctctggtggtcatgtctggagacgggctgatgcacgaggtgaggaccgcactgcgcggctaggcctggggcttggcgcggtgcgtcccaggctgaggccacgtgtgcttcaacaggtggtgaacgggctcatggagcggcctgactgggagaccgccatccagaagcccctgtgtagcctcccagcaggctctggcaacgcgctggcagcttccttgaaccattatgctgggtgagagcccagggccagagtaggcctgtttcccgtcagtgctcctctaccgcgggggttttcttgtctaagctcccataggctgagatcatttccatttccccttctcccttagtcctggggccctctcctggtgaccccagctgactgcttccatttgctccatctgtcacctaccagtcctgccaactccccagggaccacatggcgctttgccagctcccactccccgggaggaggaagcgggggatacatgggggctcctgtcctgccttatctgactttttccccctgcagctatgagcaggtcaccaatgaagacctcctgaccaactgcacgctattgctgtgccgccggctgctgtcacccatgaacctgctgtctctgcayacggcttcggggctgcgcctcttctctgtgctcagcctggcctggggcttcattgctgatgtggacctagagagtgagaagtatcggcgtctgggggagatgcgcttcactctgggcaccttcctgcgtctggcagccctgcgcacctaccgcggccgactggcctacctccctgtaggaagagtgggttccaagacacctgcctcccccgttgtggtccagcagggcccggtagatgcacaccttgtgccactggaggagccagtgccctctcactggacagtggtgcccgacgaggactttgtgctagtcctggcactgctgcactcgcacctgggcagtgagatgtttgctgcacccatgggccrctgtgcagctggcgtcatgcatctgttctacgtgcgggcgggagtgtctcgtgccatgctgctgcgcctcttcctggccatggagaagggcaggcatatggagtatgaatgcccctacttggtataygtgcccgtggtcgccttccgcttggagcccaaggatgggaaaggtgtgtttgcagtggatggggaattgatggttagcgaggccgtgcagggccaggtgcacccaaactacttctggatggtcagyggttgcgtggagcccccgcccagctggaagccccakyagatgccaccgccagaagagcccttatgacccctgggccrcgctgtgccttagtgtctacttgcaggacccttcctccttccctagggctgcagggcctgtccacagctcctgtgggggtggaggagactcctctggagaagggtgagaaggtggaggctatgctttggggggacaggccagaatgaagtcctgggtcaggagcccagctggctgggcccagctgcctatgtaaggccttctagtttgttctgagacccccaccccacgaaccaaatccaaataaagtgacattcccagcctgctcgtcctgtcctggtgactggggagagaatgggttctcgttctggccgggactatagaatttaatggtaatgatggccaatggtgccccctgggatgggcaatggattttactggccccaggcatagtcrttctggtgggggactcaggaccagagctggttcagcctaatggtgggggggcctctaccaccctgataattatagcacctccaacctgaagcagcctcagagctcagccagctgcctgaccacacacaggatgcagctcggagctggcatgtctcagccagggccacacaagcagctagtcccagcaaatctcatcagagccccatgtggatttagcaggaaaggggaaatatctgagttaagggcattagaaaactgatgggccaggcgtggtggctcacacctgtaatcccagcactttgggaggctgaggtgggtggatcacttgagcccagaagtttgagaccagcctgggcaacatggtaaaatctcatctctacaaaatgtgcaaacattagcagggtgtggtggcggacacctgtagtcccagctacttgggaggctgaggcaggagaatcgcttgagcccgggaggttgaggctgcagtgagccgagatcgcgccattgcaccccagcctggctgggtgagacagagtgagaatgtctcaaaaacaaaaacaataaaaccactggccaccgcccccgcccccccccaaaaaaattggcaaggagcaggagacctcagaagtaaaaaatggcaatatcttgctttttttttttttttttttttttggctcactgcaacctctacctcccgggttcaagtgattcttgtgctcagcctcctgagtagctgggattacaggtgcatgccaccatgcccagctaatttttgtagttttagtagagatggggtttcaccatgttggccaggctgatcccaaacccctgacctcaagtcatctgcccgcctctgcctcccaaagtgctgggattacagtcatgagccaccacacctggtatcttacctttttaaaaggagtctgtcatccaccacaatggtctagggttctagggttctcccagcctccctcagctgtctcctttccctacctgtccctgtggaggagtgccaggcaggagtggaaagaatgtggcagggaaggatccatccaagtctaaactgggcaaccattttggcttagcgtccaggagttgtggcacctgtccaccgccaggtgctatgacgtcggctctcccagaacctggaaggagctgaactggtcagttgtaggtctctggagactacagctgctgggaggctgctctaagctggctcctgaggggcacaccaccggccaggaggaggccagaggactgctccaggacaagaagtacaaaaggcatgcaagcaggtctggcaggcagagggcagtgtgggcgggtgggggtgctgttcacagtggcccccacctggccaggaaagccaggacccactgccacatgccttccctggcaacaaacaaggtctttccttccccaggaagggtgtgtgtgagggacacaaaggcaacggagcccagatgaatggcagagggaggtttaatggtgtcaccttgtcttgctaatgagccaacaaaaaaaaaaaaaaaaaaaaatgcaagtaaaaaaaagtttaatcacacagcactttatacagatatcgtaagcagtaggcattcacatctccacatgtacaatgcactgggaagcacagccccaccagtcactccgggtgtttctcaaacaagataccgactcggttccaaatgccacggtgtgtggtccggctccatcctcccgcagctctgctggctgggcggtcacagcacagcacaggtgtggagcccacttaaggctgacaagacgcatcatgctttggctttttttttgtctttttttctaataagagttaatatctttgcttttgagttttttttccaaccttaaatattacatacatacaccaaaaattacatagctgcaatgtgctcaacagcatcctctcggcctggagcttcacattatcaaaagcttagaaaacttgtaaacctctgggcctgtctctgggcactaggagagcccccgccggccgtccccttcggattgagcctgcagtttgtaagcgaagggctgacagtaggccttctagtccaagagagggctggctcgcttggagttcagtgagctgcacgcctgtcccagtgtgaccatgtgatgggggaggggccctagcacttgccctggccttgtgcagctgctcttgcccccagcagcctccgacagaagagcaaggcacctatagctgttgctttccctgcagctccctggtcctcaactccatgtgcatgtgtgaaggccaccacctctcctgggcgtcacccggaacctagcctggtcccaacctctcttagagagcaagttcaacaggcctgagggctataacgtggtcgacaggccatgtatagccgggagtcagtgacagcagctacaactcccaagggatagtgttgacgctggaggactagggaggacctgggtggtggtggcagcaggagggtctgggacacagggaggcttgagttgaactaaacaggttgaaagggaccaggggaattgttggcgcaacccacacttcatgcaaggcacatgtgctctcctgcgggtctgcagggaaccggcccagagagccccgcggcaggccctggaacacccgcctctgacctgagaaggggcagcaagggagcaagtgccggacattctgctggggtgacaaatggaaaatcggcaacagggttccgattttctttgccacaggggacccgcctgttgaaagctcgcttcaaaatagaaacggcagcatctcaacacacttcttgcacttcagcatcaaactcaccttggggagaagagggcagtgggtttgcagtggggacagaggggcatgggaagaggggtgattccgggggggagtgagcaggcggcggctggcctctcccacggtgatgctctttcctctgtgcctggcagctacttgtcctctgtgcactccggcatgcctgcctctagcagggcagcccggaactgcgtcaggacaccccggatgctcttgatgaaacccttggaaagtgggaagagggggaagccgatgtcagggtagccactcttctcaggtaagaagctccggtagctctttctccgcttctttggtttcacactgggtggcaccgatgcgtctggtgcggtctccgaagtctggtctgtgtggtccctgctagctgaggccaggcyctgggcaccgccctctgagtctgagccctgggaggcctctcctggggctggccctccatcctcaggttcttgttggccggagtctgacagctcggctacagctgggggctctggcgagctgctggccttgggcaccccgttgggcagtgcctgggccttctccagcagggyatgggtttccagccaggactcgatacggttcaccagccgccagccaccagtgctaaagtgttgcctgatctcctgctcaaagacctcggggggccgccgcaccagctgggtcatggactgcaccacgcggatcagcgccatctcattgtaacagcgactgttttcatagccttcctgcaggcctcggtcactgtcgaagccggcttcgttgtagtatggttcatttaccaggatcagacctgtgtgggcgggacaccttccctcagtgggtgagagaggcccacaatgcaggcctaccctccacctgccagggggactatcagagtcactttcctccaccggccctcccttgtccgcacccccgcttcagcccaactgtaccttggatggagatgagcacctggagaaggctggacttgcttgtccacctctctgtcccctgaaacacacagggcaccatcaattctgttccccaggcccctatccaccagtggctcttcctccttcttggctgggggcctggccctatactcacctttccaatccaggtgcccaggaggctgacacacaccttcccattgtcatacaggttggggttcaggcggccactgcattgggagaggtagcagaagtgggggggcacggctgggtagatgttggggagctggatgtcaaacaagtagaggccatcctcgtagggggttcgagtggggcccttgatgagagctgagaagaggtcctaggtagggagggagggagggaggccaaggttggcaggggtggaagggggtgtcctacatgtggcatctgcatctgcacctgctctttcccaggacactgtgcagatcacgcaggaagagcagcacctgggactccagatgccaccagcagtggagaagctaaggacaaatctctctctgcagaacagcctggaatcttttttttttgagacagggtcttgctgtgtcccccaggctggagtacactagtgcaataatggctcactgcagcctcccaagtagccgggactacagtgtgggccaccgtgcccagatgatttttttattttgtgtacagacagggtttcactatgttgcctaggttggtctcgaactcctgggctcaagtgatccgcctgcctcggcctcccaaagtgctgggtttacagccctgagccgtcactgtgcctggcccttgcctggaatcattgaaccctggctaagagaaatactcgaagtgagtttttatcttatcaggtgtttttcctcataaatcattactttaagactgtattccagctgggcgcggtggttcgtgcctgtaatcccagcactttgggaggccgagacgggtggatcacttaaggtcaggagttcaagagcagtctggccaacgtggtgaaaccccgtctctactaaaaatacaaaaattagccaggcgtggtgatgcatgcctgcagtcccagctactcgggaggctgaggtgggagaattgcttcaacccggaggcggaggttgcagtgagccgagattgtgccattgaactctagcctgggtgacagtgcgacgctatctcaaaaaaaaaaaaagattgtattcctcagccgacgtgatggctcacacctgtaatcccagcacttttgggaggccaaggtgggaggactgcttgaggccaggaggtcaaaaccaacctgggcaacatagtgggaccctatctctacaaaaaataaaaaattagctgggcatggtggtgcatacctacagtcccagctactcaaaaagcttagatgggaggatcacttgactccaggaggctgaggctgcagtgagctatgatcacaccactgcactccagcctgggcgacagagtgagaccctgtcttttattttttggcttatgtatttttttgagatggagtatagctctgtcacccaggctggagtgcaatggtgtgatcttggctcactgcaacctctgcctcccaggttcaagcgattctctgcttcagtctcctcacgcccggctaattttttgtattttaatagagacggggtttcaccatgttggtcaggctggtctcgaactcctgaccttgtgatccgcccaccttggcctcccaaagtgctgggattacaggcgtgagccaccacgcccggccaaccctgtcttttaaaaacaaaacaaaacaattcctctaaacacctgctccaacccttatccccaacaaggcaagtagtacaagcagtttcaagctgaaaggcagttccaggctggtgaggcctggggaaggggggatggtctcacaaccagaagctgacagtgagggtttgaactccatgggggaggttgggagaccaccgctccacagacatctggaatctgtgcatctatttgcgtgcatctgtgcacacacgcgtgtgtgtgggatctcaactgacagggcaatgggcgaggtcagtgatgagctgagaagcagggaaggcagagcgcta

SEQ ID NO: 95501 - DNA, 15530 bp, Homo sapiens
tgagatcttgtctctatttattttaaaacgaatgaaataaataaataaaatattttttttttttgagacggagtctcactctgtcacccaggctggagtgcagtggcgccatctcagctcattgccagctccgcctcccgggttcacgccattctcctgcctcagcctgctgagtagctgggactataggtagccgccaccacacctggctaattttttgtatttttagtagagacggggtttcaccatgttagccaggatggtctcgatctcctgacctcgtgatccactcgcctcggcctcccaaagtgctgggattacaggcatgagccatcatgcctggccaaataaaataatttttaaaaagaaaagaaaaattggagcgttttgcttagttgtgttctgaatacttgcagattctttttctttttttttccttttcttacaagttccatggcaggaaatacttatagattccactctgattacctacagctttcctgcatattgcaaacctatctatcatcagggctgcagggagaatgaaataaactgaaccataattgatcagaattggaatgaatgctgaccagacaaattccatctcccctaatttaaagataaccaagggcgcagttctccctccctgagctggtgactgtcctgttttcataaccctgggcagtgcagtgacctcgaggacaccagtggtaaaaactgagtaacatgggagcagctgtaggagtggaaagataagagagggcagtttaccttcctgcagcatgagcagcaatctgagctcctctttctcaaaacttcttaagcttcttaactgcctccttaaactgctccttaaaaactccactttctggctgggtgcggcgggtcacgcctgtaatcccagcacttggggaggccgaggtgggcagatcacctgaggcggctgggagtttgagaccagcctgaccaacatggagaaaccccatctctactaaaaatataaaattagctgggtgtggtggcgcatgcctgtaatcccagctatttgggagactgagacaggagaattgcttgaacctgggaggcagaagttgtggtgagccgagatcgctccattgcactccagcctgggcaacaagagtgaaactccgtctcaaaaacaaacaaacaaacaaacaaacaaaactccactttctgttaggaaaacaaaggtggacagatgggtggtagcagggcctgggttccagggaggactccatcctagggcacaggcctaggtcagggcaatgtgttccgtggaggataacacagtcatttcacctgtggcttgtgttttcttatgggtagggtgagagggctggactagcagatttccacttgccgtgagtcttactgatttctgagtctggttttaaatagattgatccaggcagtacaaaagctcccctcagttcctccctgtacttcagaacagttatttctccattcttgactctacttttctagataaaggactcttgactgctagtgagtagttaacatccactatcctcttatcttgggctacctatggcagtcccagaaggtcactttgccatgtggttactgattcaacgttaaagcttgtagaaccacttggaaaatatcaacctttgagaagttctaggttttaggaaactaaagctttttaacaaatagcaatgactttgcatgtaattgttctattgttttcctctcatttctttttggttaaactttttctggttataaattaatacatattcattactaaaaatgtggacaatatagaaagtcatactgtctatggtatttaatatgcaaacaaaaattgttaataatcctacccctcagagacaattgttagtaccatttgatatattacttaataggcttttttctatgcatttatacatgtatttattttttaaaaattaggatgtgctatgccaaatatgttttgttgcctttttttcactcaatatcatgacctgaaaatttttccttataattaaatattctacgaaaataatataatggcctttctcaacataaaactatatgtatgcactgttcccctattatcatatatatatatatatatatatatatatcttctttttttccatgtcacagaacacatggtttttatatatatagttatagttatatcttggtatatatttagatttttttcaaattacaaacaaccagataaaaatctaaatagctaaattgctatgaaaatttctattatttcatcagtaagacttgctgagcagacaatgtataacgattttagtgtatattgttaaattatgattctgaaaaaagttttaccaattcactttttactggcaaaatatgacattttgttcattttacttcaggctggccaaatgaatatatatgttcacatatatatgtatatatatacacacatatagttttgttttgttttgtttgagagatggggtctcactatgtttcccagactagtctggaactcctggccttaagcgatcctcttgcctcagcctcccaagtagttgggattataggcacaaactactgtaatttaagctaattttatcttaaaaacaaactatttgctcattttgaacatgaaagattataccttaattgttatcctggtatgtgtttatttgattactagtgaggttggacatttttgtccctctttctggttgagaatgaaatttcagatagaattacaattagtctgggagtgacacattttagattggttttataaataaaaccttttccatttctgttattacatatcatatttcaaaattgtttgtcatgatagtttgctgaatgttctggtacacatgtattttaagtgattcagccagacagagcttattgtcataaactcagcttcttaaaaaaacaaatgcatcaaacaattattctctgtggttcccaagggtagattaggtgtataattccataatttgggagtactgaacaaaaccacctcatttcatccatttgactaagatttcctgcatgccagccccaattctagatatgacacagtcatacaagagtcagccatggtccctgcatgcacagagcttcattgtagtacagggcacagatgaccaaaaaaggcaaacatacaaaaatataaaacaatatagaatgtgaagtgttaaaaaaaaaatcaaacaagaagttatcgagctagagaatagcactttcctgctttgggtgtgacagtcagagaatactttaaggtgacatttcagctacacctaaaggaagggagggagcagtgtggcaatcctgacgtgggagggattttggcgggctgaggttgcaggagagatgtggccagatccttaggggtctttcaggtcatagtgaggaggttgagtgttactctgaattcaatggggaagccattgatggtttcagaagaagatcatgttgtattgcccaggtaggaaacagtgaggaatgcaagtgagaaacagtggtggcttaggataagggtaaggagctggaggtggaaacaggtgggctaaccttctaaacaagggctatattgtgaagtcacatgcatgggtatttaatttacttgctggctttaaaccctttcttcctgctattcccaagcctgttaaggttggactgactcttctgcaggggaaatgtcagtttggagtggtggccggcttgtcatttataatttctcaaagatagtatgaggtgtgtctgattaagcaagaatgagattcaaatccacacattattgaatacccaccaattgccatcccctgttctaggagcttttacctgctgctataggaaataagccaaatttaagtcagtacacagataaatcaaattagagcttccatcctactgcttgtaagaaatgccttcttcattctctgagcttttccttccttgaaatgtaaaatcctccagctgcttacttagtccaaatgaggtagtcctgtttactatcgttacgcagaaaagaaactgagaagtctagtcactctgcctaaggttccaaccactgctctggtgaggctggtaccagaaacaagatgttcagctcccaggcataaaggttgtggcaatgggtactccacaccataggacactgggttcctggttacaactctagtgacagatagttgcatttacagttaatcagccatttctcttgacaaaccccacggtccaaggtggtagaccaggttgtgatgcaatcacatgactctgttcctcactgaccctcccccaggataagacaccaccaccaactccaccaccactgtcaccaccaacacggtggattcctccttaagggctgttattgtacatttctgacaactgagacttcttaggaccatcccaggccatcagaagtgttgtaataacttgagaccttagagggaaagggtaaggagttctgatttacaagggaactccttgatcgctttgcattttgttcacctcttcaacaactttcaaatgccactcagcaatagaccaatagcaagacagagctcatcaccttagccaagccaaaaaagagatgttcggtctgaatgctaaaaaaccagggatgtactttccttacagccacacacctgaaaaaggtatagataatactagttatatttatgatgtaaaatatttgcaatgcatttaatgaccaaaaagtcagggatgagtcctaagtctccgtatctgttaactggataggtgatgtcactgactgaaacaaagattataagagggtatcagatgtatgaggaagatgagatctgctttgtacatttaaagtatacagttttatggggtttgggttttttttttcttttgttaatacaaataaaaggaagttctgggtgtcaagttcaagagaagagggtgggcttgagataagagatttggaaatggtcagcatatttatggtagctgagtcataagtgtatatgaaattgactgggaaaaggtcggagctgagatagggcctgaggcacagcaccatctgagaagcaagctcacagaggaaaccgagacggagctctcagggtagcaggaagaccatcaggttatggaacccaaagggagaaaagatttccagaaggaggaatctgtttcacagtatccaaagcaacagaggtcaagaaagacaaggctgacatcagattatgaaattctcaagtagataagacctactgaggcctattttggaaacttattaaccaaggtcatatgattagatcatatttcccttccacaatttgtgcttagagttgtatcacattactcttatcagagccattttgacaatcatctactaagcagaaattggtataattgaggtcttttcatcacatcttactttgctgatttgatcagaagtaaacaagccactttcttcttgaaaccaacaaaatctcatagctactctattccactttggcttttgccatttgaccatggcactgcccagcacagtatgtgttcttctgagttcagtatgtctatttgtgtgtaaggcaatgacttcagtctcccaaccatacctcttattgaaatacgatggaaacttctcttgaacagcatgatatgacattgtttggtcttcacttagtttgggcgtatcatttacatatttagtccacttcttttctcattagtctgacatcatttaggtacggctgcttgcagccaatgtgatcataagcagaaatacaaatataaacacaaataaaatgtcagtacttgattacaaaacaattcataatatgctaacattaaaatttataggtcatttaaatgaaaatataaaatttcaaaatcctggagacccctttcccgaagaatacacctcttgatctacgtttcagaaacacggccagggagatcacgtctgrtgaatggccactgctccttgcacacttgcttttattttttatttcttctctcagggtctttgaaggaagaaggctggagtgggaacctgtgaggagcaacaatagctgtggagaaacgggagtgacaggtcttgatggtttccatgtagttggttttagaattgcttttactccacagtgcccaatagagtgacaattaacagtcaaggcttctttgatacatactcaagcacttaatattacttgaaaaaaaaaaaaggcttccataatgactgttgtcgtttagtaggagacctgggggccggagccgcctgtggacaaccatccgccagcttctctcgctccgtcgattaggaggagtggtggcgacctcggccttcagtgtctccaatgaagtgaaatggcggcagcggcggggatgatgttgctgggcttgctgcaggcggggtgggtcggtgctgggccaggcgatggagaaggtgacaggaggcaacctcttgtccatgctgctgatcgcctgcaccttcaccctcagcctggtctacctgttccgtctggccgccggccacttggtccagctgcccgcaggggcgaaaagtcctccatacgttttctccccagttccattccctgggcatgccatagcatttgggaaaagtccagttgaatttctagaaatgcatatgagaagtatggacctgtatttagttttaccatggtaggcmagacatttacttaccttctggggagtgatgctgctgcgctgctttttaatagtaaaaatgaagacctgaatgcagaagatgtctacagtcacctgacgacacctgtgtttgggaagggagttgcatacgatgtgcctaatccagttttcttggagcagaagaaaatgttaaaaagtggccttaacaaagcccactttaaacagcatgtttcattgggagatatacctaatgctagatgacaagttagtgggtgcagcgcaccagcatggcacatgtatacatatgtaactaacctgcacaatgtgcacatgtaccctaaaacttaaagtataataaaaaaaaaaaaaagaaaaagaaacaaaggagtactttcagagttggggagaaagtggagaaaaaaatgtgtttgaagctctttctgagctcataattttaacagctagccactgtttgcatggaaaggaaatcagaagtcaactcaatgaaaaggtagcacagctgtatgcagatttggatggaggtttcagccatgcagcctggctcttaccaggttggctgcctttgcctagtttcagatgcagggacagagctcattgggaaatcaaggatattttctataaggcaatccagaaacgcagacagtctcaagaaaaaattgatgacattctccaaactttactagatgctacatacaaggatgggcgtcctttgactgatgatgaagtagcagggatgcttattggattactcttggcagggcagcattcatcctcaactactagtgcttggatggacttctttttggccagagacaaaacacttcaagaaaaatgttatttagaacagaaaacagtctgtggagagaatctgcctcctttaacttatgaccaactcaaggatctaaatttacttgatcgctgtataaaagaaacattaagacttagacctcctataatgatcatgatgagaatggccagaactcctcagactgtggtagggtataccattcctccaggacatcaggtgtgtgtttctcccactgtcaatcaaagacctaaagactcatgggtagaacgcctggactttaatcctgattgctacttacaggataacccagcatcaggggaaaagtttgcctatgtgccatttggagctgggtgtcatcgttgaattggggaaaattttgcctatgttcaaattaagacaatttggtccactatgcttcgtttatatgaatttgatctcattgatggatattttcccatcgtgaattatacaactatgattcacacccctgaaaacccacttatccattacaaacgaagatcaaaatgaaaaaggttgcaaggaaccaatatatgtgatcatcactgtaagccacaaaggcattcgaagagaatgaagtgtacaaaacaactcttgtagtgtactgttttttttgagtgtgtaattctaaaagccagtttatgatttagtattttgttaactgaatggttctatcaaatataatagcatttgaaacattttctaatagctatgatacttatacatgtgctttcaggaagttcattagtaaaacaattgttcaggaggatctaggtaattggcagattctaaataatataatttccaggtagtaattttaagagtactcttagctcttgccaaataagttcagggtattcaaatcttggactagtcctgcaaggtataaagaataaaaatcccggtgagatacttggaaacctcaggttattatttatctgggcaattattgtgtgggtgaggatggaagggcagggaataattgaacatctaaagccttgaatgagagaatactaattcttttggtatgatgatactcagaaatggagatgttgtagaaaaaaaatatcctttggaattttaactaaaatcactgaatataggaaattaagagatccgggaccatatttgataagatttcctaaaaataatgtaattattaatgccaaaaactgctcatgtatcttgatctaattacgaaataattacatatttacctgataaatatgtatctaggtcttcaaggtcacatttatgtggaagtccaaagtcaagtccttaggggataattttgttttggctcagttgttccctgcttcctctctctctctttttttttttttttttttttgagatggagtctcgctctgtcgcccaggctggagtgcagtggcgcgatctcagctcactgcatcctccgcctcccgggtttaagcaattstctacatcagcctcctgagtagttgggattacaggcacctgccaccacgcctggctaatttttgtatttttagtagagacagggtttcactcttttggctaggctggtcttgaactcctgacctcgtgatccacccgcctcggcctcccaaagtgctgggattacaggcatgagccacatgcctggccctccctgcttcctctctagaatccaattagggatgtttgttactacttatgttgattaaaacagttaacaaactttttttctttttaaaatgtgagatcagtgaactctggttttaatataatctgaaacaaggtccttgggagtaatataattggtcacattctgtaaagcacattctgtttaggaatcacttatctcaaattataactcagggcctaactatatgagatggctgaaaaaataccacattgtctgttttcactagatgatgccaaaatattttgctttacgtatattacagttctttttaaaacactggaagactcatgttaaactctaattgtgaaggcagaaactctgctaatttttcacattaaaattctctttgaaaaaatacaaaaaaaaaatgactgttgtcaccatagcgatcagcagcagaactcattaagaagacctggctttcttcttcgtgtggaagagtaggaatgcaaagcgtggaagtatattggacattaattatttttgccccataagaaaggacattttcagcagggcacggtggcgcatgcctgtaatcccagcactttgggaggctgaggtgggcaggtcccctgaggtcaggagttcaagatcatcctggtcaacatggtgaaaccctgtctctactaaaaatacaaaaattagccggccatggtggcgcacacttgtaaccccagctactcaggaggctgaggcaggatcattgcttgaatccgggaggcggaggttgcagtgagccaagatcctgcaactgcactccggcctgggtgacagagcgagactccacctcaaaaaaaaaaaaaaaaaaaaaggacatcttctaagtgccgtttagaataatatagtacttagtacaaagtactgcaacttaaaatattatgtcttccttgcaaactgtatcttactcatgtttgtttatcttctttccaatatccatgctccattgtttgaaactcataacaagtgcttcataaatgctgatttgaagaagctgggaagtaagattaagtggcaagtccaaggttaccagctactaagtatcagttaggactcaaacctaagacgtttaactctgcattcagtgacacaactgtcatttaaggagtgctgaggaagagaaagcagctctgacatccaggtgctggaactatcagctgggccttggtgttgctaagaacttttctggaccatggtgttctgtcgaatgaaaacaatttcacggaacaccaaagtcagacaagagcattctgtaaccatgatcaagacaaaaacaagaccacgtcataattttgtctgaacacggacaaaatttaggcactgtctaaaccacaaaaatgacaaatatgtgtgactgttgcttctttatcattcatggctttagcctctgtctagtcttgactcctaaataagacttattaagatacccaatcatagaattactgccatttcctgacagcaaccaatccagagtaaggccttgctttcttgaactcttcccaaaatcacataacgcaagcccatagtaaattctaacaccttcttactgagatgcccccacggttcctcatgcatgcatttctcctggcttcaagaagtagtagctcaattcttttactacaagttgttcctggtgggtgtgttggagagcactgacaactcctcctatgtccaggggctgtgttgtgtatacatgctgagtgtttaattagacaaccctgtaagacttatcatccccacgtggcagataaagacatggaggttcatgaaaatttaacgatttgcccaagtcccccctcccctccccaggaaaagccagcgaccacattccaaccctccgctaactctgcattgagcactctctttcctatgccctccacctgcgcccattcccctcttctgcgggccgaccgggatcctgctgggggctacagcccaaacatgttacttttccaactgttgttttatgtgtttctatgagaaaggatattcggattcagaaatgctttgcaactccagagctgttgagcctgcggcgcggcccaccactcaacagcggtgctgagtggctgctcggtcgcgcgggatccactccgggcctccgagggtgggtgcacgatccactagccactctccaggggagagtgacgtccrggtggaccaatcgccgctggggcaccgaccgctgggcccaatcgcaggagagccgggtagaacagtgacagcgccgcggcagccgaccccgcctcctcggcggacagcgatgctcagctggctgcggccgagtcatcgcctagcgctggcagggccgctgaccgaccgacggaggcgccgattggccgattgtccactgcgcagaaggagcagctgctccgcgccccgccgcgccgcgctgaggccgaggtccgcagggccgcggggaagccgagggctgccggagaaccctgcaggtgtcactcgggacgcggaagtgcgcttgccgaggtttgccttacaatacgcttgagactccccgacaagcgtaatttggtcgagttcgacgggaaagtactctccccaccccagcgccggccgcgtagtccgaggttactgtccccggcgcgtcctctgttgccccagtccagaggctgcccttgaacccgggcgcgcacgagcgcagggcatccgaggcgacagcccctggcacggcccgacctgtacccagcctggcaggaagactgtaatcgtggggtgagttaaaaataaggccctttcgattgggagctgctttttaaaacgccccctccctgtccgtttttaatacgcagcaaaataacaataacaattgtgcaactgtcgcttcccaaaaggaacctcattgttgaacttacgaaaaatcagttggcaatatacagtgtgggaactgtactgtgatcattggctaaccaagatgggtgacagtttatgatttcaaagactcaaaggcggcttgagtcctacaatgtcctactcataaaaatggaaagcatggcagcctcaggttgttacagagtactctactccaaagtaaaagttattctctgagaaagtgcttactgccttttctgttctctagtttgcttgtttaaacatttactccacaaaattgctcaaacttacccatctttgaatatctagcctctgggatgagacagatgatctttctccgttttcactttttatagaatacagctacctacccaggcaatatgaagattttatttgtagaacctgccattttccttagtgcatttgctatgactttgaccggtccactgacaacgcaatatgtttatcggagaatatgggaagaaactggcaactacactttttcatctgatagcaatatttctgagtgtgaaaaaaacaaaagcagcccaatttttgcattccaggaggtaagaaattacaatatccatagtatttaataaaatgggaatgtataccgggctttgagtcaaagaggaccgtgaactcatcatccattggtctctctagggcggccatcaaagtcctaaatcccaaacctaatggcctttactgggaactcacctcatttgaagtttcctgacacctttcaaatctgcctcttcttcttaaaacaccctcctgctctgtgacactagctcttctcctttctctcggaaaatttcaccacagtgtcatctcttctgtggctgtctccttgctttgtcctaaaaaaaaaaaaaaaaaaaaaaaaaattctgaaaattggggcagggcaggctggaatgagctacttggtggacaggggtggctgaaacatggtgtttctgtctctcacttgctctattcttccccaatccttttactgtttctgcatgtcccagctttcagggactctagaaagtggcccatcactgaagattgtgagccagtgtctgtcacaggatggggtggaggagcatttattatttggtggtggtatcaaatcagccttggctctcacgtgttgaggagcagctgtgtggggacatctggagtggggagtacccaccgttgacaccaaagatgtttagccagatattaaggaggctttcttcctccctctccagcaatctccccagtttttttgtgtgtaaaacaggaggcaggcacttcaccattctcctggtcccttgggcagtttttgacaaaagtctaccatttcaaaatgcaaagagatagtatccaggtttggaaatttttttttttttcctacaatgcctcaaaaacaaatcacacctgtaaactctaaactcttcttctgggggatattttgtgattgtaaaggagtggtgctgccttcccagtgaaagatgaaatgaattaaaaggaattgagtcacctcctgctggctctgtgagtctctgtgactgggagaagagcctgagaaggaggaaatggcaaaccgccccagaggcaaggttctagcacttcccgaggtgtcaggtggaaccttgctggggtgaggttaggcaatttggcacaatccctaatcttactcatttcctcattcccatgggaaacgttttcttgggagtgattatttctgagcagcctggaagacatcaaggttctggcgtagagtaaggtcataaaaaaaaagggccctgagtctcacccagcggtcttatctcccttcaagaatgtctcctaggtcattcccgggagtgagaagcttcgatcggctcacagtttctttttktaagtgtttattcatgcattaaacaaatgtttatcacacattatcctgtggtgacaaggataagcaaaacggctctgaacccgagaagcccagagtctctctaggttgagaaaaacacacataaacagaatagagtttaacaaatcctcttagtttcaaagttggggtcctacagcagggatgctcttcagatttcggctctggagacgtttgttaatatacatacttgaatcccatcctggaacctctaacacagtgttttttaaccttgactggacatgggaatcacctgaagtgttttttattttattttgtttattatgtatttatgcatgtatggtactttttgagacagggtctcattctgctgcccacgctggagtggagtggcgtggtaatagctcgctgcaactttgaactcctaggctcaagggatcctctcacctcagcctcctgagtagctgggactacaggcacgtgccactacactcagctaatttttgatttttttttttttttttttgtagagacagggtcttcctctgtttcccaggctggccttgaactcgtggcctcaagtgagcctcctgtctggtcctctcaaagtgttgggattacaggcgtgagccaccgtgcccggtcttattttatttttttaattgacagataatcattgtacatattcatggagtatacagtggtgttttgatacatacaatgtatagtgatcagatcaggctaattagcatatccatcaactcagacatctctcatttctttgtgttgggaacattcaataccctccttcttgctatttgaaactatataacatattactgttaactgtagtcaccctgtggtgctacagaacaccagaacttattcctcctgtctagctgtaattttgtatcctttaacaaatttcttcttacaggctcatcaatttctgtatttgattctgtgctttcttttggctgacctgtaggagcaggccccctggttgcagtgggagggaccagggaggagaggacaagaatgtctgggaaagtctgctgctcttgccctcttggactgagggaagacgggccttggtccagccagcttggtggcttctgcaaccatacagggggcaagtgttggcccacctccagcctggcccagctgctgagagccccctactgcccacagcagtggtctcatgtcaaagatttttgccgaattttcaaattgactttttcatttattgtttcttaattggattaatattcaagagaacctactactctagatcccttcccttaaagttggtgctcttagacctctgggaaccagaaaccacccctaccctcacctgccacccacgctggagtggtggcctactctctgtttgctccttaggacaaaggaacatttttgtttcccaggaggcaccaccatcgccttcagtgattcattcaatgactaaaaacggtttacatctgttttttaaatcagcttagcatttcccagtatacaaatggcacacactttttatattgactttggaaaatacagagcaatggcaagcaaaaaatgttttaagatcatgcaaaatttcttccatcaagtaactagtgtaatgattgacacatctt

SEQ ID NO: 95502 - DNA, 107364 bp, Homo sapiens
  misc_feature (1)...(107364): n = A,T,C or G
cccttaaaattgtgtttgccctgtttattttctgatcttctctttaacctcttcctttcccttagcacctgcttccagttaatcaccaatagtggtttttaacctaccagatgttgccacaagtaagctttcactagttctctatttctgttattattgcctcaagttcatatccttctttctcgactagtgattcgtagccagggcagttgtgtctttttacccccagagaacatttggtaatatctggagacatttttggttgttacaactgggtacttggtgcttagtggtatttagtgggaggatagagatgctgctaaacatcctacaatgcacaagacagccccccacaagaaagaattatccaaagtcagtagtactgaagttgagaaaccctaacctagactactgccagagtccactaatttgtcgacctatttccacttttactccctcttccccaattcttcctccacactgccacagaccttcctttctaaaatacaaatctgattttgtcatttattctttaccatggaatgatcctcagattccttagcttaggaaacaatatgtttatatttacttatttattttaatttttttttgagagatgagacatgtcactgcagccttgacctcctgggctcaagcgatgctcccacctcaggctccagagtaggtgggactataggcatgggccaccatacccggctccttttttcattttttgtaaagatggggtcccactgtgttgcccaggctgatcttgaagtcggctcaaacagtgctctcatctctgcctcccaaagtgctgggattacaggcatgagccactgtgcttggcactaaaacaatactttttttttttttttttttgagactgagtctctgtcacccaggctggagtgcagtggcaccatctcagctcactgcagcggcaccatctcagctcactgcagcctccgcctcctgggttcaagagattctcctgcctcagcctcctgagtcgctgggattacaggcgcctgccaccacacccagctaatttttgtatttttagtagagacagggtttcaccatgttggccaggctggtctcgaatttctgacctcatgatccgttcgcctcagcctcccaaagtgctgggattataggcgtgagccaccgtgcctggccaatactttttaaaaattgcattcaagcttcatcttttgttctcaaacttcaccttctgctaatggtgaactgcatacttgtggtttcctctaaacaccatcatgtctgtatacatagttttcccctaacctatactacatacttccatctcatattttcctatctaggcacatttattcttccttcagaactttactcaggcattcacttttctctgtgaagctacctttgtttctgctctattcatacatgattacttatgcattgttatatcacagtgggttgtggtttgtttacatttctgttacctcctagcctttaatctgtcttcgagcgtaaggtgtgtgttgtgttccaaatacttagaacagttcctgatacaaagtagattctcagatgtttagttgaaagtacatttttttcttcagggattaattagtaatttggaaattagcttatagatgagatattgttataatttacattctatgcaataaaacttttctatgtaatctttcgcctcaccatcatgttttacattgctaccatctcttttcagatgttattttgtattttgtcgcttataatggtaccttaaatagtattgataccttagggcaggagtgtccaattttttggcttccttgggccacattggaagaattgtcttgggtcacacataaaatacaccaacactaatgatagctgatgagctttaaaaaaatggcaaaataatctcaatgttttaagaagtttacgaattcttgttgggccacattcagagtcatcctgggcctctggttggagaagcttgctttaggatattttcatttagttacacagagaagattttacttttggattagagtttaatctctggctatttattgaaaaaatttagggtttataatggcacatgtttagagatctcttctacctattgaggagaggctttaggctagttaagggttttagggcatggagtggaaggagaggaatgatgaattccctttttgaaatgaagaaacgtaatttaatgagtgcagttaaagagggaggatgatacgttggatgtatttaaaaccatttttggggacgggcacgtggttcacgcctgtaatcccagcactttgggaggccaagacaggcagatcactggagcccaggagtttgagaccagcttgggcaacatggagagactcccatctccacaaaaagtatagaaattagctgggcgtggtggtacacacctgtagtcccagctcctacggaggctgaggtgggaggatctcttgagcctgggaggcagagattgcagtgagctgagattgcaccactgcactccagcctgggagtgagaccctgacttaaaaaaaaaaaaaaaaaaaacccaagaaacaaaaactaaccaaagagcaacaaccttttttttcaatgttgtttactgtactactacatagaaagtgaattgtattgactgtaataactgtgtcaaaagtacatttgaggcccagtgcggtggctcatgcctgtaatcccagcactttgggaggccgaggcaggtggatcacctgaggtcaggagtttgagaccagcctggccaaaatgatgaaaccccgtctctaataaaaatagaaaaattagccaggtgtggtggcaggcgtctgtaatcccagctacttgggagactgaggcaggagaatcacctgaactagggaggcggaggttgcagtgagctgagatgataccactgcgctccagcctgggcgatggagtctcaaaaaaaaaaataaaaagagacactgtctcaaaaaaaaaaaagtacatctgaatttgtgaaggatctgaattacggaagaccttttaaaataattttcatgcattcagatatatgacctggaatttaggtgtccatgtataaatcatttgacaacctgagattttgattaagtaaacgttctttgatatgttgaactttcctgatagaacaaggttaattttagctcagaaattttcttaaatttacatatatgtgtgtgtatatatatacgtgtgtgtgtgtatatatacatatatatgtatgtatatatatatatatatttttttttttttttttttgtagagacggagtcttgctttgtcacccaggctggagtgcagtggcgtgatctcggctcaatgcaacctctgcctcccaggttcaagcaattctgcctcagcctcccaagtagctgggactacagatgcacactgctacacacggctaatttcttttgtattttagtagagatggtgtttcaccttgttgctcagtctggtcttgaactcctgagctcaggcaatctgcccatctccgcctcccaatgtgctaggattacaggcatgagccaccgttcccggccaaatataaattttaaattagtaagtgtctaattagggttatattactgtatgtcagagccttgtagttttctatttgaacacaaaaatgtacaatttaattcttatactctttccaaggaattaagttactagaaataacttgctttaaaattctttcacttataacgtggttccatggcatgaatcactaagggtacatacttattcttattcacaaaatttccctctatggcttttctaaagtatgatagcaaataaaaaaaaatgttccctatgctatagacatagagagtaactagattggttcaagattgcataaaggtggaggtatgttagtctcataaaactctgttcgttaggctgatgtggtggctcatgtctgtaatcccagcactttgggaggtggtggatggcttgagtccaggagttccagaccagcctgggtgacataatgaaaccccatctctactaaaaatacaaaaattagcctggcgtggtggcacatgcctgtagtcccagctacttgggaggctgaggtgggagggtcgtttgagcccctgaagcagaggttgccactgagctgtgattgtaccactgcattccagcctgggcgacagaatgagacactgtctcaaaaagaaaaaagaaacaaaactctgtccactgccataattattgagtaagtaggcattctagttacctttctcaatgcaagtttagttatttttgtccttgtttttttttgttattgttgttttttattgtttgtttgtttttaaatttgggatggagtctcactctgtggcccaggctggagtgcagtgtcatgatctcggctcactgcagtctttgccttccaggctcaagtgatttttctgcctcagtctcccaagtagctgggattacagacatgtgccaccatgcttggctaatttttgtacttttggtagagatgggctttcaccatgttggctagggctggtctcgaactcctgacctcaagtgacccaccacctcggcttcccaaagtgctgggattaaggcatgagccactgcacccagccttgtcctctttaaatcaaagacagtatagcagatgcacacttgtggagtggagaatctaatttgcatggaataatttacataggcattatttgcaagattttgaaatttggaaattatgtcttttttaaattggttctctttatactagaaaacattattaatatatttgactggctataggtttttttttgtttttttttttttaatagagacagggtcttgcaatgttgcccaggctgttctggagctcctgggctcaagtgatcctcctgcatcaacctccaaagtgctgggattacaggcatgagccaccatgcctggccagcatctttttttgaagaaacttaattttaactctttgtttcagcagtcttatacctcatgacagaacaatgagtaaacatatattttcttatttcagagtttaaattaattaccttcctaagcatgaattagtgttttctgaagggaaaaaatacatacaagttttccttaagatgcagtctagtgcaaatttgctgtaattaagagaagtgagatagtggaaacaagcactaattttcatgaataaaagtcctgctaaccactattaagatagcttattaattttcttataatgttaggcaaataatttatgattttattgaataatttattcattatcaatctgttcatattattgagatttaaaagaccaatttgtgttactgttttgttgttgttttttagtctgaggtttttttttttcattgaatactttagggtgaatgcctatttaagatagagtgagttgtactcaagtctaacgtgcatagaattaaaattttttaaaaatcaatttattaggaaacaactgcgtttttaaaagtgggttagttctcagtaggaaataaagtaacaagatggtgagctgaaaaagttgtagtttggcgaactttataaaaaagaaaaatctgtattctgtgtccttgaaaccatttcttcatattgcagtgagaataggtaagtgacagtagaaaaaattttgcaaagcatttttctttgctgataagttaaatttctattcattaagtaaagtcgtataaaatcagattaaatgtatttttctaaaaacatctgttgctttatataatattctttagcccattaggagtgtgggttattttggaggtgtgggtttggtgcaggggtgggaggtggtgggtggtggtaaggatattagaaggagtgttttagaaacttgtttcctatcccaccgttcccagtatcctgtatatgttagttatgttagtttagattagtgtgggggatgttaggagtggcctggtttctttccttctttttcctagccaaggaagtatcgcctggggatgctggaggagaggctagttccgatgggatcaaaggcacgaaaagcaaagaaccctattggctgccttgctgacaggtgtaaatcaggagtacccatcaatatggtttggtggaacagagtcacagaaaacaatttacaggtaaaaataatttttattagacatttcttgaaagtgaatgtcttggctgctttctgtgtctgtttggggtggtggttgtgaaaggattggatgacttagctggtatacttaggtaattaaaaaaatttttaatcagaataaagttagtgacccttaaccaactaaatgattttttcttggtggctttttgagcttttcctctttgtagaatattttacttttgtttgtttgttttttgttttttcagacagagtctcactctgtcccccaggctggagtgcagtggcaccatcttacctcactgtaacctccacctcccagattcaagataccatgcctcagcctctcaagtagctgggactgcaggtgcacaccaccatgcctggctaattttttgtatttttagtagagatggggtctcgccatgttggccaggctggtctcgaactcctacctcaggtgatctctgccttggcctcacaaaatgctgggattgcaggcatgagccacctctcctggccgaatattttactatatttagttaaatttagtttttctgttttcaattttgttaatacttgagttcaattatttttactacccaagagttattcaggataggactacattgaagagtcatataaggccgggcatggtggtgcacgcctgtaatcccagcactctgggaggccgaggaaggcgtatcacctgaggtcagaagtttaagaccagcctggccaacatggtgaaaccccgtctctacaaatatacagaaaagaaaagaaaaattttagccaggtgtggtggggagcacctgcaatcccagctactcgagaggctgaggcagaagaatggcttgaacctgggaggcggaggttgcagcaagccgagactgcaccactgcacccactccagcctgggcaacagagcgagattctgtctcaaaaaaaaaaaaagagtcgtataaaatttattacacaaagtcacatttatttggaaatctgaagaacaagatgcttcatatgttgtctttttaacatttttactaggaaacaaaaattatatgtaaacaaacttgtcaagagttgctctaaaactaacttcaatagtatgttgtcatagagtcattacaaatacattccatctttgactgtaccttttttgtcaatactgaataatgcaaatgaaaatttatgtcaggtagtttctatataatattttgaagtaccaacaaaaaaatttatatgccattttaatctggattataattttatttccatttttaaaaaattgataattattctgtaatattgttttattaaccaaatttcaatttagccagaggtagaatgtctttactcccaaacttgcatttaaaatatatcccaaggcaaagcctataatcccacatgtacataccacacacagaaaagatataacaaaggtaacaaattggttttatttctgtttccaaccttatgttataaataggttccacagtattttgttctgtttattactgatacatgagtagtatctgtattgccttgggcataggaataaataaattattccaaaagtaaatattgcaaaatgtagtatttgctccagctgatattttggtaatattttctaaagataagaaaagacaggggtttcatataaccatatgcttcaaatttcattggaaagttttggctatgtcaattatgaataacagtatagtttttttaactgaatttgcttgtcttttatatcagtagtggagaggtttttgatacgggttgttacaattagtttttagtttaaaaaagaaggtctgaagaaaaaaattggaccacagctatttaagagcagatacaagtgaaattggaattacttgtaggttgtgggggtgaaacacttaccaatgcagaggtgtagccactcgacctctccacgactgcccccattatcctggtggcagttctgaggtactyttttttttagaatagcttgaaaaatctttaggttgattatagttatgttttatttataattaaaatagtaatagatttgcattaatgtgtgaaatattgaattggtgttatctgaatctaatgtttccaatactgttattttatacttcaggtagttcttttcctttaaggacataaggaatgctgtacccaaatttagagctttataatctctaaaatgtttcactttaccaggcacatgttgaagtactgaaaaatactcatctcgtctctattactgtctgtgtagattccaaactgggggtctggaatagtttatacaaagcaaatagtatgtcaatatatatttttgtattggagtttttatctttttcttgtgagagaaaagtaacttaccaattccataccatttttttttccttttgtgtgattagaaagtatttttaatatcgttttgtgttttcgacatatactagttaaaagaattgtgtcaggagcatattcatctttcctgttccatttgtttccttaaatcttaggtcctctcaatcctagggtcagaaaaatgttttaaaatattttatgttaataattatggctatgtttctttaatggttgtcttgtgccaggcactgtgctaagctctttacgcgtattgtcttttggtattgctaatagcttatgggatagatgttactgctagatgaagaaacatcttcagagaagctaagtagctctaaggttaaacagttagtagaggaacagatatttgagtccacttttgtcagactcaaaatctctttacttctatgtgctgtagctctagtaactacagttggtttaattatctaactggttaactgaatttctgcaggacagcttttgaggatgaggatgcatccatagttgtatagacacgggctgtaacttacgtatgactctgcagcatgtaagctctgtcatttttccttgtgcttcatctttttcctctgtgccatttaactacttttctttctggaactttaaacattcctttacgttcatttcttaatcttgacctaacatcttggtctttttctacttctgaaaacaaaggaaaaccaacaaaccaactaacaagaaacttaacaaaaccttggtccaagtttccgagctctgatggaatgcagtcattcatactgcatttattctcttcagtgctggatttctttcaagaggcttatgattccctaccctttattacttagtaatcttttaactgattttttaaccaaatactttatgatacgaaggagcctgtctgccaaacatggcatttattaaacagtgatacatttgaaaaatacatatgtggagctgctaattagagaaacagagaagcttaaaatttttcttaatcttttgtacgtttgtagagggtaaatttattcttcatatggctgtttgagatattgataagacccatctgatctccattaatatgtttgtaaagtccgcagtcgggaacctttggaatggtttccactcttttctctaaatttccttaccatccatttactccttaaatgtctgcaaactggtgttaccaaaattttattgaaattgctctcagagttttccagggatctccataattgccaaatccagcagttttattgagcacttaatattgctggctacttttttattgtgaaactctctctgtctctctctctcttttttttttttcgagacagggtctctgttacccaggctggaatgcagtaatgcaatcatggctcacctcatagtctcgacctcctgtgctcaagcgatcctcctgtctcagtctcccgagtagctgggactrcaggcacatatcactgcacccacctaatttttttttttttttcactttttgtaaagatggggtcttgccgtgttgctcaggctgatcttgaactcctgggctcaagctatcctcctgccttggcacgccaaagtgttgggattacaggtgtgagccactgtactggccatgaaatttctttctttgcattttttaataaaaaaatttttataatacaaaaaattagccgggcatggtggcgggtgcctgtagtcccagctacttgggaggctgaggcaggagaatggtgtgaacctgggaggtggagcttgcagtgagcagagattgtgtcgctgcactccagcctgggcaacagagcragactccatctcaaaatagtaataataatttttttttttaagagacgggggagtgggggtctcactctgttgcctaggctgattttgaactcctggcctcaagtgatccttccaccttagcctcccaaaatactgggattataggcataaacgaccacaactgcctstctttgtacttttaactctttgtttcrtccctggctccatgtgagctcctgttcttggttcacttgttctttgctttttcttgtatgtcattgattctgaaatgttacttttagaattgtcttctgagttcaaggctcagattttctgtgcctctgatacctttgcatgtgggtaaatatgccactctccctacaaatctggaaagtctagaaatacggtttaatttttggttttccagatttactgcttcgcatatattctcctatactccttcttcagtttatggcattatcttccctatctctgagactaaatattccttccttgccttctctttcattctacctcttattttttttttcccccctggattacttttttaatctaacacttattataagaaggaaactactgtgctttgacagatcattaattaaaatagaatatattggacagtgtacattataacaataatcacatattatccccatttgacaacagaattgggccttaggaaagcttaatgctggttagtggtagagctgcaattctagccaagatctgttctaaatcttgagattttcctgctatattatctgtctctaattcttactttttwaaagtctacagtatcttacccctcttcccttttttataaatagtgagattgtttattccttacgcatatacagcttctgaataatttttgtcaattttttttaggatttattctacctatctgagtttatctcttcatatccatccatatatactacatcctaaccatatgagrtcttttatgttacataaaatataaaatacattgtcagttctctgaaccattgttaactgagcctgaaaaatcttccttctttttcctttaagagatggctcaaatactactttctctgggattacttgtatacacagcaggcaggatagaatatatatatgtatacacacacacacacacacacaatttgtttaacttactttactattcctagtgtatttggtgttttacagttacttcattctgttttgtattaaatttgtttgcctgtttgtctttttctactggattgtaaatacttgaggttaagcatgtgtttatttctgtatcctgaaggtattaggttggtgaaaaagtaattgcggttttgccattacttttaatgcaaaaactgcaattacttttgcaccaacccagtattttacttgtttttaaatgctactgtttaatttttttctttctttctttcttaattttttttccccccagacagggtctcactctgttgcccaggctggagtgcagtggtgcagtcttggctcactgcaacctctgcctcccaggctcaagcgatgctccctcttcagcctcccaagtagctgggaccacaggtgtgtgccaccatgcctggctaatttttttttttggtagaaacagggtttcaccgtgttgcccaggctgttcttgaactcctggcctcccaaagtgctgggattacaggtgtgagctgccatgcctgaccttaattttcttttattgggtaatatatgtaattttgtggtaatttattttaagacttttctatattatttatttatttacttattgagacagggcctcactctgttgcccaggcaggcatgcagtggtatcgtcatggcccactgcagcgtctacctcctgggcttaagcagttctcccactttagcctcccaagtagctgggactacaggtatgtgcaactgtgcccagctaggttttctttgtatttttttgtagagacagggtttctccatattgctcaggccggtcttgaactactggactcaagtgacccacttgcctcagcctcccaaagtgctgggattacaggtgtgagccaccacactgggtctggcttttctgtatttaaaaaaattaatcatagactttttggggcttattttgaaatgttagagatcttccatcttaaagtttaacattatccaagtattcttgctattttttaatcttttaagccttgtaatagacttaattacctcttgacagtgttgtttagtgagaaagcgtctctgcttttcttttttcttttcttttyttttttttttgagacggagtcttgctctgttgccaggctgtagtgcagtggtgtgatctcggctcactgcatcctccaccttccagcttcaagcgattctcctgtttcagcctcccgagtagctgggatacaggcacactccaccaygcccagctaatttttgtatttttaatagaaatggggtttcaccgtgttggccaggatggtcttgatctctctatctcttgacctcgtgatctgcccaccttggcctcccaaagtgctgggattacaggcgtgagcgaccacgcccgaccagcttctctgttttatatttttttcatcatctcagcccagacaccaagcaggtggtgaatggaagatcacctgagacaccacatcaaaaacacttcatttcacctaagtgcaaattcactttgatctttcctttagtctttgcccaggatgtttacctatcactggatggttacctgtcactttgcctgaccaatctgtatgtgaattcaacattttctatttgttctatgactacatagttcaaattgccattgcttgggcttgaaatattttatcacctgtcctacagagttgttgtgaggattcaaatttccaagcacataatagatattaaataaatgtccattgtccagttttaccttatcaccttatctcctaaagttgatgtttgtttatatttatttagagtacagcctgcagttatattcatatgtgcttaaatcatgatatgtgtataatggggcagtgacacttggtctcttttaagggctcacatttaaatgctaactcacttgaatattttgaaaaataaatgctttttttgaaaggacaacttaatgtgttttttcctgtgattttacatttcattttgaatgaaaggttctgggaaatgtatgattttgtaaatttctcataatattgcaggttaagatttacctaaaagtagtgatacattaaataaaatcacgctaattttgtctcagacttttgaaaattgtgtggttgtgaatcataagttataatattactattgttttagtgaagtgatacaattaaataagaactgttggactgtgcatgtgttaggggatccatttgatttcattgtctccttgycagcatctcttttgatgctacttttttccccttgtctgattaaatggcattttttgtaagaggtatttaattataagaatgcttacattaaaatctcttggcctataaattctcatgtgagttctagttgcttgttactgcttcctttaagatctcgggggcggtgggtggttggaaactcactagatttacttccgtctttactcactgggttttggtattacttcaggtgatttgtaatctctaggccacaggaaatgggataatgtaggcttttgatgcaatggattggactttgtaaaggtgaagctkcaagctatctacttagggtgcctggggactttgaagagttatagaactatgatgcagctgcagtggcctttctgtaaatgtrctactttctgttcacacatctcaccctggacctcctcttctctctagctgatactcgaaatctttaatgttctcagacctactcaacccttactctatcactttagagtaatgaccttgtgttcttcatggaagggagaaaaaaggtcattaagaattcattgtggttctgtctactgtgacaaagtttaaaaattttagaaagaataaagtgtgggctgggtgtgataactcattcttgtaatcccagcactttgggaggctgaggcgggaggattcacttgagcccaggagttcgagaccagcctgggcaacatagtgagacccctgtctctacaaaagaaaaaataataattagctgggtgtggtgacatgtgcttgtagtctcagctattcaggaggcagaggcaagagaatcccatgagttcgaggctgcagtgagctgtgattgcactgttgcactccagtctgcgtgacagagcaagaccctcttaaaaaacgaaaacaaaaaaactgtttyttaaaaaaaaaaaaaaaagaaaagaaatgcctcatgtatcagctttctacctatctatattttcattaatattcttatttttcctcctgtctcagacaaataggtgtttgttatatactgaaggccatcttgatttttttccagcaacttattccttcatgtgtctcttcaatattactcttatttctctatgttggttacatcctcttaacttataagcattccatgtttaaatcttttctgatactttatgaaccccacaacaaagcatgctacatgaggaaaaggttctttggtcagtacatttggaaaactctgcgatacaatttgggaaatggttcctacttattatggtgactactttttcaccttttgttcatcccttaattcccaatattttccctttccttttcaccattctattgaaactgtttttgataagatcgtctaactgacttttttttttttttttttttttttgagacagagtttcgcactgattcacccaggctggagtgcagtggtgcgatctcggcttactatagtgtctgcctcccaggttcaagcaattctcctatctcagcctcccaagtagctgggactacaggctgcaccaccacacccggctaattttgtatatttagtagatatagggttttgccatgttgtccaggctggtctcgaactcctgacctcaggtgatccagctgcctcagccacccaaagtactgggattacaggcgtgagccaccacacgcggcccctaactgacaaaatcaacggcattcctcttacttgccctctgctacaattgacagttgaccattcttctttttttgaaacttttattttcttagctcttagattgttattagtgggttttttttttttgtaagacttcttggcctttgtactgccctcaagaactctgccaagctctgtcattgactgttttttctttcactctttcttcatagtgctcttctgtaatctcacatgtcttcaatacttcagctccttcctagtcacatttgactcctggatacttttttcccctcctagtcctctgcactcattctattatatttctggtttcttctgaacatcttcatctccatgacataggacttaaaactcaacctgtctaaaatgaacaccaagttagggatcctccccctctcacagaggcagggcgggttcctgtaaaaaataaaaataaatgaataaaaaataaaatgaacgctgtatatttttcttcaaacctgtttttcatttacacacatctgtagacacttattcacaactatatgccaccatatatcttggttattgatatcatttggtgtctaacttgtgagctctttttgacccctcacttccttacctgccatatccttcagcaactaagatctgttgctggtttgaaattatttttactctgttagttataatgtagatccacctttaattcttgcttggattattatattgtggtgtcttagctggtttcctgcttctagtcttctttttcaaacaactacctgattgtctgatcttgcctctcatctttgtcattgggggaaaaaaggtcaaaatcccttatgaaggcatccaagctgctccttgctcttgttcctattgaactatttgtggtaccatgtagctaccatgaagagttccatgttcttgcttctcctttggctattctttttgaacattcaccttggttgatgtacccttccttctgtcttgatttagcaaacttgtcttttaagattgaattcatacatacggtcttatggcctaattaaacagcattagatgtttgctcacattgtcctagcacttaccagattctaattattcatttatagaacttatcacataaactaatatcaatatactgatcatggcacattgtagataatatatgtcttttgatacatggatgttctgagttcttgagagtgtggaattgggttcaggatacattgtatacctgtgaaatgtcagcctgtgaacttgtagaacacagtgtctatgttttatgtctttcttcctcacagcgcctagtacactgccttgcacagtgtcttttatatattaggtattcaaataattaaatggatggacctggattattgattagctggatgaatatttgacctaatgtgttcctgaaatttaatgctttacatatttttgtaaattttcccttggtacagtttcattaaataaaatatcaacgtggaaaatatttgaaaatcttaatatatgttaaaatttatgattaatatggtaggattctttgttagaaagaatacatctaagtattataaattactgtggaatatgacaaataggttttactgttatatggctatggatagaagatatgcataagtagcaataatcgtagctgtgtaaagtagttcttgcctctttggaatgttgtgatagtctcactttcctgtactacttattcactgacctaagtaaacatttttcctccttttagggacagtgatagaataaactaggtggtatgccctgtgattatgaattattactgttattggagcacttttacatgtaaataacttcagattcttttaagtacaggttcagtataccttatccaagatacttgagactataagtgtttcagattttttttttggggggtatgtttgaatccatttagtggttgagcatcttaaacctgagaagacctggcccgaaatactgcattgaacattgactttgagcatcatgtttgagctcaaaaagtttcagattttggagcatttcagatttcagattttctgattagggatacctagtttgtagcagatgcacacatccggttttatttttaagtgtcttctattctttggatacagattatctttttatatgcattgatttttttggtctgaatttaaatgtacaatccatgtgaattcttacgataattccattcagcgatgatatgcaaatgaaaaagggaatggtgtaagtggttttatgatttagaaatcttgaactttcttagaagttttttgtaaaaattatacagtggtccttctgtattctgtgggattggttctagcaacaacctcctcaccacccgcagataccaaaatactggggtgcttaaggcataatatttgcatataacctatgtgcatcctccagaatagctattacaatgtaaatgttttgtaaatagttgctatactgtattgtttttgtttgtatttttaaaattgttgttggttttttttaccccaaatattttttatctgtggttggtggaatctgcagattcagaacccatgaatacggagtgctgactgtatatactattgaaaaaaatcagatactatagaagagtacgaagaagaaggcaaaaatgtccctagccaggttaccacccacagataacttgtctgatatattttagtgaccatctttagcatgtttttacacacctgcgtgcatacgcattcccccattccctctcaggcataaggaaactattttacataaatagcaatttagtttcattgctgttctctagcttatcttttatttttactgaatcagtagtataggtgtctcttttcatgtttaataaaaatatatcaactcataatttttaatagttatacattatgatatgttccacagtccacatgaccaaatccctactggtagatattttacttatttctttttttaaaatactataataaaaaagtgctgtgctaaccttatctacttgtgtcatttttcttcttagctttaattcctagatgtgagtttgctagatcaagggcatgcttattctttgcttattcttctcccgtctcctcccgtttttctccttcctgcctgcctgcctgcctgcctttctttttcttttccccttctccttccctttttcctttctccttttaccactctggagtgcggtggcatgatcacagctcactgtagccttgatcttctgggctcaagtcatcctcctatttcagcctccagagtagctgggactacaggtgtgtgctatcatgcatggctaattgtttttaatttttagtagagatgggggtcttgctttgttgcccaggctggtcttgaactcctgagctcaagtgatcctccacccttggcctcctaaagtagtagaatgacaagtgtgagccactgcacggccttatttttcgttttgataatattatcaaactgttctcataaaaggtacaccaggagattgttagagatgtttatagtattatccatttctggcaaactttgtaaaggatgagctaacaactgtctttggaaatttacatgtctataatgtcaagctgttatgtacagagaattgctttatgctgagatcataaaaatttttgttttcctccattctaatgtaaagcttgttactaattgatcttcatttgccgggttccaacatacacatgctactttcctcttaagattgtcaagttataaataggagaacttttatttagaagaatgctaatatgaatcttttggaaatactagtaattagctttcttctgctgtctccaccaattttatctgatttagaaaattatatttcctttattgagatgcttaaatcggagggcttagtttgcttcagaaagtttataaactatattattagactaattttacaatagtcattgtatttaggtgtcacttttaacttttttttttaattaaactttgcaggttttaaataggtcagtttctgactaacccagaagttgagtatattttgataatacattttaaattggccatatttgtatgtgcttgaaataagtggaaataacaattcattaaataacaacaacaaaaaaaaccttatgtgaacctggggattcttgttaccatctgactactcctttccatctccctctgttcctctttatcctgtgttgcttgttaacactggagactagtaaaattaggtctgaattgggctgctctttaggtccatggatctcatctttattttttttgagacagggtcttgctctgtcatccaggctggagggtactggtgtagagatggctcactgcagccttcacctcctgggctcaagcagttctcctgaatagctgggaccacaggtgcgtaccaccacacctggctaatttaaaaaaatttttttttttttgtagagagagtgtctcttcttgttgcccaggctgatctcagactcttggccttgagcagtcctcccaccttggcctaccaaagttgtaggattacaggtgtgagcggccatgcctggctgggtctcatctttttatgtctttttagatcactttaacaaggcaaaaaaaattcctccaccctgtctttctttctcattattagtaccctctcttctgcttttccagataattcactgctcattgctgttgcctagtcactcccagtggcatggatagaaataattgtattggagaaatatttatgtaaaatagactgtgacttggtgcttcaaagatgtgggcattatcaaaaggacagttagttgaactgtgcgtgtgacatgatttatctttttaggaaagagattgtaaggaaagcacaacaaaacttgaaaaaccgactttataagaaagtagattgaattgctcacaagttatttgaaatggtatttgtagatcgcctctctcctagtgggtgtttaatctaaccaaaaagagttggctaaactttatatattgataaagtcaaaaaattmcttaatattttcaaaacattaccactaaatttgtcttctggccaaggtgaaagaacagagattagacttacctctcttcagaaacagctaaaaaactgaacaaaaacatatgtwacagcagttttcaagacatgagatatcagacagtgaaggacagtgatccctgagagatggaaaacaaatgaggtgaaccttgtgattaacccagcttactaccttgggagagtttcccaaccttgtatagaaagggggacatcaggtggagcctgctgatctgtctgaattgaggagaccaaactggaagtccacagtggctaaggtggcaatactatacaagaaaacatactgaagaagagagagctcacatacagagagaactctggcaatttaccaagggatccctcttgaatctttagctgatgtgarttcaggatgtgaatgaagaggctaccagagctggaaaaagcagttgccaagaagatcacagtcaacaattctcagatctatacatggccaggagtagttcctgttctcactggccaacgtggaaaacttcgtaactcgtgaagcaccaagtaaggctaattggaagccatttccctcagtagtggggccaaattagccttagaataaattcttccctggttcctcctgacaaaacttaaaagcaagacctggtagaatsaaactaatttgtaagcagtttagctacaacagagagcaaaggtcaagaagatttataggaatatgaaaatatccagcacccagcagataaaagtcacattatttaccatgtaattaaaagtaccagacaggcaaaggaggaggaaagtaagacccataaagaaaagaaaatgtaatcattcaaaactgatccagaaatagttacgtgaaaacatcaacaataattattataactgtatttcatatgttgaggaagcttagaggaaagattaaacatgttagtacaggagtgaaacatatatacatagataagaaatccaaatcagactttgaaagttgaaagctatagtgtctgaaatgaataatatgtttgatgggattaatggcaatagacattgmagaacagtttagtgaacttgaaggcatagcaatagaaactgccccagaaaaccacacgcagagaaaatgtgagccatgggataacatcaggtgacctaatatccttataattggagttcctgatggggctgatgggatgtgcagaaaaagtattttaagaaataatgggcaacattttccaaacttgatgaagctgtaaacccacagactcaaggtgtccagtgaaccacaggcaaaataaacatgaagaaaattacatcaaggcacatcaaagaagcagccataccaaaaaacaaaacaaaaccatttttgaggaataacaataccattggctttccgtatccatgggttctgcattcttggattcaaccaatcatggaccgggggaagaaaaaaaacccaaacaccaaaaaaatcatactacaataaaaataatacaaataaagaatgccatataacatttatatttcattaggtataagtaatctagagatgatttaaggtatacaggagtatgcacctatatgcatagactacatacaactactaggcatttaatatgagggacttaattacctgtggattttggtatctgcagaggagctggaggatactgaaaaaccaccgtagtgatagctgatttctcactggaaataatacaaattgtagacagtataacagtatctttaaaatacaggaaggaaaaaaaagtgtcaccctagaattccatacttggaaaaaatatcctgcaaaaatgcagtcaaattgagtgcatttatgcactcagaaactggtaaaattcaaacgaggtgggcagtttagctaaaattattgcaccagtgtttactgttttgaaacgtactatggttatgtaagatgttacctgccatcaaagaaggtaaaaggtaccatttcttgtgagtctcacattatgtcaaaagaaatgtttttgaaaaaacagcaaaaamaaaaaaaaaaaaggttgggggatacttcagactatttggtgaactctcacaacttcgtaatagaaaatttaaaaatgcattaaaagtagtcaaaaaatgtggacacttcaaagaagatataaaatggcaaataagttatttgggaaatgctaattaaaaccacaatgagataccactacacacctattagaatgtctaaaatgaaaaagaccaaccaaagtatgtattcctgagtacatagagcaacttgatctcttatacagtgctggtggatgtagtaaaatagtacagctaggctggagtatcgcttgagtggctgtagtgagcaatgatctctccagtgcactccagcctgggtgacaaagcaataccctgtctccaaaagaaaaaaaaataaaaaatcacaactactttggaaaacagtttactaacttaaaaaggttatatatacgtacgtattatatgcccaaatcattcactgctacgtttttaaccaagaataatgaaatgtgtatttgtttacaaatgaaacgtgtatttgtgtacaaagacttgtgtacaaatcttcacagcagctttatttgtaatagccaaaacttggaaacaatctaaatatctaatggatgaaaggataaacaaattatagtatattgataatgtcgaatactaataagcaatacaaatgaagtattgatagrtgcagtgaagtggatcaatcttcatgctgagtgaaagaacccaatcaacttttttgcaacgagtttgccaccagaacacaggtgtcatgaaaactacccctaacagccaaaatgggaagagacttttatcaacattgtcttcattggacacatagattcaaggcaagtccaccactactggccatctgatctacaaatgtggwggaatcaacaaaagaatcattgaaaaattggaaaaggaggctgctgagatgggaaagggctccttcaagtattcctgggtcttggataaactgaaagctgagcatgaatgtggtctcactattgatatctccctgtagaaacttgagaccaacaagtactacatgacttagcattgatgccccaggacacagagacttcatcaaaaacatgattactgggacatctcaggctgactgtgctgtactgattattgctgctggtgttggtgaaattgaagctagtagctccaagaatgggcaggctggcgaccatgcccttctggcttacacactgggtgtgaaacaactaattgttggtgttaacaaaatgkattccactgagccaacttacagccagaagagatatgaggaaatcattaaggaagtcagcacttatattaataaaattggctacaatcctgacacagtagcatttgtgccatttgctggttggaattgtgacaacatgctggagccaagtgctaacatgccttggttcaagggatggaaagtcacccataaagatggcagcaccagtggaaccacactgcttgaggctctggactgcatcctcccactagcttgtccaactgacaagtccttgcaccagcctctccagggtgtctacaaaattggtggtattggtactgtgtctgtggaccgagtggagactggtgttctcaaacccgttatggtggtcacctttgctccagtcaacgttacaactgaagtctattgaaatgcaccatggagctttgagtgaagctcttcttggagacattatgggcttcaatgttatgaatgtgtctgtcaaagatgttcgttgggggagtgttgctgttgacagcaaaaatgacccacgaatgaaggcagttggcctcactgctcagtgattattctgaaccattcaggctaaatcagtgctgtctatgcccttgtactgaattgccacacagcccatgttgcatccaggtttgctgagctgaaggtaaagatttattgccattttggtaataagctggaagatggccctaaattcttgaagtctggtgatgccgccattgttgatatagttcctggcaagcccatgtgtgctgagagcttctcagaccatcctcttctgagttgttttgctgttggtgatgtgagacagacagttgctgtgggtgtcatcaaagcagtggacaagaaggctgctggagctggcaaggtcaccaggtttgcccagaaatctcagaaggctaaatgaatattatccctaatacctgccactctagtcttaatcagtggtggaagaatggtctcaggactsttagtttcagttggccatttaagttaatagtaaaagactggttaaagataacaatgcatcttaaaaccttcagaaggaaaggagaatgttttgtgaactacttcatttttgttttttttcttttttcttttgcatgtggtagttttdctagttttttaaatcagtacgttttaatggaaacaacttgaccgaaattctgtcgcagaattttgagacccattaaaacaaagtttagtgagaaaaaaaaaaaagccaggtaaaaaatacatayatgtgtatgacccatttatgtgaaatttttaaaaatgcagactaattcatagtgacagaaagtctcagtggtttcctggagacttgggggcagagagcagagaggggtggaaaggagagaggggtttataagaggcctgtgcagactttagtatgatgtttatggtcattatattgatttgggtaatggtttccaggttgtatatctgtgtcaagagttaccaaagttttaagtatgtgcagtgtattacatgttaattgtatcttaaataaagttgttaacaaaaagtcaccaggttaggttttcattcagaggatggaaagattactgataccaatttacagagcccttaagatagctaaagcaggccgagctctttaaagagctgtccaatagttttatgagtttactatgtgattaaaataaccctgaccagtattcaggaatattagtttctcattcatcccatcattgtatgataacaatttttttcttataggcctttttgggccatatatgcaatgaaatgttacatatcttacgttccgttatcattcaacagaaacttcttgtctttccatctaattaaaaaaaaaaaattaggccaggtgtggtggctcacgcctgtaatcccagcactttgggaggccaaggtgggcagatctcttgaggtcaggagttcgagaccagcccagccaacatggtgaaaccccatctccactaaaaacaaaaattagccgggtgcggtggcgggcgcctgtaatcccagctactctggaggctgaggcaggagaatcacttgaacccggggggcagaagttgcagtgagccgagatcacgccactgtactccagcctgggtgacagagtaaaactctgtctcaaaaaaaaaaaaaaatgataataattacaacaacatttaagctaacggtcaggattcttgatttattatatttgggtctagaaggtagcagtagggatcatttttgaaagttgggggatgatgtcattttggagaactcactatataagaagcacttggttgttttggacatgaaaaytggggggcaggctgggcacagtggctcacgcctgtaatctcagcactttgggaggctgaggtgggcagatcacttgaggccaggagtttgagaccaacttggccaacatgatgaaacattgcctctaccaaaaatataaaaattagccaggcttggtgacacacacctgtaatccctgctactagggtgactgaggcaggacaatcacttgaacctgcgaggcggaagttgcagtgagtgaaggttgtgccactgcactccagcctggcaacagagtgagattctgtctcaaaaaacaaaaaaaaaacaaaaaaaaaattgtggggtaaatttgagtgtatgagaatcttagactattgaatgaacattaatttttttwaaatgtccacttagaactatttaaaatataaacgtaaattagggttttaattatgaatataaatgagtgcatatctgtatattttacagaaaccaaaaatttaatattatagagaaatatctgtctttaggaaaggattattcaaacataggtcagggatagtaaaactttagtttttttttatttctatttttcttatttatcccaaactccttattgttgttgaagttataatttatataactcaagttcttatgtcatctaatcctagataaaacctttgcctcctacacctgaaagaaataggttcttttctcaacaggtatttcattttaatgtgatacttgttctagttaccagtttagccttatctttcaaaaaattattcttaacatgttaaaaatayatacctatgctatttttaatagattttatagttttaaaaaaagatttatattttaaaccagtagaagttttaagaatgcatctttattgttacatgttattttaaagatttttatcatgaaaaagtattctaggtaaggtcttaatttctgatttttaatttaaatgtatctgatcattttctgatctggctacaattaatttatattatctattaaagatcttttttgtgtgctgttgtacctgaatcttacataattattttttctgccatttaaattattttatctttaatctcaagtgctcacagttgaacaaaacaaactctcaaatcaccaaatcaaggaatactaaatcaagaaaggaaggagagttttaggtcatcattttcagttcttaattcagattcattgttgagtaggttttggcatccgtggttattgaatctgtagaagttacagtgttgtatgtaactcttaatagttaggttaattttaataacttccactcgtacatatttggaggtcctttataatttgttatgaaaggtagaatggaccttcccctcttttttcccctttacagggtctcaaaaataataaaaatactctttcaaaataataaggttagagaaactcatttttgaaattagtctgttatttactgtaattataggatatatgtgaaatagaaactgggtaatacctgtttctcaggaacacactaaaagtattcatattgtgtattattttccttatgtaattttgctgtctcctggtaatcttgcgtaatcctgaagtccacgtctctaggcattttggactattttatcaagatatcaatggcttttatcttgaccctcaacttctaagatttaggtttaactgggacataccggccctgacatacttttcattctgttggtagccatttgttcccttataactaggaaggtactacgttagtaaaatgcagtggctggttttcttctccagaaatcaaggaattggccatctgtttagagaacatgccactgttttcgggaatgttatagttggaaattttttaaaaacacatttaagtcacaaaagaggatttttttcccctttggaaaatatagcctcagacctgattatactttttcagaaattcatgccttagatgtggcagtaaaagattgattctgtagttctagtgtattttaattaagcccagatttagcatttgttctatattttatcactttttatttaactttagctggcacataactgataatactcgttttggagtttacatttgggttagcctggtgacttgttaccttccagatctagtattttgaactcttaactcattcaaattaaatagggaagttgttctttctgcctcctgtggaaatttaatgtgggcaatattatatagactttttatgaatcttatgtatagtctcatatgttctagtatttcttaaagctaaaaatagcatgccacttgaatatataaagagttgtagcatagtaccactgtgaaaaaggtgttttccgtgtaatctcatagccaaatatttttcagtgtaacaartcacgcatggtactgcatgggcattaggatcgctttagtttttcttatatcttgattcctcccatatttgccgtgtttttaaatgtttctctaacctttactttgttacttaaatacatgataccatattattagggaaatgtttgaagtacctacaaaaaagaaagtgattaattttggaagaaaggcagttttgacctttatcttggtagaagtggtttaaagatactaaacttgaaatttgttgctcagttttgaggtaatctcaacctcccagttctctaaaacttagtagtttggtaatgatgcatgcttgataataaagacaaattttacacattactgaggttaaaattctgcaaatgaaatgattaaagtcttcaaatttgatgatcagatttcctttaagaaatataattatgacacaccaaaatatggaaccgaaaacacttgttaatcctttyaataatatattttacttagtaaataaagcactgtggaatatgcctagtagattcaatgtcttttttcggcttaaagtgtgttaacttactatatttgatttttaaatagacaccaaatcctactgcaagcgagtttattcctaaaggaggatcaacctccaggctgagtaacgtgtcccagtcaaatatgtctgccttctctcaagttttctctcacccatccatgggaagccctgctactgctggattagcgccaggtaagttgagtaactatttccagtgagttccagataccatgtctgtaagcaccatttactattaatttatcagaactgaaattgtatacttgaatgattcacatttgaacattaagagctttatgttctagtttttggtaccataggccaaatgtgtagttgagaattttaaagcaaaatttaaatatgaatgaaattacatataagaatttttatatataaaactcacaaaaaaatttaaaggggaaatggttatttaggaaaaaatctatctttttgtatttctctatttttaaaactttgtgctgtttcactcaaacttacaaaggcatcagaaagaacgtgaatatttatgtacatatgcctcagagtcctccttttacattaaatttctaaaaaataatttaatcattctacatctttagatggtattccctttcagatatttgattataaatgctatagtagtaattttaaattgggtaaagtattataaacagtagtaggaaaaaaatatactacatgagggatcattgcagtagagaaaaacactttttagttatcttctgcccataatgtacccataaagtgtacccataatgacagaacaatttgggcaaatgtgcttgtactccaggagtcctgaaggcatagttcaatgtgaccctttgagaaatctatgattctttgcagtcttcatttttatcttaagaattcatgcagattttgcatctgctactccataatgtttattttagtataaaaatatttaaatttttaaaattaacatcacttatccccactgctgtataccttgatttggaaagtaaggtggtatgcacaatcacattgaattcatagtaagtgctgagcagattggtatcttatgtttgtcgaatgtttgagttgcacacacaaattaggcttctagaacctatacaggaaaatcatcacttggtcttggacattaaaaaaaaaaacagaaataaaatgaaatatatacacacactaaaacaaagccaaaggatatatctagatcagccaggaactggtactgtctccagggcttaatctaattagtaagtaaatckttgatttaaatactcatatatctaattcaaggacctctttgggaagaaaaatgggagaagataaagataacacagtggcgcagagcatctgttttagcattaaagtatcagagtactcagagcttaataaccttgtgttgctaaggattttgtcagcgcctcatttccccaccattctttctcttactacctgtctcccttccaactcccctcccaccacttgttcccttaccttttcttctactttggtttttttccaggttcagttaaatttgtaagcattttcctttcttccctagagagcagtgtcagaattgaatatctctggtagccttaaagttttattgtaagtaatatactactatgatttttctcttgttgaggtgtgttcacattgtttacatgagcataatctgcaaatgagctacacatcttaaaatttcttaggcattgtctagacttctgagcagtgttgtaattcaactttatatgtctctttccaaagcatccgcaataatgggatccatatagcaatcagaaaactttggccttaattacatgccagtttattttgccctaacaatacttccttcctcgtatcagaaataaacattttgttaacttatttcatgaaactaatttagacatgccattcaaaaaaaattagccttttcaattggaggagttaaaaatattaaagggaattttaaatttaaaaacattcagtttaagaaaatccattaatgcttatggtataggtataagcttatttggaggtaggtatattcattggtcccaattggacctcacaatagaaacttagggtgaaattaattaatttaaaaattaaattagctgaaaatctattcttctacatagccctagcattaaatggttattctagctcctcttaacaatgaaagtgatcactctctggaaccattggaaataggtcattatatcatatgaaatgtattcttgaattctaatgactattattttaaaagtgctcttcattcagatgacaactcarttaaaatatttttcaacaatgatgaattattttgcattaattattttttctgtttggttattggtttaacactctggagatgagcaaagaaaaaatatttaagtctgcctttcggaaaaaccattgtactctcagtgtcttccatcatttcttacctacaaatgttgttttgtttaaggaagggttcttgacatttgccgtgtaaggttatagaataaataaagagtttatttacctacggtagtggtgatttagtttatttttaattcttactgtctattataggtgtaactcattgattttagttacaagtttttaatttaaagtttctatccccaaaactattgccctcgaaagtatcaaattactataaaatatgaaaccttaaatactttgacacttatgtaaactagggtaacatcattttcattacgtatgggaaagtacatatctaaatatatttttgaccaaatatatttgtcaaaatttttaggccagtttattttgtcccaatatttgagcaaagttgagtggatattaagagtgggtttcctcaaattatgaggaacaaaggcataatgcctggcacaaaggagaccctgagtgaatcacattgctttttaaaaatttgttttgatcacttaagaaaaaataagtcatgtttttggtatatgtctcaatgtaagaaataaaactttatacaaatatttgaatttactcacagctaattaggtttttaaaaagcgttaaaatttgtgacatgtatttctatcaaattgtatacacactcattttttaatttaaggaatcaaggatttatagatacagttttgttatgcatattgaacctatgaacaatagctacatttctaagtatcttttgtgaagttagttgttttaatgatactaaagatatggcacttgggcttgtctttaagaatccctccagttatgcatatttttatttataaatagacatttttctctggcaacagcttttattattctctcagaggttcacagccttccaaaatttaagaaccactgtttttttttttgttttttgttttttgtttttgagacggagttttgctcttgttgcccaggctggagtgcagtggcgcgatctctgctcactgcaacctccacctcctggagaaccactgatttaacacaacttaagactaatttccagagtgttatacagtaagaatacttttaagtaacacatagcctaaagatacatttttctagtagctctggcttaggcagagggtttttttgactagatctctggaaacgaagttatgaatgtgcttaatatatgaaataatagtttatactttaatttttgtgccatgaaaagtgatttttttttttttttttttttttttgagacagagtctctctctgtctcccaggctggagtgcgtggctcattccaagctcggcctgccaggttcacgccattctcctgcctcagcctcgcgagtagctgggactacaggcgcccgccaccgcgcccggctaatttttttttgtatttttagtagagacagggtttcaccatgttagccaggatggtctcgatctcctgacttcgtggtctgcccgcctcggcctcccaaagtgctgggattacaggcgtgagcaaccgcgcccggccaaaaagtaattttatcgtgagaactaattgctgaatgtcctttttcatcagaattttcccgagtatttttaatagtagacatagttaactaagtcttcgtgtactttaggtttaattacctcagtgttaacaaatttacagtgtcacagtgtgtttgaaagtgactgtaagtgcagcaggagcagcacacatttctgcatggtgttcttstgtatcatttggtggtttagtgcacagttgtgtctcaggaattgagcatctctccttctgcttaattatcatgtgtgggcccttaggaggggcagagatgagttcttatatttgcaaatgtcatcattaatttataaatgagaaaatgagtcacagtgattttcagcatttgtcaatattcattccttcaagatgaaaatagtgcagtttttttttaatcattagatatgttttcttgtaaattattattactttagagagagtgtctcactctgtcgtccatcctggaatgcagtggcatgaccgtagctcactgcagcctccagttccagctccggcgcaagcaattctcccacctcaaactcctgagtagctgggactacagatacatgccaagttaaaaaattctttttaaattttttttgtagagacgagttctcactatattttccaggctggtctcaaactagcctcaagtgatcctttctcctcagtctttcaaagtgctagaattataggggtgagccacctcactcagcctttgttgcatattattaaggcaaactcatatgattgatatggggagaatcatctaattattataccaaaattagcattattaaataattgtattcatttattaccaagtttatttattgtaggcttttgggaaaataaatccaaagaaaattatgttcttacatccagttttttaaaaatacggaaaagtcatttcttatatattcctgaggttatggtgccaaattggtgggtaaaattggctaataccctttttttaaataaacatttttagcttgagaaatatgtgagggaaaaagggaagggaaagaaaaaggggaaattaatatttgtcgttcttgttcagaaatatcaaaactttttatgaacgttgtagactaaaaatagttatttactcttataatgttgaagggttgggataagcagatcgttttcagtttaaagttctgtgccaaaaaacaaaattccgtgattgattatctctatggcatttcatatcatagatgagcaaatggaggtattaggtatttaaattacatagtagttggattaggcaataacatgatattggttattgatttaagtggaacctttgggatttacatagtccagccttgcgccaatctagaggtggcatttctgacagattgtcatctagtctctgcttagtcatttacagtaatataaggaattcattaactaaccaaggcagccagcccagtgtacattttaacaatttgaatacaaaagaaaactcagtcttctgctaaaccaaagtcttgtctctcttccatccacttgtcctagtcctctccttttttgctgaatgggaaaaaaaaactttcctatatgatagttcttttagttattttattcttcagactagttctgtgtgtgtccatataactgatttatttgtaagacagacaaggtggcgtcaggcaaccggggagaagtattattcagttcaacgaattgtataggtccaaaattgtgaactcttgtaagtcataaggaatagaacactagtgtgggtaaaattaaatccacagatatgtctacctagctatattactactttggtatccagctaaggagtgtaccattgggaaaacaggaaactctttggaaactgttctttttttggggaaacaggatgaatctatggtcttgaagatggtgaatatctaagctcagactttaaatttcattgtgcgttttagggctctacgttaagtctttcaaggcacaaaaactccataagcgattgctttagattattttgtgtttactaagtgatataattattaaaaataaaaattgtaaccatatttatatggttcttaaatatcaccagttttaataaacataacagattttccttgtaattgtttctcagaagtmtactgttaaatggattctgtgggatagtcaaataattacagctcaaattaatttgatttctgtctaaattgaattcttcaaattagttttgtacttaatatcaataatggtagtttggcattaaagtatccttctaattaattaattagatttcctaaacatctcacaaattgcttaagaagaagggaccatgccatttctcatctagtacaaatttaggtataaatggtgtttaataaatgcttactcaatagataaggcttaatttttgtcttggaaaataattttgtaattgttaggtatctcttaagtacagtgaattttaattaataaacatctttgaagaacttctaaaaactgcaaatgttcaagaatatgcaggtgaatagtcaaatgaggaacagaaatgtgcctggtgaaaaagtttaacagcatcaaaactagacactgtgttttgagatgctgaagcactcttataaccaattaaagtatttgtatttttaaattgcatgtttccattctttgtaactactttgtttttcaggtatattcagcagattcattcaaatctttccaagttatttagtttggagattgctttcttcattaaaaaacaagtaaattaacaactattttatgattaagatgagggatctcaaggtttttgtgaagtggaccttttaattgccctgtaatgaggagctcatcctagaaggaagctcctctgtgtatgcatgtgtaaggacacagattgtgatgcccctgggaaatttactaacagtagaactgtagaatcataacagggttgggagtgcctgctggctatattcccttctcagttgggaatttcaggaaactgaggcgagacgtttatggcgcagagagggatgtggctgctgcagctggcttggagacctgtcaggtaaggcttaaatagctaccagtagataatattctactggttgtggaatccctggttaatgggtcctcataggtataagagttcctcttgtgaacttcctgtttaaatctcattgaattggctattttgtcccataattagggggtaggggctggatgggagtgggtagggatttcctttaactacgagttaccgatccagtgatctacagctgcagcaaagtctcttgctgctcttggactgctttcagtgtattatgactcgattgcctttagaacatggtaccagttctactgaagcagctatgtgattttcagcataccgcttggtttctgtgttttagagtcttcagttctataagaaggtaatagtagatgattttaagtctttctaatctaaaattctgtgtttttgagacatggaaatctgtagaagcatagaggacagtaaagagacagaaatgaagacagtggtgcgaagtagtaaaaagggaaggataacatttgtactagacttaagaaagattttagaaggcatatggacttcttgacttattctgtgtaaatagaaaatcttcccatggctccctttgtttcataggtggagatgaggggagttttgtttcagcaaatgtaagattagagtctggggtgaatcagagtattgtatttgttctggatgaactgagaagcagagagaacaggtgtaaatgaatgcccgagaatgtttccgatctgtttcatagctgaacgtggagagttagatgtcgatcttccttccaccttcttctttagtcaagtaggttgagagcaccagggatcattttttcttcaaccttttagctcagtgatacccagagcaatgtgcctactcagtggagaagatagtatttgtgtgaataaatttactgttctgtgtgttacatgtctagttaggagtggtcctctaattctgtaggaatgaatcagatggttgtagccccttctgtttcttgaattatcctttgattcttctcagcttgaccatgaaattcatctttttcttattcttactgcctttcagatgtagttactctagagtagggcatgtaggtagggtcttagtaaaaggagaggaattatagatgtggcctttttcaaacccccaatgcatataggcatgtaaatcctactcataaatgcctgcaacaacctagatgtggattgcatatttattatggtaataatgtttagttctaaatttttcagtcacgaatctcttacatattgatatgtctgaaataagatgttttcttaggatttcataagcacttttctatattttacatgtggttgtctagattttagcatggtatccctatacatagtaactaataactagtagtcatttggtgggggtacctttgagaaaacagtaaaattaacagtaaacaataacattaagattaaatatattaacatcctattgatgttaattagtattggtgtaaagggtgtcagtgtattcatcagctgctctctccgccatagttaatatgctgctctctcagccatagttaatataggtcataatcttattgctcactgtgtgcgaggtggtgtaagttaaactgcccaaacaaatagatccaaaatgtaatgacatggcttaatatgacaaaaatgtatttcttgcttttgtaacactccaaggcaggtgttcaggttggctaggatgctcttcacatagcttataagggacacaggggaagagcttctcagcatctctcaagtgagctagaaaggaaggggaagagcatgaaggagcaagaatgggaagatgggatgacccaagcctggaagtttctcctrtgatgacttttgactaaaatctggacttaaactattttaagcagcttggctacatttcccagcctcctttagaagcaaaagtttttaacagttgatcctggttatctcatgaatatacatttgagatattttctcatttgcatcttttgtaatgactttaaaaatatcaccaaagcagctgcaataactgatttatctagcgtcaggggaaatgaatctttccagcatacttgaattttttgggtatcagaagcttacagttttaattgtcagaactttatattttccaaaatttttccatagtactctctggcttaaaacaaaatataatcttatttattgatgactcttgttcaactatatgtgcctcagtaattgtattgaaccagaatacactgactctttacatatccaagtttgtagaggagtttatttcaagttatgtgattacttagatttgttattctttccactggtcttctgctccaatgaattagttataactttttgaaggtaaggtctttctcttgcttctgagtctcttaaagtgcctgaaagtagtgccttgaatggccataatctggcaagcttactttgatcattttttttgtttttattggcttttttattggtaattctgttgtgctgtttgtgacagtgattctcaaatttcagtctaccagaatcacctagaggcttgttaaactccagcatttgcgtggttccatccccagagtttctgatttagtagctctgggtgaaccagggaagatttgcttttctgatgtgttcccaggtgttgctgatgctgctgcttgtcctgggacttcattttgagaatgactgctcgatttagaacttttgtcattcttatctcctctttcctcttaatctccctttctcatcctcctcctaatctgctgagagctaagaacacaaagatatcttttagtacctctttttttttttctttttttttaaatgagaaaaaggctttgagtcaaggacttgaattgtttcctgtgaataaggtacatgagctttatattatcctttggctgaggctagtatcacttcatttctggttaatgtctgtgttctgaataactagagttattgttgaattcatgaatataggagttgccgatgcttagtcatgaataaatctgggaaacggattccttccaccttggtaatgttagtgagacaaaatataaattagttactataacttttagtttttcaaaatacttaggaaatgagtagcataagtactgtggctgtttaaaatataaaaccctcaagcagagttccatggatggaaaaaaaaaacaaccctatggttctggaactagtaatcagatatcttttatttacatgttacactttaatatgtatgtttttaaattgttacaaaaaaatcaactaaattgttcacatgagaacatgtcctggcaaaaaaagaaagagaaaataagagaaaacaactaaattgttgttaatgttagataaataagaggcacttattgattcaaccacagttttctggagatcaactttaatttttgtttgtactttggtggtagcttttttcattggaaagaaatccaaaattaaaattacattgttaactaaatcttacttttttgtgtgaatttttgtaattaattttcataagacactcttgtctttdagtttcttgtttgtaaacaacacaacacaatttatcactatgaatgaaggacaccatttactcaaacagtcactaccactcaagaagaaaaaaatggttcttttcaaccaaaacagttatatttagtagctaacacctttcttccctctgttttgatgcttcgtttaagtaagtgttattatttaaaagattgccaccattgtagagtctagggagatcccatcattttagatcatttggccaagtttggggacaagcaggtaggttactgttttgtttcttcaaacatagagaccgaagtaagtaacctactattataggccagtgggtaagattcctactagtatagttaaaaccctgatgctggttttttaaaatatgttgaattattcatgtttttgggatttaggcactgcactttatacaatcaatagtctaatgatatttgttaaattaattaatgacagttcatctagaaatgacaccattaatacaggcaagactgaagttatgtcaaagggaagattactatgtgtagaccaggaaaacaaagtagttgtgcaggctgtgatctctatcaaatattgaggactgtgtgtttgataaagctcaggttaaattcatcatataaattgacattatgtgcctgagtttggtcaataagattaaatacattttatgagaaagctttaaggtacttaattattttgttaatgcttacagtatttctaataccagatagtcttaagtatctatcatagatagatattcagccaaaatgaagtaggattatataaattagttgatgaaattctgtagttattaaggggaaaatcagagatggaaattaagttgcaattatttgggttagatccacatggcctctattaaaggtgatttacatgtaaaaataagtctaggcaacacagcatgacctggtctcaaaacaaataaacaacaaccataggcaggtatggtggcacacacctgtagtcccagctacttgggagcttgaggcgggaggattgattgagctcaggagttcaaggctggagtgagctatgatcacacaattgatctccagcctgggcagcacagtgagaccctgtctctgaaaatgaaaataaataaataaataaatctttttagagtactttgaaatttgtcgttttattgcataatataaagagattttgtacttttaatcagttcatggtgttataattgaaatgtcactgttacgcagtcataaggtaaacatttagcacttttcctttatatttacccaaaagtgaaaaccagttcttgtttacttctcaaaaaaatgaaaaagaatactttatttgtaatatctttgtagtctcattcacagaattcctaatcccccgcaacccggaggctgtaaaaatgaggataaggggttagaaatttccaagaagtgactgttgttaagatagacattgaaggacagcaaaataagaktagaattaggtatcataaagagcatagtctttgaatccaaggttcagtttaccccgaatctagatgttggatacttcaagagtagaaaattgttctatcacatcytaaaaaactgttgttttaatggtaactattgatttgacccactttaaatgggatatattatatttgcatatagaagatgaagctctagtagcttcaacgtaaaaaaaaaaaatctttgaaatgtatgctcactttggcagcacatacgctaaaattagaacagtacagagaaaactagcatggtccctgtgcaaagatgacatccaaattcatgaagtgttctgcattataatatatttttaaaaaatttataaagattaaaaaataaaaaatttataaaatactgtattgagaatttaatttccattggcataaacacaaatgatatgcacagaattacatatacatgtattaggaatcacattaagtgtttagataagggatctgttaatttgagttcgagggtgagcaacccttatccaaaaacttttttttaaagactcccttttattatgttaggctaaaattgtaacctgttgacagaaaataacataactgtgatctatggggaaatcaggcctctatgaaaataatgatttgtgagtgtacatattcctcatcaattttacagaacaagtttttaggttagattcattataaaacatctgaatttacagattagaatactattatctttttttttcttgagtagcttaatagatatccagcatgcagattgttaaactagaatacgaaaattttaaatcagtaattctgaaaggcaaatgtattggtatagttaggaaaatcatgggtagtaacttcagatggttgcttttagtaattctttaaaaagtggaaaaaaattatgttaaaaacctcatatagaggagaagggatttttgtgatttgcttaggtgcattttttcctaatatttggaaattatgacacttttttttttttttttcaggcggagtctcactctattgcccaggctggagtgcagtggcatgatctcggctcactgcaaccttggcctcctgggctcaagcgattctcctgcctcagcctcctgagtagccgggattacaggcgtgtaccaccacacccggctaacttttgtatttttagtagagatggggtttcaccatgttggccaggctggtctcagactcctgaccccaagtgatctgcccacctcggcctcccaaagtgttgggattacaggcatgagccaccatgaccggcctggaaattaagacattcttattagaattgtggcttattttgtttggaggaaaagtatattgtgtagctgtgtgcatttttttatgttgcaaattaattttgtgtttgaacatttattccttgaggaagctttagaggtacctcaggatgtcataaaatcagtgtagaaattaaaaaggcttttataatttcactggcaaatatcaggtttatagtctttctaaaatctaatctccctgatgttttccctttgtatttctgtaaaaagaatatagttccatttatttcatcagaaattctgttttattgcattaacattgatttcatgttaatcttttaaaaattaaccaaagatgtgtatcagcatttcccaaggtgcttttaaaatatacattgctggccaggacccctaaacctaccaatccagtttctcatccagacctccatttttcttttctttcagttctataaatgtctttttttagaaagcctttcaggtattgtgatgtcaatcctatttaagaaccagtgccttaagagagttgaggcagttaagaagcactagtgtggtctggtacagtcagggagaacaggcttcccccttcctcttactttcagttccatgtgggttttgttgttgttattttaagaggcagggtcttgctctcttttccaggttggaatgcagtggagtgatcataattcattgcggccttgaattcctgggatcaggcagtcctcccaccttggcccccaaagtgctgagattactggcctccatatgttaataattagaagaaaactttaatatattgtttattatgaaaaattaaaatttttcatgttttggagttttgtatgattatgaagatactattggtgtgcatgtgaatgtataatttctatatgctgtaaaaattataggtaacaagggttttaaactgattaattcattttcccatcttcagttttctctgtagctactacctaagctatgtgaaaatctcttaattgccttaggaaagtatgtcctaacttgtcttcatacctcaattcattttagaatttattaactcttatcctacattctgtttgctgagttaaggctttttcttctctaggcttttatgaagttgagtaaactgatcatcttcctcttgagtattctttatttttctttcttttttgtttttaatttcaaaaccttcattttaagaaagattcttgaacaggaaacctaaggtttatttttgtgctcttcattttccatatctacttggctttcatattatatctatgaactgtcttctattttcctttttttactcttgccatcatagccgcttccatgcactatttaggctaattggtctacccttgcatttcttttttgtataataacaaaagtaatcttaaatatagaccaaatcatgactaaattgtcattagaataatttccaagccccttaccatggcctgcataatctgttttatatacctataatctcacctgtcattctttcccttgtgtactccgttctggccttttactgacattccccaaataatgtaaagctccttttgattcatgttctctgcatgtgtcattcctcccattccttccatggctggttccttctcttcttcttaggtccctgctaaagtgtcacttataaaaaaaggcctttgacaatgtaaaggaagtttcccaccattattttccatcctcttcccctgtttacttcctttaaataattgaaggttctattaaaatactgccatctttcttttctgattaaatggacctagtccctttgactctacttcatataggacctcactcttttatgaagtacatctcctgttctttaagaatatgtatttgaacatggtcagccttttccccatcatctctgtgcctttgcttgggccttatgttgcctggaaggctctcctatttattgagatctttgcctgctttttattgattaggtcaaatgtcattttcttggaagtcatagctacttctctggtcattatagtatctcccatttctttgcttttatagtgtgttgagtatctcataattttttagtatttttgtctttctstaatatacacacacayacayacacacacacacacacacacacacacacayayatatatatatgtatttattttagagataggctgtagcccaggctggagagcagtggctcgattgtagctcactgcaccctcaaactcctgggctcctgtctcaccctgtggagtagctaggactagaggcactcaccaccatgcccagctgatttttaaatttttttttttttttttatggagttgtggttgctacaggctggtgaaagttgctccaggctggtcaaacttctggcctcaaatgatcctcctgcttccacctcccagagtattgggattacatacgtgaaccccgtgcatggccttcatgttagttttatacgtatttatttcctccactaaagttaaatgctcctgtggtattttatcctttattgtgctcacatatgaagagctacagttaagtattaagattgaacatttttaagcattttaatgagctttatggtagaatgtgaactgtgtgagtttagacctaggttttatttctcgatatcttcaatttttagaatcttgctcagcgtttgatctcatgctggttccagtgagctttcatatataggtacagatcagaatcacatacggtgctttgaaaatataaattctctagtccccatctaggacctattaaatcaaaaacacagatttggagcatcagcctttatctatatttttaaaaaattcacaggagattctaacatatacccctttacatctagagtaaaaaatgttcaaaatgccagaaaatttgaaggaaggtaaattttatctgatttgaatgaggatgtaaaggaaaaaactttcatggaagaagaactgagatggtttttaaaggaaggataagatttttttatctgttttaaaaatgggcagttgagagtcagtgaagtttgttattttttctatttgttttaaccagtttagcataaagacaatgttctcagtgaatgtttaaaaattaattcagtctgaattaggtgaagactgaatgaacatctgtgargaaaatctcaggcatggttccaagccataggcttagagcagggttctttttatttttgtagagatggggtctccctttgttgcccagcctggtcttgaactcctggactcaagcgatcctcctgccttggcttcccaaagcgttttgttttgttttgtttgtttttcttaaaagcaaacagtaccttggtatcagtgcatattggttaaatatcagctctctaaaagtgatgattttgcatgactatttagaatattgaaatcatatggattcttttgttttacagagctctgtcttaggctcttagtccctgcttttgttatgtggagtttctttttatcttttcaaatatttatatccaaagagtagaattttgttttaaaattagcattgttaggccagtgaaaacattagattgggctggaacatggaaaaattaatggaaaatggcctagaggtagacagatttttttttttacatgttaagtacctgatgctcctcttttaaaatctttttaacagttttatttgccatcagcttcacagagtttggcacattgtttcttgagggttgtcagaatgtggggagaagagactagtaggtaataagactggaaaagatgggttggaacctaactatatcactggaactcagaaatgaacaggcaaccaaaccttaagacttaattatcatttctgcccctagagaacctgtgaaccagaagcaccaaaacttaattagagcttagaacattagttttcatacatttttaaaaaatagcagcagtactcttgtgaagtcctgtgtgaacccccaaacctaaagttacataaagcagataaagctggaatttaccggttcgggtttattacattaactcataaagttattcagtgagaataacaaggctatgtagtattttattgaatataatagcttgaaattggtgggtgaagaataataattaactttgtatccctcaagtctccttttttatatttttaatcatatagtaacatgaaaatcatgaattccatgggtaagttgtgtactcatgtgttcaagtttctctgagtacatgtgcatttaaacaaagattattgcagagtcactaccttcctaataaaaaacatctgtatgtatgcacaatggtgacaagagagaggctttaccttgaggtctgcatgaaaatatcctaacccaacacaaaattaagtatattggtgttggtatgttaaaacatgaatgcatgttaatttgacctgcatttgtgtgtttttatttatttaataaacagtggaaaaacagataaaaagaaattcaaatcaggcatttacaaaaccccgaggcactgctggaagcctaaggtgtagttaaaactgttttaaaaccactgccataggtggcctgtttctcagtaggagggaatttaccagtacataggttaaggaggctggaaggctgcagcacttttcttagctgagattcctcatttgaaccaaagagtacagaaaagtgatataagcgattattttgtcattctgcaaagggtaatgtctatcaggtggcattatacaatgggtgtttagctcattggtgcttaatccccctgaaaccccttttgaaaggttgggaaagtgaggaatcaataaggcattaaaaaccaaggaaccaaacaaaaaagamacttaaccaaaatgtcagatgcctatattcaaatgagtacaattttcaagacaatgcatggtcactactatattgtatttcacaagtctgagctcttaggcactgagtttatggctgagaatcaagatttgttcatgttaaaacttggaaatgagaaagatatattttaattaggatagattttcatttgattaattaatagcattgatactttttttaatgaaaagttgtattggccaccttcatgattctgtctggatgcaggcttgagtaaygtttgtaaacaaaaaaactttcagtctaattcatacaaaaggaaaaatgatgtttcagtgttatgaaattagcttgagctctttagttccttttcttattttttccccttttttttcataatagtgtattatagataaaaccactaactcataaaatgggaatgttcccttgttttgttatggcatatcttgaagctcaaaggctatgcatgttgatttttttttgggtttagacataataaggaaggcaagccactatttgaggtcttgaaacagaacatgttactcttttcaatcttttgattcagaatattttatttaacaagtgaatcagaaccttgaatttaaggaattatgtaacatttcactagttcattatgtatggcgttaagcagagttactctagatatccaaactgcttttctggtggagacttttaatcccaccccccccaccccccacccccgccaacacacacacacacacacacacacacgcatgcacacacgcacacacacacacacacacacggaaagtaaccaacttgtcaaagaaaaaatacaacaaaatgaaaatagctttggcccttataatactttccatttatgttcccttcatattttttcccagtgagaaaccatatggtttgtgctatagcttctcttgaaaactttgttagctatttaacaatctcactgtaactgagtgaaagctttaatcaagaactgcccatgacatatagatgcctttggttcattggctacttctgtagttgaaaggaagttgaactatttttttggacccagtaagtttgtcctttccacttgggtgttgaaagagcttatgagcagtagctgttctgatttttgttggttgttttctctagggaacaagctaccctctgagtcagcactggacttgaagataaatcctacaattcatgaaactgactgattcgactaaaggatggatagtttgggcagcgttggacagctctatgaggggtctgtttgtttaactgaagggattgttgagttcagcaacttttaattcccctaatcataaggggttgctgttgtgaaaacagggtttgtgaaggaatcagttctggcaattaacatcagtattcttactgacttcgtttttattttattgtcaaacttctttaaagtggataaattttactgctttttttgccagcaagaatttgtatgcactgagaggtcagcatagaagctttgcagtctacttatgaatccaagtttctttttttaaaatatatgaggttataaacatttctctcaagtaaactttttgacacttggattatttcatctttacaaaggtagtatgcatttgtggcttagaatttttaagatttaatggaacttaatttgagtagtaaatattttgctagtttagtgagtatattttggcttatggctaacatgctttttagataacttttattaataagatataatgaatttttaccctaaaactttacaggcttttaaaaatcaatctttgaggaaatgagattaattataatgtttaattatatggatttttaatctgaaacatgagggatttaagctacagaataaaaagcttcataccctaattttctgggccataattatacagggatacagtggattgtctttttgaagataaaacatgctgtgggatgacatagaaaatcccaaagctgtgtctgtgtgataacgcatataattttgttatttaagaattaaaagattataaatgtataaattttattttaatcatttgaaagttgggatggttgaaaatatataggagtwatgatagtattacctagccagtatttgagtagattctttaaatatctttgattgattaggctagaagtacaaatagtcatccatcatggcagagtttagaaaattgggctttagacaaatgagtttgcagaaaattcaactttcgctccatagctgcatgattcttattaccttgttaagcttgatacttttgattaagaacattttttgccagatttgattttctctgcaaaggttaatttgattgaaaaaatgaaattattttgaggaaagaagtaaaggctagtattattttagtgtctactttctgattctgttgatttttggatggtgaagtggttggttttatattgtacactctattctgggatgagatccatgtttaaaacatacatatgcctatgtcttgtttgtcccagtcatatctttatttgtgtccacttttaaattttccttttcggccggatgtggtggcccatgcctgttatcccaacactttgctgggaaccgaggcggcaaggttgcttgagtccagagttcaagaccagcctgggcaacatgttgagaccctgtctctacaaaaaatacacaaatgagccaggggtggtggcatgtgctggtgatccaagctactagggaggctgaggcagtatatgattgcttgagcctgggaagttgaggcttcagtgaaccatgttggcgccactgcactccagcctgggcaacagagtgaaacgctgtttcaaaaaaaggacaaaagaaagaaaaaagaaagttctcttcaacagaaggctgtacttgcatatagtatatagtcatctggagcttgggaatttttttgactaggttgcatcaattgcaaataatgctgtgacattcaaactttaattgcaatagtaattatgctgaaataccttccttaaactcagtttcttcttctattaagaagagccagtgatagaaatggtctgaggaataaagcttgtctctgaagcactgaaataacaagtggtggtggcaggggtggggttgtgagggaggcttcgttgaactcaactttggatagtttatttatttctactctttgaatcataaggaaaatcaaagaagagactttattaattcttaacatgtttaggactcttagaatttggggatataaacacagtgtctgtgttttgggctataagtgtgtattctttaattttgggtgatttggggaatttggttaaaaatgaataagtatttgtagtagtagcgcattttttgtattttgattatgattacataagttccttagtatgatttttctcatggcaaaagccccagatattggccttgttattaagaagataatgcttcacatgttctcaagtcatctgttcaagatgacatatgttttattaatttctaatctaaatcattatcttcaatgtagttagacatgacaatttattattgaggatttagtttggttattggaacttcattaaaactatttgtataacccatgtttacccagattgcattgacctagaaaaagtaacacatactagagtaatgagactttgtcagaagaatgtccttcatcccagcttccttcacattcctctatttctctcrtagtgtctagtgggttgtttcatgtttgcttttaaatagtattgactgacatatgtgctgcttgatagcatgatcatttacttttcctctgcccccagatttttgttatacttagtacttcttccgtgatggcctttgtcagtgcaggcaatttgatgatgatagctattgctgtatttagcatcttggttgttggtaccaagaaaagaggagatcttcacctctaatccattttttttcaacaaaattatttttttgaataatttcccatctacacagtgtgccatttacatgtgtagatgggaatacagagaggattaaggcacagttcttccccatagaacaattgaatcacatgtggtatttgcagcaaaaagaagaacaaagtgatgggaataatttttagatatgggtgtcaagaaaatcttcatcaagaaggtatttcagaaggatgaactagaatttactgtgaggttgaggtttagagtatttggtgttggcaagtacggctgttgatgtatgagaggaaggagaagcttttttgatgtgtgggtacatgaagcatcatggtgtcttcagagaagctgtatcaatctttagagaatttgaaaagaatcttcattacagtattgtcttccaatctgtgaacatggatgggttctccctctccagttgttcccaggttgtctttaatgtctttccacaaagttttgtaattattcatgtttaggtcttatacatatttcgttaggtttattttgtatctttatacaggatgctttgtagtactcactggtatcataattggtgtctttaaaaaaatcttttaaatggattatttctgatgtttagatatatggtaaacttttgtatttggtcaccctgataaactcttatttcaaatattttgtagattcttgtatttggatgatggcaaacaatgatagctttatttcttcccttccagttttttttcctgccatcttgtgctggctagggcctttagtacaatgttatagagaagtgctcatagttgatatttttgtcttgttactgattttaaaaagaatgtttttgatatttccctatttaggatgatcttcactctggaatctcagatgcacttgatttggataccctttttaacttttctggttgaagcaaatattccagattttactggaatggatttaaaaccttgacactaattcatgaggcatttattcagtgacttttatgggccaaaaacataagcaaaacaaaaattttcacttttatggaattcacagcttttatttttcatttgtgtctgtcttcatttgaattacttacactttgaattacttgccattatcataatgaaaatgttttaattggtaggtgttgctacattgacttaaaaagataccagaagtctacggcagtgtttatattccacacagccttttaataatggtctgattaaacttttttttttaatctatgccaatctgagaagaggctaacagtgagccacttttaatttctatctctttaggttttgtttttgtttttgtttctgttgtgagagggagtgttgctctgtcatccaggctggagtgcagtggcatgatctcggctccctgtgaagcccgcctcccagattacagtgattctcctgcctcagcctcctgagtagctgggattacaggtgtgcgccaccacgcccaactaacttttgtatttttagtagagcggtatttcaccatgttggtcaggctggtctcgaactcctgacctcgtgatccaccttcctcggcctcccaaagtgctgggattgcaggcaggagccaccgcacctggcctagttctttttttaaaacataaactctttcagaaaagatgcatctttttaattagcaccagatgtgagcatctttttatgttcgaggcatttttcttttctgcaaactggctagttgtataatttgttcattttccactgcttgctttctgttttctttatgattttaagaactgtakgttaagcagactagccctttattaagtgttgcaggtatctttttttgttctgtagcaatttttgtctcttgaagaagttaaattgatgaacattttattttttgaccttcggattttgtttcttcataacagcatattttaaaaagtagtctgagagttattttattttaaactcttaaatatttagtctgaatattcatgtgaaatttatgtgggtgtaatgaatgaaagggagattcactttttttattttatctatataaccatctgtttgtttattcactttattgtttagtaatggctagcaagttgtcacatctgattattgagcaggtcatctcctcccttgaagtctgaatataacataaagtataacctttatgttttactgactttatatatacatatttgagatcggttttggtgtcctattcttttgcrctattcatatgagcctctatcaaacatctatcttcattactgtaggtttgatcatttttcagtgtctaatggtgttatggcccacttttatcttgtttttgtttttttcttttaaattttctgcaatttcatccttaattgtttttcttttcttcagtagtttttttctggctattcttgatgctttttttcccccacatagatataattagcttggttaatatttttattttgttttattttattttattttatttttgagatggagtcttgctgtgtcgcccaggctggagtgcagtggcgcgatcttggctcactgcaacctccgcctcccgggttctagcaattctcctgcctcagcctcctgagtagctgggattacaggcatgcgtcaccacgcccggcttatttttgtatttttagtagagacagggtttcaccatgttgctcagactagtcttgaactcctgacctcatgatccacccacctcggcctcccaaagcgccgggattataggcatgagccaatgtggccagccagcttggctaatatttttaaattttgttggtatttttattgagctagcatcataattttagattattttagggtagaattgacatctttataacaaatgagtgtttattcccctttgtttaagtaatctgttatttctgtcagtaggtttttatgttttcttcatacaggtcttatacagttctagttgtttatatctacagattttatcttttttgttgctgctagtaaatgtaagtgggttcctttttttttttacattgtatttcattgtccccccaacacccctcccacatttgattgatagtcttcttgatcccttttgattcctcttccctacccccaagcagtgatttgaatattaattttttcattgagatataattcacataccataaaatcaatccttttaaagtatgtaattcagtaggttttaatatatcaaaagatcatggaaccattaccattcaaattccacagcattttcatcaccccaaaaggaaactgtatctgttaaccaacacttcccgtttttctctctctccattccctgaaaaccactaatctattttctgactttttatagatttgcctgtgctgcacatttcatataaatagaatcatataatatgtggcttttttatgtctagcctctttcagctaatgttttcaaggttcatccgtgttgtagtgtatgtcagtatttccttccttttatgggtgaataatattccattatgtggatatatcatattttgtttacctgcttatcagttgatagacatttggattatttccactttttggtaattatgcataatgctactatgagcattcatgtacatgtttttgtgcgaacctatgtttttagtgctcttcggtaatatgcctagtagtggaatcacaattccactgttagggtcatagcaattgattatagccatcctagtgtgtatgaaacagtatattattgtggttttgatttctgtgtccctaatgactaaagattttgaggagttttccatgtgcttattggccatttgtatgtgttctttggaaaaaaatgtccattcaaatcctttgcccagttttaaatttacttgtttgatttttttaaatcattgtgtggtttttatattcttattcatactagacctgttttttttaaattgatacataataactgtacataatttgctggtatgtgtgttgttttgatacatgcatacaatgtgtaatgatcaaattagagaaattgggatagccattccctcaaacatttgtgttgggaatatttcacttcttctcttctagctattttgaattaaacaataaattgttaactgtagtcacctcctatactattgaaccctaagtcttattccttctaactgtatttttgtacccgttaaccaacctcttcagtcccccacccaccaacacttctcaacttctggtaaccaccagtcttctttctatctctatgagatctactttctaagcttctgcatatgagtgagaacatgcagtgtttatttttctgttcctggccttatttcacttaacataatgaccttcagtaccatcttgtattgctgaaaatgacaggatgtcattttttttatgactgaagaatattctattgtatgtatgtaccacattttcttcattcatccattaatggacacttcagttgactctgtatctcggctattgtgaatagtcctgcaataaacgtgggaatgtagatgtctcttctacatactgatttcttttctttgtataaacccagcagtgggattgctggatcatatggcagttctgtttttagtttttttgaggaacctccatactgttttccatagtggctgtactcgttttcattcccatcaacagcataccaatgttctcctttttccatatcctcaccagtattcattatttttgtctttttgataaaagccactttaactggggtaatatgatctcaytgtggttttgatttgcatttccctggtgattaataatgctggacttttttcatataacttggtcatttgtatgtcttcttttgggaaatgtcggtcctgatcttttgcctattttaaaatcagactatttggatttatttttttatttttatttttattttttctattgaggtgtttgagttctttatactaatcatcaatttcccgatgaagggatagtgtgcatatatattctctctttctgcagattgtcttcactttgttgattgtttcttttgctgtgcagatactttttagtctaatatagtcccatttgtctatttttgcttttgttgcctatgcttttgagatcttacgcaaaatatctttgcccagactgatgtcctgagggctttcccaatgtttttttcctaatagtttcaagtcttaaatttaagtctttaatccactttgatttgatctttgcatatggtaagagaaaggaatatagcttcattctctgcatgtagttatccagtttcccaaacaccatttattgaagaggccatcttttccccaataggtgttcttggcaccgttatggaaaattagttgcctataaatatgtgtatttatttcaagttctgtgttctgttccattggtctgtgtgtctgtttttatgcaggtaccatactgtttcggttactgtgactttgtaatatattttgaagcaagtagtagatgtctcgtgctttgttatttttggtcagaatgctttggctattcaggtttttttagtttcatatgaattttgtattgttttttctgtttatgtaaagaatgtccttgatattttgatagactgtgttgaatctgtagattgctttgggtagtattaacattttaacaatattaattcttccaattcatgagcatgggatatgtttcactctttttgtgtcctcttcagtttctttcatcagtgttttatagttttgcttgtagagatctttcacttctttggttaaatttattcctagatattctatattttttgtagctattgcaaatgggattgctttcttgatttcttcttcaggttgttcactgttggcatatataaatgttactggtttttttaagttggtttcatatcctgaaacttttactaagtttgtttatcacttctgacagtttttgggtggagtcttttggtgtttctaaatataatatcacgttgcctacaaacaaggatgattagatttagatttttcctttccaaactgtttgcctttgttttttcctcttgcctaattgctggggctaggacttccagtactatattgaataaaagtgatgaaaatgggcatctttgtcttgttccagatcttagaggaaaggctctttttttttctttttaaatttaagacagggactcgctctgtcactcagaccggagttcagtggtgcaatgttggctcactgcaacctccgcctcctgggctcaagcagtcctcccacctcagcctcctgagtagctgggactacaggcgcataccaccataccctaattttttgaatttttagtagagatggggtttcaccatgttgtttaggctggtttaaaattcctgagctcaaaccatcttcctgtcttggcctctcaaagtgctgggccagaggaaaggcttttaacttttctcattcgatatggtgttagctgtgggtttgtcatatatagcttttattgttttggtgtaagtttcttttttacccagtttgttgtttttatcataaagggatgttaaatattggcaaatatttttttcaacatctgttgaactgaccattgcatgttagacctttattaaatatatgatttgcaaatattttctcctattttgtgagttgcctattcactttcttgatagtttcctatgagttacaaaaagttttaaattttgatgaagcctgattwaaaaaatgtttttggttgcttgtgctttacttgtcctatcttttatttatttatttgtttgtttgttatttatttcttgcatctgctccactggcaatacttgtcttagcataagaagccattgctcgactaaaagtcacaatggtttatacctatgttttctttgttgtattttgtgcatttaggtttttgattcattttgaagtaatttttgtatatggtatgaagtaggtgttggatgttatatattatgtttctgtttcacgtggtcaccactagatttttaccattcatgctttaactaagtatggaattgttgaagagatgggcagtaaaaatattaacgcaagatttttattatttttttttttgaggtggagtctcactctgttgcccaggctggagtacagtggcgtgacctcggctcaccacagcctccacctcctgggttcaagtgattcttctgcctcagcctcccgagtagctgggactacaggtgcctgccaccacacctggctaattttttgtatttttagtagagacggggtttcaccatgttgaccaggctggtctcgaactcctgacctcaagggatctacccgtctcagcctcccaaagtgtagggattacaggcgtgagccaccgcgcccggccaataagaatttttaatgactttgagccttcctgtcccccttcagtgttttagttatctagaattttagttacactttgacttttattcttttactgtcagtgcttattcaaattttctcacatattcttacattccatgccttttaagaggggagtttcctttttagtgaagttgatcttttaatagttctttcaccatggagatgctagtgacaaaccttaaacatgtctctctttcttcatttgtagattgtatataaatttcaagtagacagttatcttttctcctttgaaaatttcattgtttagtgttgctgatacagttagcataattatttttcttttgttagatcatttgtctcttttctggtagctcttaagattttctctttgtctttcgcatgctgcatttttgcataattggtagaaaggacttattttgctcagaactcttttttttttttttaaacagcatctctctgtcacccaggcctgagtgcagtggcacgatcatagctcgctttaccattttcctccctgggctccagcaatccttccacctcakcctcttgagtagctgggactacaggtgcataccatgtctggtttattttaatttaatttaatttttttttgagacrgagtttcactcttatcacccaggctggaacagtggtgcaacctctgctcactgcaacctctgcctccctggttcaagtgattcttctgcctcagcctcccaagtagctgaaattacaggcatgttgccaccatgcctgactaatttttgtatttttagtagacacggggtttcagcatgttggccaggctggtctcagactcctgacctcaggtgacccacccgcctyggcctcccaaagtgctggaattacaaacatgagccaccgcacccggcctaattttttatattttttgtagagacggggtttcaccatgttgcccagactggcctctaacgcctggcctcaagcagtccgcctgcgtcagcctcccaaaatgctgggattacaggtctgagctaccacattcagcctctgctkagaactcttaacttagaacttcttgagtgaggagttgtgtgctgagttcttgaaaatcacaattcttttttttcgaatgttgcttctccagtattcttttcttcttttcctggatatttacattttcattattttgtatctcttaactgctcttttaaattttccaggttttatttctggttaatttcctcagatctttatttatttatttattgtttccctctttgatttatctaatttattgtttcactctttgatttatctactttgctatttaatgcatcttttgatgttttttccctttaattttaatgcttatgttttcactcttaaagagccagtgcactctgttttagaattacagacaccttattcttttgtgatgtttgtcacttctttcatattcttaatcacctccgtagtaattatattttataatctgttttatatggttctgttacctggactctttgttcttgtgttgctaattctcaagtatgttgtacatgctcgttcttatgagttcttttaagtgcgattattttctgtggaaggttcttgtatgttgtcatttttgtggaagtgttcatcaaaatagtttggtgtttgcttcagcaaggtgtctgaagagtttttccaaagcaggtcgagtattgtgttgatttcttgtcgggattcctgtaacatggaatctcatgaggattttctctcttatacttatgcatggaacaggcatgtggtttccatttctcttaagacgtcaccccagtcctccaaccttcctcctttttctccattgctcttcgayagacaggcttccctttttgttctrtgagctgatagaaatgtcctgtatttactgcttttccagagtcctggttttacacagcggttttagtttcattttctgtattctgtgggctcatggccacatttcgtgtacccttgtgggccttagaaactcaacttgtagagactgtatctgacctagcttataattccccaaactccacgacataacctcctggcttcagattctgctttagtttcttgctcttggggttggtttgtttgtttgtttgtttgtttgtttggttttgagacagagttttattctgttgcccaggctggagtacaatggtgtgatctcggctcacggcaacctccacctcccagggtcaaatgattctcctgcctcagcctcctgagcagctgggattacaggtgcgcaccaccacacccagctaaattttgtatttttagtagagatggggttttgctgtgttggccaggctggttttgaactcctgacctcaggtggcctgcctgcctcagcctcccaaagtgctgggattatatgtgtgagccactgcgacgggcccttttttttttttttttttttttaagatcaggtatattttaaatgttgggatgttgtgttttatctcacagttctgtgtgttcataacattggtaggggttgagggagggtgtccatgttagtttagtctctcattttccagaaataatattgtcctaactggttggttgtatttaggaagggtgctgatttggtatatattaattttctaatcattaatgaattctgtaattattttccaggagttttttatgttgtttctcttaggttttccagaaatagaattgtgttatccaaaaaaacagtgatgctttgcctttatagattagccttgaagtttttaaaatctcatttctttcttttgttagttccagttaatttctccagtagacattcctgtgttgttccttacttttatttgaattgggtacttttgagaatcatttttcaaatgccctaaagcagttaatttatcatatattacttttaaatatctcagtttgcatgttcactttagaagttacagtgtaattattgtatactgatgtcatcagaatgtcatttcaagagtaaatgacaaaaaaaaatacaaaaaatgaaatacgaaagtgaaatattcttaatttagaatatttaaaatacaaattttcatccttctagattgttgttatgctgatcttctatgtattactatatttgctgtagtgctctgttgattgagtgtcagttaatatcagggtgttccagtaaccattggtagccctttccctgctgtatatggaaagattgaaattatacaagaatatttatgtgtgaaacatgaaatttctaatgaagaagaagaaacttctattacagtgtatctgatgtacctcattattaaaagaagacctttagttttattatatcaaatggtttcctgaaacccttttagcgtaagattcctgtggttaaacattaaataatatgcaatggaagatgtcattttaaattaagaattcttaactttcaatcagattttcttaatttgagcagaatctgctcattttaattcagcatcctattttaaactacttgttcctgtagtgtggttctattctttcttgctgtttataatttagtactgtatgtaggcacttaagaatgggcatcttgttagtattgtcttcataatactaaatacagaatacctctctccaagtggatgtgtagatattttactcagttctttaacacacttataaaatatacagatgacacaaagctgtgtcttttgtgattagattaggtatttcagtaatttagtttttaatttcctatgcaatttaagtatcctattatccttattggcgggggtggtgatgcttactgttgtacatgttttattttgaatgttctttctttgctttcctttttttttttttccttagagagacagggtctcgctatgttacccagactggagcacagtggctgttcatgggcgctttgtggctcatgcagcctcaaacccctgggctcaagcgatcctcctgcctcagtcccccaggtagctgggactacaggctcacaccactgcactcagcttacatttgaatgtatttaagtaactccagtcagcctcagctcagatgaactcaaattttatttctgcaactttatattaaaataacctcacaaaatttagaattcttaagagaactcttgataccctatagtaaattctactataggtgaatttctatcttaactcaccttagattgtttttatggtaatctctttccacgtactcagccttgaagagagattctactttttgtctcacttacatacctactttgatgtcagaatctttcccttcagccaatgctacacatagccccatccccacatagctttagtagtcacactaaagctagtaaaacatgtaattgatttcctgttttcgtatgtgtgtaagacttaggaattggtcaactatatagcatgttggctgagagcactgactttggaattaaatcaacctgagtttgagtcttgattatgttgctgaattacctatatttgtccttacagtaattattttgatcttttaagttagtttctcctctgaaataaatatgctatacctacctcacagggtggttgtgaggattaagtagattgatggatgtggagcacttagattagtgcctgaaacattgaaagggctcaagaattgtagttctgttgtattacttaatgtcataatagtaaacaaatttactcatctttggttacttggccagtttattttggaaagtcttagagactagctttaggaaaatctgtctaaatgcatttcattttagacaagtagggagtttttatccattgataatagtctaatataatttttgctgtatggattaacctttaattaactgtacaatatagagttagattaaaaacagctctggaatagtttttaaaaaataaaataaaaggtttatataaatatagtaatttggcttcatattttttttaaggagtttgggtttttttaaagtttcttttatacacatttargacataactcgagaattcctatcctattttaatctcaatgcagtagacattgtgttatagtaagtaggagtactagattgggaatttggagagttgagtttgagtcttggctttgctgttgactttgcatgtatgtcctgtggtgtttatagcctgatttacctcacctacctactttagttgctcagaaaaccagaaataattatgttgaggctcttyagaaagtacagagggctatccaaagaaaagaaaagtattacctcagttctctgcttatttttgttcacctacatgttttcagaaaacatgttggtatcttatgaattattagaaattgaaactcatatccctgttaatcataattttgtgactagggcatttttggtagcccttttcttatattgtgaggtggcatattatttcagtggtgaaggtttttaggcattcaccaaatagccagaaaacagttcctggataagcttatttttttcaggaagggtaactgttgctctaaatacccttttcagtctgctcagaactgatcacctccattaagcctttgattaacgctacctggttttaattaatttgcatttcatcagcatttatgcatgtagtttgtagtgtattagtttatatttgggtttttttaagttattttatgtcttttacatgtgacctggtctttttttctcagctagcttggaatctcctgaagggtaaagacaattgtcctttccctttcttcacaataaactcataatagagggygctttgcacataatgtttcttactggttgtggttgttccactggaacatagtggttgttccactagaacataatggtatcaattggcctaattctaaatagtatgcatctgtagaaattttcagagtatgcctgtttagagttaatgacaaaaaggcatcaaaacaacagactgcttgatactaaaaatatggcacttaagctgctatgtatttcaacttttttttttttgctttttcaaacaattttgttaattatatttggctgaatgaaatctagtagctcttcattagataatttgaatttttaatactgtaatatatttggggaatgtgctatttgtattgttaatgattcttaataaaaaaggaattatgccttttataaaagaaaaacttttataaaaggcataattttataaagagccacaattctgttacttcccactcttccattaatttattaaatwtttggtcactcttgctattaaatttcctgatgtaaaccttgatatggaggagactattcttgcagtaaatctgctaacatatttggaaataagtacatttgaaaaaagaaactttacatttgctttaatcagagctttttctacaacaaaacaagataaaattatttccttcatctttgcacttacgatcccaaagatgatgtttcttccaaatgaatgtttgcattttattttccagacttgttctctaaaaccaattattgctccattaagaaacatttttacatcttcttcaggaatgtcgttgtctgctgggtcttcccctcttcattcccccaagattactccacatacttctcctgctcccagaagaagaagtcacactccaaatccagcaagttacatggtgccttctagtgcctctacatctgttaataatcctgtttctcagactccgtcttctggtcaggtgatccaaaaggaaactgttggtgggacgacttacttctatacagacacaactccagcacctttgactggaatggtatgtctacattaaagaggaaattttagtactctcttgtaacaggaccttcttagttgtgaggcggtctaccccctcctgcagctttttattgtgatgcaaaaaagtatttcattttctaacttagatgagaagtctagtctcttcttctcaactcttcaaattaatctagttctgccttactaataattctagttttggactaaactggtttaatcagaaattagattatatccatgctcttattttagtctttatggcatgttttgcttatgggtttaccttgtactagctggaattgatgcctgctgacatttgttgataggtatagatagtttaacctcagtaagaagctagaaaaagtagatggtatgtcctcagtagttactggaagcaaatcaatgataaacccttatttcagatgaggtagttatttaacagctagatctgtggatggtggagtgacacataatgataaggggcctgcagtatggctcttatgctcaggagatagagtagtcagacccaagagagccatgattgtagatgacgaaagagctaccaaaggactggcgatgaagtgagggaagaatcgtgaaacaaatgggaagaggtggccccagaggaaacatgaatattaagaccaaaagaggaagaacatggccagaaagaaagatttcttatcagagtcaattagtaatgttccaggagagggagaaggaacaggagtcagggggcgagaatgaatggggaaggagagggaaggattccatgttacgtaaattgtaccttttttagcttcattacttcatccatattcaaaaattattttatttaccctagaaaaataagtagtagatgaagtgagtgagaaagtcagagtccactaaaacaggggtcctcaatccttggaccagagaccagtgttaggaaccaggccgcacagcaggaggtgagcagtgggcgagtaagtgaagtttcatccgtatttacacccactccccattgctctcattaccatctgagctcctcctcctgtcagatcagcagaggcattagattccataggaacatgaaccctattgtaaactataaatatattgtaaaatacatatatattttatatatatgtaaagttattaaattatataaatatatattatatatattatatataattaatatatattatatataaattatatataatatataattaattwtatattatatataaattatatataatatataattaatatataaaattatataaatatatatattttttgagatggatgttcgctatttcacccaggctggagggcagtggttcagtctttgttcactgcagcctccgcctcctgggttcaagcattcctctcacctcagcctstagtagctgggactacagacgcacaccaccatgcctggctaacttttgtatctttaatagagatgaggtttcacccagttgatcagttggccaggctgatctcaaattcttgacctcaaatgatccgcccaccttggcctctgaagtgccgggattacaggcgtgagccaccatgcccagcctaaactatgctatcttatgtaaggaaaccaacacaagaaaaaagagatattattctccctgcagacacaggctaaaggaaaccttacaagtatcacaaaactgcttcctagttgagatgcasagcagagcagtcatgttagggcagcgcaaatcagctgaattcgtttttaaaagagaaaaaaggtttcattgtttaaaatgaaagaatgaaaaaatagaaaagatatttaaaactgaactttgattttgtatcatggaccagtgaaggagaggcagagaaaagagtgataaagagaacaaagggtggtgggatgagtccagttgaaagaatgaaagacaagaagctggaagctgatttagtaactttattgtagtttgcttggaaggtaaatgtattattgtatccttctgttcacttaaactgctgacctagagtaggtttgaataacactttgtttagtttggccacaaaatgcctgtgaaaggggaaattctttgggcagccagggcaatatcacttccttatctcccagtacccaaacacctttagtttctccttccttccttccagttgctttcaaaaagtggcgatgaactgcttgtatagttgccatttagtatccaagggggattgattcccggacgcccacagatagcaaaattcctgggtgctcaagtccctgatatagaatgacatagtatttgcatagatcttatacacatcctcctgtrtactttaaattatctctagattacttataatacctaatgcagtataagtgctttgtgaatagttgttataatgtatttttaatttgtattacttctcatttgttgtattgtcatttttttcccctgaatatttcctacccatggttggtcgaatcyttgaatacagaacccagggatacagaaggctgactatgtgacatttcttccaaagagctacttttatcttctcaatggagcttaaattttactgtatctgaagaaatgttttctttctcattagatttyttttttttttgagacagagtcttcccctgtcccccaggctggagtgcagtggcacgatctcggctcactgcagcctccacttcccagtttcaagcgattstcctgcctcagtctcctgagtagctgggattataggtgcctgccaccaagcctggctaatttgtgttttttttgttgtttttttttttgagatggagtctcggctctgtcaccccagctggaatgcgttagttcaatcttggtgcactgcaacctccacctccgggttcaaatgattctcctgcctcaacctcccgagtaactgggagtacaggtgcatgccaccacacccggctaattttttgtatttttagtagagacaggtttcaccatgttagccaggataatttttgtatttttagtagagatggagttttaccatgttggccaggctggctcattagatttttaattgattactgaaatattatgtttatttttatttttttaattttttattttatttatttatttatttattgagacggggtttcattcttgttgcctaggctggagtacaatggcacaatctccactcaccacaacctctgcctccctggttcaagtgattctcctgcctcagcctcctgagtagctgggattacaggcttgcgccaccatgccccactaattttgtattttcagtagagaccaggtttctccattttggtcaggctggtctcgaactcccaacctcaggtgatctgcccacctcagcctcccagagtgctgggattacagttgtgagccactgcgcctggccgaaatattatttttaatatgaattctttcagaaagtattctctaacagctattctctgaggtttttacttcaatattatttaaagatttaaaatgtattaaaatttattgctatcatgtaaagattaaaattttatcaaaacaataataaagcttattgattatgaaaaattagtcaggctgggtgtggtggctcacacctgtaatcccagcactttgggaggccgaggcaggtggatcacctgaggtcaggagttcaagaccagcctggccaacatggtgaaaccctgtctctacaaaaatacaaaaattagctgggcatgatggtgggtacctgtaatcccagctacgtgaggctgaggcaggagaatcacttgaacccgggaggcagagcttgtagtgagccgagattgcgccactgaactccagcctgggcaacagagcaagactccatctgaaaaaaagaaagaaaaatgagtgattacatttacccccttcctacctttttaggtgtttccaaactatcatatttatcctccaactgcacctcacgttgcttatatgcaaccgaaagcaaacgcaccttccttcttcatggctgatgaactccgacaggtatgctttcagaattcatagtaggaatacttaatgtctcctgtgctttagtgaacaggggaaagaacagagctcttttcaaatcatattatttaatcaaatatgctctagtaaagcacatcgaatttagaagttttaattggtattttttttaaggaaacctgtcttttaaaaaaatttcaaataaattatgtggcaggatataaaacatagaatagctatttaaatggttcactgttctgtacttcattttatttctatgaaaaggctctttgaagtatataaataatttaaatggtttctaacagtatttttctaatagatgtaggttaaaaataagtagtttggctcaggaaataactttaagagagctcaatatttttttaaaagaatgttttttaaaagtttttttgttttgtttaatttttggtaaacagctagttatttggtatgtagaatttcactttacactcagattctcagaaatatttttgtttcatagaagtgagttctaccagtatagtgttttttaaattaattattaccagtttactagtagaccttgaattttcagccacagcgttagtcacgtgttttgggtagcccagctaccygtgtttaaggggcacatctacttaaacccaatcttaattatggcatgtctaagtctgtctgggcctggagttcagacattttaccatgtttagaaatgttttaatatttaaatgattttaatatttaaaaagtgcatatgccaaaaatattaatacttargttatttaattataataggaattccaggtttcagaatctgtgtttaaataaaaatatacttatttctgtttcataggagctgatcaacagacatttaataacaatggctcaaattgatcaagcagatatgccaggtaaaaagcaagttgatccttcctttcttttaaaggctgttataattcttacgtggtagtacatgttttatgcattattaagaagagttccaggctgggcctggtggctcatacctgtaatcccagcagtttgggaggctgaggcaggaggattgcttgagcccagaagtttgagactagcctgagcgaaatagtgggaacctgtctctacaaaaaataaattagctgggagtggtggtgcatatttgtagtcccagctactcaggaggctgaggcaggaggatcacttgagccttgaaggttaagactgcagtgagctggctataatcgccccactgcactccagccggggtgacagagtgagaccctgtctcaaaaaaaaaaaaaaaaaaaggacagtcccaaggtactactgatcatctagtttatttctgttaattctacatatgacagtattctagttcacaaaaaaagtatataattttagaattcatggtgatttactttactgtgcaccagaatatttttatctcctgaaacttaatgaagtatgggttcttaagcaggagaggatggtaattattaggcctatttgtgagactactgtgtgcmagacagtatactaattaaatactttacatgtcttactttatttctcacaaacatcctgtgacatattattttcatttccattttacatatgaggaatactgaagttgacaggttaagtaacttaaccttcaggaccaatggctggtaaacagctgactgattccagacttaaaactaggttgttctaactgtaccacaatatttcttaaagcgtattaaagtatctttccttagcttactctgtataaatgaaatatgatataatttagtaaaawttcataaataatacagtaggaatacatttgccataaagatctcaaaatgcctgcttgtaatcagaaattcagcatcgtctagtgagtgttgtctcttgattgctaaagaattaaaagaaatatgtctggctgttacaccttaagatggatctttccaggtaaggtgggaaggaacttacttgtcataacctttgaaatattcatcttggaatttttcttaactgtttaatattgtatttgaggctttagccaggttttgcaaaagtttaaaaagaaaaaaaaatggaaggcacaaagaccggaaaggagaaaataaacctaccatctataaatcatgtgactgcagattagacattatttgaaataacaactgtagaaaatggctggatgtaagattaatacatcagttgcatttctgtaggccagtacccagttaacttcaaaatataattaaaagcaaatgctacttaaaatggttttgcaatatcagtatgtaggaataaataacaacaaaagataggtaagatttcagcaggggagatttatttattacgcagtattaaataatataaatgaaatactgtagattagtagaggttactcatgattaggaagacagaacaagtaagatgtcaatttttctgaactgacatgtagatccagtagaattccagtcaaagcataacttccagtcaaatcttttcatggagtatgataaaatgtatcaaagaataaagggccacgaccatccaaggtactttgaagagtatggttattatttatgttcatatgaagaatttgtttgtgtattagggaaggagaggtttgatttgagtctgcagtaactaaatcaatgtggtgatagcacagggttaaacagattgattaacggaacagattagagagagccagacacgttctgtgataaagttggcaaataagtgggggaaaagaaagcattggaaaaatgtttttggttttttaattaaaaaaataaacttttattgagacagcatcttgctgtcacccaggctggagtacagtggcgtgatcgcagctcactgcaacctccgcctcctgggctcaagcagtcctcctacttcagcctcccaagtagctgggactacaggtgtacaccaccacacttggctaatttttgtatattttgtagagagggtttcaccatgttgctgaggctggtcttgaacttctggactcaagtgatccacctgcctcagccttccagagtgctgggattacaggcatgagccactgtgcttcaggccacaaaaaatggttttctatattgacaagataaaattgggtcattatctcaagccacattaaaaagtcaacttcaaatagattaagaacttacatgtctaaaacagaactctaaaactctttctgtaaaatataaatgagtgtattttatctacttttaaaatactttaaaaaataaaaattaattttatctacatttgtagcgatgataaaatatttaaaatttttttgtcacgttctctttcaaatatccatgagtactttacatgattcatcagtatgcacacaattttcaacttagacattttcaaacaaacaccgccctatgtttctgactatcccttcccgcgtaacatttgtttgcattatagttcacccatttgacacttgataatatagtttttggcatcctgaattacagtgcagtgaacatattcatctacttaatttttttcttctgtaggaaatatttttttccttagaagaaatacttcaagtatttctaaactgatctatagattcagtagttcagaaatacttttataattatttatacttttaagtataaaaaatgtaaataattgataaattgatgctcttttaaaaagatataaaaaagaaaaacgcgccgggcgcagtggctcacacctgtaatcccagcactttgggaggccaaggtgagtggatcacttgaggtcagaagtttgagaccagcctggccaacatggcaaaaccctgtctctactaaaaatacaaaaattagccaggcgtggtggtgcccaactgtaactccagctactcgggaggctgaggcacaagactcgcttgaacctgggaggtggaggttgcagtgagattgtgccattgcgctccatcctgggagactctgtctccaaaaaaaaagaaaaaagtaaagtagaagtggttttaaagcttattacatagaaccaaattgctttccaagggatatcaattaaacaccattgatttgtaagttgtaataatttactagcaaccccatagcaaacgagtgcctactatccttgggaattgctctgttctttgtattttcatagtgtattagctctcaaagtatgattccttaaccagaggctcattttcattgacttttaggaacttgttagaattgtgagttcttggatcccacttcagattgtatcagaaactcggggaatggggcccagcaaactatattttaacaaggctttaggtgattgtgacaggtggtgacgtttaagaaccagtgccatagcgaattgtacttcttaaatggcgactttacctcttacatgttttgtataaatttgtgttctttatttttctctaggcctcttgagggtaagaacgtaatatttctttaggttcattagtacatagtagatgctcagtatattttgctgatttgaaattaatcctgtattaagtgctccttaataaatgaaatagctggaaaacaaaatttaccattttaacttccttatggacattataccaatcattcaaatacaaactaggtaaatgcgcaaaagtaaaagttacagctatttcacttgtgtgtattcttccgttgtactgcttttattttatttatttatttaagagatgaggtcttaaatgttgcccaggctgaattcagctcctgggtttaagtgattctgctgcctcagcctcccaagtagctaggactatagtcacatgcaatgacacttggcagtatactgcctttatttaagtagaacatgccacttggtgacatttaatcattctacatttgtttttcattatggccatgccatgtagagattatgattatagaatcaaaaagtcctgggtttgcatcctacctttctctctcagctatgcaatccttattatcctcatttatgaaatagggaattctacctcatggaattgttgtgagaattaagagataatgggcataaagtatttggcaaatgcagaggaaggatcattttgaacctgtcttctggaattagttttcttaatagggtttcatctgtgtttcttaccagaggtcaaaaattatcagttgtttttgtttatagggttttttttttaacagacataatgccatgttttaaaaatagtgttaaacatgtatattataaaacatttggcaaatacaaaatagtgtatagaaaagaataataatcctccctttaaaaggttaccattgttaccatctgctatattttcttctagttggtttactatggctgtactacatgttgggttatcttccgttcacttaaaatatcatgagcattccgaagtcattcgagacagttaacagaatgaaagtataggttggtgttcaattggaaaacatgatggtatttgaagcattaaaaaatacatgtttttttattataaacctgataaaatgtttgctccagaaaaatttatctcagtgataactcaaattatttataaaaattatttctgaggaacaaatttgtattgtgctataaaaggaaatgtttttgaatgtatgaactttagttattctttggttattttattatataatgcctatttttattgatactgaagctagtttgtcttatggaattgtaataaatgtttacactattctaaaatacaagagcacattgtgatacacaaggggtttatagtaaatatcatgtcttctgtatttttgagaaagatttatgaatgcctgtattttcaagtcatcttcttatgaattactctagcagttcctacagaggttgacagctaccatagcctattccctctagaaccactgccacctcccaaccggatacagaaatcaagtaattttggatatattacatcttgctacaaagctgtaaacagcaaagatgatctgccatattgccttcggaggatacatggtaaggaagataagttatcttcttttataatcgtatcattgaggctaagattattcaaaccttcttgaatatattatttaatatatgaattaaaaatttttatttggaaattagtacctcatgagcaatgtataaatatggcaatttttttccatttctgatggaatatgaaggagacgtcaattagagtttactggagtagaaaaattgtcttccaggttttcgtcttgttaacacaaagtgcatggtgttggtcgacatgtggaagaaaattcaacactcaaatatcgtaactttgcgtgaagtatttaccactaaagcatttgctgagccctgtgagtaacttgtaatttgtctttctgctggtgagcttcattatttgaagccagctttcagtaatgagtgtttgtgttttattttaagctcttgtgtttgcatatgatttccatgctggaggagaaactatgatgagcagacactttaatgaccctaatgctgatgcctacttcaccaagagaaagtggggtaagaaaaagatgcaggcaaactatattttgactaatgcttttgctctgtggaagagtagttttctattttaaaatacgtataatttttccctgtaatcatttagtttaaagactctattacattttgtactagttgttttcatgttcctgataaagacatacccgagactgggcaatttacaaaagagagaggtttaatgaacttacagttccatgtggcttgggaggtctcacaatcatggcagaaggtgaaaggcatgtctcacatggcggcagacaagagaagtgaatgagagccaagtaaaaggggtttccccctgtaaaactgtcagatctcatgagacctattcactaccacgagaacagtatgggggaaattacccccatgattcagttatctcccaccagctccctcccacaacactgtgggaattatgggagttacaattcaaaatgagatttgggtggggacgcagccaaaccatatcacattttaaaaagaaatatgtcaaagaaatggagatgatggtcaagaagttaggaaataatgtcttttgcatatttactaagataagatagatttttgaagactcacatagatatcagatatttaactggaaatgtgttaaaattgtttttctctttaaaatgtttttcttttaaaaatatgatgctttcttaataaaggtgacttggaaaattcaatagcttagaaatagtctctctggcttccctgcctaagtacaaccattgtgaatcttttagtacatttcttttcaatcttgctttgttttgtttttgtctccttttgcattgttttttgttttaaccttttatatcatattacatcttttctttattataggtattttccccatagtttttatattctctgaatataatttaatgattcctattatgactatattgttctttatgtaattatttccctaaacaaatgcttttgtttgaaggttggattccatgttacttaatctaaggtttcaaaatagaattttaagtaacttttccttaaacatgaaatattttcttctttgtccctttctaatatatacttaaagaattgttttatcattgagattttgcaaacaaccagaatacttgaattctaacaaatgtgtgttaaagggtaaatgatttcagagaaaagtaaatccattttgagatgtctattcattaatttatgtatttagggaaggtctcagtctatgggggcaagaaagcagcatcacgttattatgctttttaatcttaagattttcttgacttgaaaattaaagaggaggggagaaagatttgagtccatattctagtatctttcagattacaactcctttcaagactctaattatagacaaaaatatattacttctgtttacttgttacttctttttttttgcatcctgacagttgaaaaaagaaagttgtggttacatggctgtttcacatttaaaatctggtcatagaatgtggtcatttttttccttttgctatgtcatctgtagacacatgcataattttgtggaaggggatgtggtacaactattcttatagatgactatagttgttgctcaaatttattttggtagtaacacctgtgaaatgactgttggctttaatttataactgtgtttctcaactgcttaagtttttgtgggggctgtcttatgcatttcagaatgtttatagtggcctcttctgactgaagggcctggcttctgcctactgaatgccagtagcaatccccctctacccctattgtaatgccagaaatatctccagatgttgccaaatgctggagtggtttcttttgagaaccactcttttatagcattcttttccagtaattttttaatcataattattctgtttttggtgttcactgattaatatattaatgtttatattttcataggaagtagtccttttttctaatagtttaaaatattgtttgagtagtcgtaacttccctaaccataccatacatgcataaaagcctaccattttcttacactatgtaatttattatcttagcacaagtgaaaaaaaaaagcaaagtataagaaatatattgatttagaaaatgagaagaatagcataccatgtggagttgatacgagattcagaatgagtctatatcagtaaaacaactagaacagagtctggcacacagtaagcactatatgtttgctgcaaaaactcttgtttccttattactacattaattaaatagtttcatttaaacagttcatagtcatttttcacattgtcttggcatttgttaccggtcccatttttttgagccttcttacacatatttccagagtatattatcttctgttctgtccaaattgagagataattatttttaattttgtatgtgctgcttaccagaaattttattccaagccataagtacatatttgctatttattataagtacataattaaccatttaattatgttgctttttataactgattcacaaaaggttgttttacaacaatatgaatataagatcagcagggtgtagggactcatgcttgcaatctcagcacttagggaggctgaggcaggtagatcatttgagcccakgagtyggagatcagcctgggcaatgtagcaaaagtgtctctacaaagaaaagaatataaggtcatattccttggaataattacaaaatcttgattaaatttatatgtctccttttctactgatttacaacatattaacaatgacctagaaaatattatcaaaaaccacttaatgagttgatagaatccacctttgtggtagaggggcctgagtgatataaggaaaacaaacattcaacataagtgatggtagagacttttatttccatcaagccacacaatgaacagctctcacatgcctaaacaataatacagggtaggattagccagccacattttaagtagaaaaacctctacggtttctgtttttatatttatttggttaacaattacatataaattcttactttaagtaatttttattcaataattaagtggttacagaaaagagcatttcagtgagagccctattgctggtatcaatataaaaggcataatctcggacaggaatctttgggcaatagactaaacttaaattacacacatacatacacacacatatataaattgamatgttgtgccatgagtgtacatgaattgtctttgctaattttgatgttaatgctttagtcttttagttgattacttaagatgtmattttttggatttctttgctgtataggtcagcacgagggaccattgcccaggcagcatgctggattattgccagaatctcttatttgggcatatattgtccaactaagttctgcattgcgtaccattcatacagcaggtttggcatgtcgagttatggatccaacaaagattctgataactggcaaaacaaggtactagcattttgagttttggtttcttttattgagcgtcttacctttgacagcttagtaaacaaaacatgattgttttaattctgccttttcatatattccatccagaagaacttctgtaactttgaattcatttgtaagctttttaaagaaaaaaaaaaagttgaactctgaataaaatgcctggttattaaccaaaaatcttgggaaaggttagggaagtatatgtggttagggttaggggaatataaaaataatatcaatacaacttttctatgtagcaccatggttcacaaattctagcatgaatcagaatcacctggaggacttacaaaacacagcttgctgggccctacccccagagattttcattcataagtctgcattggggcctaagtatttgcatatttaacaagtttctaggtgttgccattgctgctgttgagtcacatgctttgagaacaactggtacagttatcagtcttgtcttcacctgagttttgagttgctgtaattttgtgattgtcttgggctgcataacataaagagctgaagatctggtaccaagttatttaagttcatatcctggctttgatagtttactgtcgatatgccgttgaacaagttacttcttcaaattgtgttttgacaaccttattagacaagtgtactactaactccattctgcttatttatgaggtacccctcataaagttattgagggatttgaatgagtcatgtaaaatgcttagaacagtgtctggtacatcttttgcaagtgttagaaagctaactagttctcttttatgaatgactaataaacagcttggaatggtgaaaaggacactgacctgttagtcaagagatgtgagttatagttctggctttctcagtttctgacttttacagctgtaggtatatcacttgatatctctgagccttaattttaccatttctaaaatggtggttggtggaggtggtgtggggtaggatggaagttaaactcaattctgagatccttcctaatattttgggaaatgttacttttccatgagtatgcaatttttwaaaaacttattttaattattttctttaaattatctggtccttaaaggttgcgagtaaattgtgttggagtttttgatgttttaacatttgataacagtcaaaataataatccattggcattaatggcccagtaccaggtgagtaagaattaacatggatatttacttgttttcctttattaaagacaaattttgttcattttaaagtatttcagtgttttaagcctagattttaatttattttggggtggtgtctatgcagactttgaacatgtatctccccctcccctccctctcttttcttcctttcctttcccctctctatttctttctctctcttttcctttctattcttttgcttctgtcttgctctgtcacctgggctagagtgcagtggtgctgtcagctcactgcagcttttgaactgggcccaagcaatcgtctcgcctcagcctcccatgtagctgggactacagatgtgcactactgtgtctggctaaaattttttttatttttattttttgtagagatagaggctcacgatgttgcccaggctgtatttcttaaccattatgatgtacttagtgtagagcccttgtgggttggaataaagagaattcatgacaatgtcagagactcttttttttttttttgaggcagagtttcactcttgttgcccagactggagtgcaatggcgcgatctcaactcaccacaacctctgcctcccaggttcaagcgattctcctgcctcagcctcccgagtagctgggattacaggcatgcaccaccatgcctggctgattttgtatttttagtaaagacagggtttctccatgttggtcaggctggtcttgaactcctgacctcaggtgatccgcctgcctcggcctcccaaagtgctgggattacaggcatgagccactgtgcccggcctcctgataacgtcagagactcttaactgttcaaaatgaaaatgtatttatgtgatttaggaaacgtgtcctaagcatagatagattaaaacaagactaatcagatgaatggattatattaaatgacacccttctttttcactcctttaattacacctattatttttacttttagaacacttgtctgactaccagtcatgaaattttagaaatgttttcataggtttgttattggattgccattttctaagtaatttttttatttagtcagaacataccactcacttcttatactttattagtatttgattattgtctgacttcattttattagtgttgatttaggcctcgtgatgcttcttagctattttgctgtttcttatttcctgatttaaatgataaagtatcgaagaataagaacgtatcttcaagcattaagaacagttgctttaggccaggtgtggtggctcacacctgtaatcccagcactttgagaggctgaggtgggcagatcacttgagctcaggagctggagaccagcctggccaacatggtgaaaccccacctctcctaaaaatacaaagattagccaggtgtggtggcacacacctgtagtccagctactcaggaggctaaggcaggagaatcgcttgaacctgggaggcggaggttgcagtgagctgagatcgcaccactgcactcctgcctgggtaacagagctagactccatctcaaaaaaaaaaaagagaatagttgtttttgccttgattactctgcaagtaacaaaactaaagtaaataggtcattcagtttgtattggaatgcttcacattaggataggcagctatgattttaagacaattttagttctttgtgtataagaagtttttgggttttttgaacatttattaacttacaaaggtttgctctaaggcagaatttcttaattacatggagaaacaccttattcttctcttttcaacttattttgtttaaagttttggaagaagattttagttcactgatagaatttcagaacaaaaagagaacaaaaaggataaaatgagaagtagagtctaatcagtgtttagtatttcagttcatgcataaatctgttttgctcgtaaaccacagagaatacagtcccaaagacttgcaggcactcattgcattcagttgtttgcagacgtttcacacccttctttccctctgcttgtgcccacctaacctcagcagcagccaagctgttctggttgatagcaacatctagtgggcaacacagggaggaatawgattagttctgtttttcccccagcagcatcattctgttcttctgcctgagggcatttgccccctctttcttatctggagacattgtttcttagctactttcattcttatcttctctcttatacttagtgcctaggtagttggctccgattaatttttctttatgacctttatgcttccaaaagtgacagattattgactgttaaaatattagtgaatatatacacttggatatacatccaagcagataatattaaatttttgaaggaaaattacacatttttagagccagtaccatcatcttctaatgtaagtatctagaaacccgtgtctgcattaaaaaaaaaaaaaactgcacacgctcctcattcttttctcagtagggttccttttcaagtatgttatgagtcgtgtagttacsttgaaaaacaaaacttttcataagaaaaaaatccctgagttcagacaaccaactttaagcatttagggcaccttattaatatttgtaagtcaggatatgccttcattcataaaatcaggcaaccttcaattaattatcacctgtttatttttttcagcattaaaggatatatatcaggctttctttttttgggtatatatgtgtagctgattttttatattgcttattatagtaaggtataggaaagaattaaagatagtcccaaagggggagtgtgattttacagagaagaggatacatgaggagtgcattgtttcttgtagtctatttttcatagtttgtttcagacacgtgaatagagactgactttgagtaaaatggacataagtagagccatagatagaatcagaaaaagaaatcaagaagtcaagaatcaggaagaaactgaaaatcagttggggggcaaatctcctgaattcaacaaatggggggaaaccagatggaggtaagaagcaaaataacaaatggaaaattatttagctgagaaataaggaaaggagagttactgggttttacggtgtgaaactctcttaagattttattaacttcttttgtttaaaaaaacaactctaatttaatctggactgtgtcatacatgtactttatttcaaaaagtggatgttcttaccttgagtccgctttagagaggtgatgggatgtactaaaaatcagatgttattttttaaacccatctggttcttcagctctcttggaccattttggttttctgtctcataatagagaataatggaatattctgggagggaggcttaatacagcatcagttcagggtggaaccaaactgaaaattctgctgcttgaagagttggaagactgtgtgttggtacctgctgctcaaacacgtgataaataacaacaatctttggtatgctttgctggatactttggattgaatcgcccatagaaatttatagttggcatttatatgcactgatttcttttggctgagatttctgtaatttcatgaatataacttggaatgttttacttgatctaaagtgtgattgagaggaattctttttggagttcatcacagtgtcctccagcaaacagaaatgatggcaacagtaatagttctccttcccatgccagcttccctcctgccattctgggctcctgactctatcaccagtgaagttttaaaagttttctgggatgaatctttgaatcttttctaatagattcaaagtagtttgtctacctaatcagtctgtctccttatctcatgttcagtgtcagattcacaaatgctagttttggataaattttttagtatgaacttttaaatgttattttagtaatggagtttaacgtctttttactcattatttgggtaggctgttgttaagtataaccatataatgctagaatttcactaatgattgccttaaagttacaaatattccaacaaaccagtggttctcaatcctggctgcatattaccatcatttgtggaagcttagaaaaataccaatacctagatttttatcccagactaattataccaaaattgggacgaggggatggctactgctgattttggttttgtttttaagcttctcaagtgatggtaatatacagctatgcttgaaaattccttataataaacgaatgttcagtaaatgaacgtgtgtctaataatttagatgagttctcagattttaaagatctgcaaatgtctgttgtagaaattgcttcaggtggtttcatgttaactctgaagtactccattcttgaaggcatgtggttgttaatagcttcctaccaatcrgggccacttgggatgaccatactgtttcctggagttataataggtgataaaggacttaattcagccagctgtcttttgaaaatccttttagaaggaaagcctcagaatggtaaatcttgagtgggagaggttttaggaaagcaggtggtggttccagagctcaaagatctgttagagtgtgaggaaaaatagtctatttggaaacaaagatagatgggatgtcattcattgaggtttgcagcatttttgatgttctagagaatttgctctaaaatctggttaatgctaatgtttgtaataggataacttttcttcagataatccttcacattcccactatattctgggagttacagaaaatgagcaaagtatgtatgttaagttatagtggtcatagcaaagcaaatgtatagtaaccttaaatttgttgtaatagagaagaatattacctctatttaaataagaaaaaattagaaaaactttttaaaagtggcaatttgtagttggcatgggaattgcttaaagtctcttaaggcgtggacctagaactaccttcatcagaattacctgggtgctttaaaaatgttgagccattttctggacccacccaatgagaatctctggtagagaggctcgaagtcgtctttttaataagctccaggttattctgagaatcaccagtatttgaggaccctgcctgcagcttatttataatgatgctttttccatttaggcagtagtgtcagtgtattaaatgagtacctntgaaatgaaaattaaaagttatatttattctttcatgtcagcaagcagatctgatatcattaggaaaagttgtgttggctttggcttgcaactctttggcaggaattcagcgagagaatttacagaaagccatggaactggtgacaatcaactattcctctgacctgaaraatctgattttgtaagttttaatatatgataaattgtacagaatgattatttgcgataagacagagctttttttgttttaagtgattgttttggttcccactatttaaaatcaagcaaaacagaaactttatgtctttatttttattgcaaagtaaatatttcttagataaattgataaaccagtgtgtttaaattagttattgatgttttaaacatttrgttaaagggcacccagtagaagtttgttggtatccactagctacatgtgaccttttacattgatattaattgaaatttaaagcttacttcttcaattacactagtcacatttcaagagctcagcagccacrtgtaattactggctaatataattggacagcacagacatagaatatttccctcatcttggagttctgttggatagtgctgctctagagagtgtgaaagccatcatgagtaagcctcaggtgcaatccagtcatgtactctggccaaaatacccattctggaaagcatttgtgtggagacccccatgcttacactccagtatcttaacgctccagagaatccttgagtatcgatttgagatgaatttggcttaagagaaacccattgtgtggactactgtcacaacagaaggacttctccgtaagatatagctactattgggagatcccagagggtgggcaaccacgacctttattacagttatgagctatattagagaagaggtgctaatcaacagtctcttttagcttacagctgcccattctgatctttctgtgtagccctggatgatccagtttctttttggaccagccctggggtatgaattgggggatggagggtgggattgcccacctgttctttgttacactggcataaatgtcctacttgtgacagcactagaagccagtggttgtctggatcctattcataatcaaattcaaataagatgatttatcttctgaataaaaatacttgttttatatatgatcacaacagtgattcctagccttagtttgcaaatacctaggatgcctcaaataatttcaggttataatctctaaattttcctttttaaaaaagtggggatagaggacaaaaataatcagccatatgttaataattattgaaactgggtgatgatacatggggattcattatattactattctattataaatgtttgaaattttctttattaaaaaaatgaataaacaaaaaagccatactttaataataaacacaaactaaagtttatggagtaattaaaccatgtatcgggccctttcaaactgcttgatgtgaattaatttttttaattctcccaataactctataaattagataccattattagtcccattttagagttacaaaactgagccacagagataaaataacttgccaaagtcacatagcctgtaataacattaaatatgattagcagggtacacatatgtccatacttacggatgaattgctaagatatagtttattcacatgggtatagctattcatttatccacaaaaatgatgactactatatgccaaatgcaggatactttgaatgaggtgaacaaaattcccatcttctggagcttacaccctaatgggaagaaagagtaaataaacataaaaaccagtgagatattttcaggtagtgataagacctatgaagaaaataagagaattacaagcagaagagtgaaggagtgagtaggaggctgctttcatgagaaagggcagagaatggctttacgtatagaataagcggcagtagatgattgagaatctttgtgttctaacaggtagcccttgaaatgtgtagtattttctgccactgttctaatgatagaagaaatttaactggttccttctgctgcgtgttactgcatttctcagaaatgaatatgtcatgataccttgtaaattaagttttagagcagaggacagcttcttaaaaaggctcattcagtttagcaaaattgaaaacccagttttagttctgaaaattaatctttgcaaaacaacaggaaaagctccccaccccacacctacccccttttagtcctctcaaaaaagtttctaaaaaccttttcttttttggccgggtgcagtggctcacacctgtaatcccagtgctttgggaggccaaggcaggtggatcacaaggtcaagagattgagaccatcctggccawcatggtgaaaccctgtctctattaaaaatagaaaaaaattatctgggcttggtggcgcacgcctgtagtcccagttattcacgaggctaaggcaggagaattgcttgaacccaggaggcagaggttgcagtgagccgagatcacgccactgcactccagcctggcaatagaacgagactctgtcaccaaaaaaaaaaattctttctattaatttatttttgttttttgtttgtttccttttttttgagatggagtttcactttgttgcccaggctggagtgcagtggtgccatctcagctcactgcagcctctgtctcctgggttcaagctattctcctgcctcagcctcctgagtagctgggactacaggtgcccgccaccatgcccagctaattttgtatttttagtagagacggggtttcaccgtgttggccaggctggtcttaaagtgatccacctgcctcggcctcccaaagtgctgggattacaagtgtgaaccactgcacctggcctgtaacaatcttttcatctagcactattgtaaagaagggtttgagaatggaaatgggtaagtgcagtcctacttcacttttctttctcatttccatagtagtgaaaatgtagagaagagacatgtttactgtttctccattggctgttacagttttccagaggaatgaaatgtaatatttaagaatgaacttgacttgcatgaattaaaatgttttcaaaattttgtgtgctaagatgacggcagccaaaacagctatgtttgggttatcttgttttttaaattgcatgttggacatccaagtaattcctcttttatcttgggtaggtatttgttgactgaccaaaacaggatgcgaagtgtaaatgacatcatgcccatgattggtgctcgattttatactcaattggatgctgctcaaatgagaaatgatgtcatagaggaagaccttgcaaaggtaaagagtgtaaatttttttttttttttttttttttttgagacagagtcttgctttgtcacccaggctggagtgcagtggtgctatctcggcttactgtaacctctgcctcctgggttcaagcgagtctcctgcctcagcctcccaagtagctgggattacaggtgtacgccaccacaccccgctatttttgtattgttagtagagacggggtttcaccatgttggccaggctggtcttgagctcctgagctcaagtgatccgcccgcctcagcctcccaaagtgctgggattacaggcgtgagccattgcacctggccagtaaagagtgtaattaaaagaatgtacacacaacttgcatctgtgtatataaatagacacaaaataatcattgtactaaatataatgccttatttgctaagatttcagatatttttgtcggcactgaatgtttggtattttaatttcttatgtcctctggacaacactgttcttttcattcatggctttgctacagtcatgtgacaaaaatcttggtttttcatgtgagttacttttccaattcctatggacagctccataatcttcttgagtaccattatgaaatgaaatggacatattgtgtttgtttaaaagtataaccaaaaggtggggatgttaggatttattgtttaaaggtaatattggtacaggttaccagtttttgtaaattttggcttttatgttcagttatctggaacattaacatttttctctttttaaaatgttttataggaggttcaaaatggaagactgtttaggctcctagcaaaattgggaacaatcaatgagaggccggagtaaggatttacagtattttacaatatatttttaatcgagagcactattttgcataataagaataagtatgcctggctttatttggaaaaagagaaaaattctcatgtgaagtgaccttaagattgtgttagctgttaaggtgctatttttaacaacagcctaggtgtggctgtccttacgaattttacacacatgtatacacacagaaaatatggtgtgttagaaatctcttgtggtttgcacatgagggcacattttatgactaatactacctctaccctatcttctttttgaggaagaagtttcatgtaagtttaccctggtcagtttagagacttgagaaatctctaatttttgcatgcctcttaccttctattaaagcacactttttttttttttttttttcttgagacggagtctccctctgtcgccaggctggagtgcagtggcacaatctcggctgactgcaacctctgcctcccaggttcaagcgattctcctgcttcagcctcccaagtagctgggactacaggtgtgcaccaccatacccagctaatttttgtatttttagtggagatagggtttcaccatgttggccagggtggtctggtcttgaactcctgacttcaggtgatccacctgccttggcctcccaaagtgctgggattacaggcatgagccaccacgcctggcctaaagtatactttttatagccatcatataagtgacattggaaaggcattaccttttacactatttgtcacttagttccacctcatttgtaagttaatgttaaccatatatacataagcagagtcgatgtttgtactacataactgtcaaagacaggtagaacagaatttgcaattactatgactatatacgtaagttacatttcaggaatgtttgatttgttaatagagataggtgagagataaatactattacttgaggggttgttttttttttttaccatggaattcaagtccacttgcttttcttcaaagtcgaaagactcatttagtgtcttccctaataatttttctaagtgaagagaacataacaatatatgttaaaccatttttaataaacttttagctgtttcttctagcatttatctctttactttaaaatgtctgcttatagttctattcttgattcccccaatatataattcagctaatgactcatcctcttccctacacacgtgcacgcacgtgcacacacacatgcacacatgagttgaatctgtatttagtgttacaaaacacctctcccatgcggtcaaaaataggtaacctatcagttcctttttttccctcccacctagagaattggctctggatcctctgcacttcctgttcctatctgggctggttatgctttaagcctgcacgtgcttacactttagaactggaacttcccttcagtattatctgggaattctcattatctctctgtgttggataccctgttttcttgctttattccttggtttgtttatttatttatttatttatttatttattttgacttaatggagcatgtccttgtagcttcctgaaaaaggtgagtttttttagtcttgcaagtttgaaaatggcattattctactttcacacattattgatactgtgaatgcatactaaattctagattgtcctcagaaaatttttcctttttttttttgagaggraatctcgctctrtcccccaggctggagtgcaatggcgcattcttggctctctgcaaccctcgcctcccaggatcaagcgattctcctgcctcagcttccagtgtagctgggattacaggcgcatgccaccatgcccagctaatttttgtatttttggtagagacagggtttcaccatgttgtccaagctggtctcgaactcctgacctcaggtgatccacctgcctcagccttccaaagtgctaggattacaggcatgagtcactgtgcccagccaggaaattattcttattaattaaattttttaaataggttgtctatgaataaagtaaaaagtaggaaaagtttgcagtgaaaactgtaaaagtctctctttcatacctgacatccccaatatctattcccagtttcccccatcagtctatatttttagtttcttctgtattattccagagttacaaatacaactatatattcttatcccctccccctttaaatatataaaaattgtaaaccatacacagtatattttatcataacagcgtgttttagaaatctttctatttagatatgtttagtatatgccaagcactattcaaaatagtttacaaatatgacctgacttattcctcataacaaccctatgatggagttaccattgttattcctatttaacagagtaattgcagcatagagaggttaaataacttgaacaaaggttgcgtaattaataagtatatgatccaggactccagtctagacagtatggttccagagtgtgtgctcctaaccactatgctatgtgtctcctcatactttaatggcctggtagtagtttatcctatggatgtgttatagtttattccccagttccctataggtgggcatttgggctgttttcagtcctttgctagggtgggcggtactgtagggactaacttgtgcatacttaatcttatatatatgtaaatataggccaattgtgattgctaggtcagtaggtgtgccactataatttcatagctattggagaatagtttacccatgtgtgtaattcgtgagactgcctcaccaaaatacttttttcaaactcttagatttttgtcaaccttgtaggtgaaaaattgaatttaaatgcagttttatgttctatgtactcttaacaagcatgtttgagggtctgttttatgctattgatccattcttatgtcctgttcaattcatatcctttgcccatttttattttcaattggattgcttgtctttcttattgatatataagagctaaagagattcactctttttgtgattttttttttttttttgactgctcattccccacccttggagacatttgtatatgtctgtaactgaccaaatttcttctttgcttctggattttgaatcatagttagaaagcctctttctactccaagattatgaaggaactatttcatggttttttccagaacatttgtggtttcatttcttcatattaaaaatgttttatgtggttagaaattgtatagggtgtaaggtgtaagtccatctccccttgtccccaagactacctagtagtccaaaagctgtttattgaatagtcgaacaatctagcttttccccactggtttttgaagccacacctcttccatactattttaattcaatcatgaaattgaattttgaaatctagcagtattctttcccatctccatttcattgggcaccactttgttgttttcctaatactattaaattttctgtacaaattctagaatcagcttctttagttaaaaaaaaatcaataaacctgatggtttcttcatagggaagatagcatatttatcgtgtttaaactctgggaacatttgtgattttagatgttgagtcatcgtaaccaagatcatggtatgtcattctatttgttgatgtctacttttgtattcttcagtagtatttaagttgttctttatatagttatagcaatactgagtgtattcttaggtatttcatcttgttgctattataagtgggaaaatttcccccattctgtcttcttgttactggtatatatgagaattcttgatttctttaaattttatgctctggtaccttattgtttgggtcgttttcagtaaattctctttgagtttcccaggtgttatctgcaaataatgatagtttccttcccagtttctatacttttaatttctcttgagtggttgtgttagcgggtactttcagtacataggtaagtactagtgatgatagttcagaatttgaagcattgttccttttaacttccaggcagattcaaaggcattttctttataaatcctttccttcctccaagcttttgggttttgtttgtttgtttgtttgtttgtttagtcactgatgttcagaaattcacagtgatgttccttggtgtaggttttgagtcataatgatggattaacaggtgaacccctttaatcttggaaacttaacgtccttcagttctgggacatggtcttcattgtttctttaataacttcttgtcctggaattctcatcgctcagatgttagacctttgcaattgattttcaaatattctcttctattttctatctctaattttttttgttctactttctgggcagttatctcaactgcatttttctaaaattaaagttttttttctaattctttgaatttttaaatttctgctatcatatttttattttccaagaacaattctgttttctgaatgtttgtcttgtaccatctaattcttgtttctctgaggccgtcagttaatagatttttgctggtggttggtttttgtttgtcttagttttaagttttgttccattccctgcagtatctcataggaaacaagagtttgctttattttgttttgttttgtaacaaaagatttctgatacttagctgtccatttgtattaaaaataaggtcctaaaaagccaatgggaagcctttgtgagggcagggattatagaatgttgaacctttctctgtgataaagcagtgtgatgttgttatacatgatttttgtttgtttttgatagactgtcaaggattatcatttgtcttggacaggtcagcatcccctgaaaagaatcttccaacctctactgtctgtggtataagcctgacagccagggtttgggaaccacacagagggaaagcatttgttgaatagggtgtcatccagcactcctcagctcttcatcttctggtttgcttggcatccctgaggctcaagcttctctctttcaccctttttagaaagtaaaacctccagatttttgccagacaggtggcagtggggttgagagatgggttatctgtttgctgtttatagaaccttttctcagttctcctgttttcagcctcagtccaaacttgcacttttagtagtcctttgtggcttcagtttctgagctacgccagtgtgggttgcttgattcctgtgggcaccctcttcccacatcccttgtagaattagggttcagttttgtcaggtctactaagtcatcccacttacctatctgcctctgcattccagatgttcatgattatctcttgttcactattgttgctttttctgatccctttgtccttgtgtttatacccttttttaggtatttactgtcaatttgatgggctgttgaaagggagcagagataaatgggtgtttaatcttcattttaattggaagtccttggagtgacctttgcaaacatacatatatgattgtgctaaaaccatatggtgaacttctcctctggttcttagaataaagacccagttttaaaacatgtcctaagctgtgtagtctgatccctacctacttctcatcctggcgtcaaatctgccttttatttaattttcttccccccatcccccattctttgttcttgtcttyactctgttccttttccttgcccttaccctccctctccgtgtattctgtcgtcttttcttctcttttctcccccaacccattcagacacatgaccttccttaagtttcttcaatgtccatgcaaataccgatctctgacgaaggagcatccttcttctgggaagagcagccactacttcctctggaaaaccttccttaattgctttatatacttatattcacacataattttacataaatttaatgttatacattttctgtaatcattgtttttacctattttttcttaatgggaattgtatcacagtttgatctgggaagcagaacgactttaaatgatacagaaaagggattatcagccaggcgcggccctagataaattcatcttcgttttatatcatattccttttaggagcattatgtaaatatgcagttacagctttctttgattatttgaataacgtctgtttcctactagactgtaagttcctaaggtcactgaaaactcacagtggtcatctggttcttcacagcttgttttcacatggaatggtaggaaaccgatatttacttcctttttgtttcctaaacatttttctattttatgcttattggtgaagtagaagatgtacctgacctttctctattctgtaacctacagagtgggaggaagagaagagaagatatttaaagacatttttaccttttccattttatctaatggtaggggctgaaataaggaggtaatgtaaaataggaatgcataagggatgatttccccctgacatttgctaactgaaaactggaattcatagacttactagttcagttagattattttttaaaaacactgtaccagactccctcccaattttttgtttattgggaaaaagtaaaactagtttggagtctaaaaaatagacatrtggccacagaccatacagcatgagttactgaggtaaaatgttcatttcccccaggtttcagaaggatcccacttggtcagagactggagaccgttatctgttgaaactctttagggatcatctttttcatcaggtgacagaagcaggtgctccctggattgacctcagtcatataatttcttgtcttaacaaggtaatttgtatctagattttttaagatcataattctgcctataatttgtatagagttgtatcttctacaaatactaggaaacttaagaaatcaggatgtactcttaaagtagcctgtaagacgttttattaataacattttctacaatgggaggatttttacaatacttgcatgaataattttttggggcagtggaggacagagtcttgctctgttgcccaggctggagtgcagtggcctgattttggctcactgcaacctctgcctcccgggttcaagtgattctcctgcctgagcctcccgagtagctaggattacaggcacccatcaccatgcgcagctaatctttagtagcgacaaggtttcaccatgttggccaggctggtctcgaactcctcacttcaagtgattcgcctgcctcagcctcccaaagtggtaggattataggcgtgagccactgcgcctggccttcatgaataattttagaatgttttattgtggatctttttattatgataaagtatcacaaaatgactgcttccctcctttatgcaatgttttatttacatgtggttttgttatgccgcttaaaacagtgaatggtaaaaagcaaaaaaataattttgtgtttattttttaaaaattgaaccccttccgaatcattgtgagttatgttgggtgttatcaaatcattattaactatagattttttttttttttttttttgagacggagtctctgtcacccaggctggagtgcagtggcgccatctaggctcactgcaagctccgcctcccgggttcacgccattctcctgcctcagcctcccaagtagctgggactacaggcacccaccaccatgcccggctaattttttgtatttttagtagagacaggatttcaccatgttagccaggatggtctcgatctcctgacctcgtgatccacccgcctcagcctcccaaagtgctgggattacaggcatgagccaccgcacccggcctaactctaggttttataatcaagtagtaaataataaaagcacaatactagtgacatcagttactagcaggtccagctgttataaatggtgaatttgatgattagatgaattaagtagataaaaaatagatcataaatttatttgagaggtgaggtgagcttttttttggaacggggttttgatctgtcacccaggctatagtgcagtcgcacttatggctcactgcagccttgactccccagggctgcagtggtcctccttcccacctcagtctcctgaatagctgggaccacaggcacacgccaccacacccagctaatttttgtccttttggtcgatacgggatttcaccatgttgctcaggctggtcccaaactcctgagattaagcagtccacccacccccaaagtgttgggataatagccgtgagccaccacgcccagcagcattatgttttagaaaaggttgggaaaaggctaggcgcagtagctcgcgcctgtaatcccagcactttgggaggccacggcgggcggatcacgaggtcaggagatcgagaccatcctggctaacacggtgaaaccccgtccctactaaaaaattaaaaaagttagccgggcatggtgacaggcaccagtagtcccagctactcgggaggctgagacaggagaatggcgtgaacccgggaggcggagtttgcagtgagccgagattgggccactgcactccagtctggccgatagagcgagactccgtctcaaaaaaaaaagaaagaaaagattgggaaagacaaaatttacagagaaaagaaagaagacagttcccttatgaattacttggcattatgaagtttagaactggtctccaggagtaaatgtagtctctgtataggtttatgtataaaccaggagctggtaagccatggcctgcaggccaaatccgttctatggcctatttttttaaagcgtgagagcctcgaatagttttacatttttaaagagttgtaaaataaacaataagccaaacctaaaacatttaccgtctgaccctttatagaaaacatttactgactcttggtctaaactttcctaaattataagtactagaggaaaaaatatctactgtagcacatgatttagaactattaatgtacagtgtggtaacctttcagggaaaatgttacggtttgtttttaagcactactttgccttcctttaacttccttaaaactctataaggagtattgtcaataacctacattaagactgcacaaaactggccaggctcggtgtctcacgcctgtaatcccagcactttgggaggcccaggtgcacggatcacctgaggtcgggagtttgagaccagcctggccaatgtggagaaaccccrtctctactaaaaatacaaaattagccgggcgtggtggtacatgcctgtaatcccagctacttcggaggctgaggcaggagaatcatttgaaccccaggaggcagaggttgcagtgagccgagattgtgccattgtactccagcctgggcaacaagagcaaaactctgtatcaaaaaaagaaaaaagactgcacaagactatatgtatcattgaactaattcagtatgagttatatatttattttccctttatttatgttaggggaaaaaccttttcttgagagcaatatgtagaaaataattctgtcagattttagagcatagtatcagagtaccagtagttaaaaatacgtagaaccagaacaaacattgacaagtaggtaatatggaataagccatggacagttgccttaagcaaagatcatttaatgaatattaggataatattcattaaattcatcaaagatcatttaatgaatattaggataattgaaaatttgaagaaaattctgtttcacatcatgaactagctagtagtaaataataccccaaatctgaagtgtgacaatattctaagtttgaaaagagtgtgataaattaaaagggaaggatggccagattgattatacaaaattaagattttatataagcttattttggtagaaataatgacagaaattgtctggtaaatgatttgaatgtttgagccttcagtgagttgtaaacatattttaatgaattatgtatcaattaatgaaataaagtacattgaaaataacaaaaataaagtgaaaaccataacaagacaagttgatagactaaggatcagtatttatgctttacaaagacctcactaaaatattactgccaaattccattagggtcatgagtaaagatcatatactagcatttacacaagcagaaataccaaaagtaaatgtatgaaaaaactttgataatagtagttaaaatctaaatttaaatagcaaggtgctcatttgctgtggggttgctggaaaagtattaaaatcttataaattaggctgggcacggtggctcacacctgtaatcccagtactttgggaggccgaggcgggtggatcgcctgaggtcaggagttcgagaccagcctggccaacatggcgaaaccccgtctctacttaaaatacaaaatattagctgggcgtggtggcaggtgcctataatcccagctactcgggaggttgaggcaggagaattgcttgaacccgggaggcagaggttgcagtgagccaagattgcgcyattgcactccaccctgggcaacgagcgaaactccatccccaaaaattaaataaataaaaataaaaacttataaattcatggtgtctgattggaaaacaatttggttctatgtactaagctataaaaccacttctactttacttttttgtgtttttttaaaattttttaaaaaccaatttcttaatactttacattttattattaatatttatacttctaagtatttttcctaaggaaaaagtacttcccacagaagaaaaaaattaagtagatgagtatgttcattgcactgtaatttattatgccaaaaatggaagatactgggagaaaaattatkgagcatcaactgggtaaactataatacaaacraacgttaagcgtgaagggatagaaacatagggcagtgtttgtgtaaaaatgtctgagtcgaaaattatgtgcatactgatgaatgatataaatgtactcatggatatctgaaagggaatgtgacaaaaaaaatttagatattttatttatttttgctgcaaacgtagataaattcttttctgcatgttatgaatttcatattttgtgtatatattgtttcagctagatgctggtgtgccagaaaaaataagcctgatttccagagatgagaagagtgtacttgtggtgacctacagtgacttaaagcgctgctttgaaaatacttttcaagaactgattgcagctgcaaatggtcagttgtagtatttgctaaaaaagcacgcaggacatggctaaagaccttaaccaatagcaaattgcactacagctgaacttttcatcatctcattcacatttgggaaacgaacaggagatgagcaaagctgcttgcacttcagtcaggtacactgttacttgaaaggaagaatgtttcacttacccaagagctatggctgccattggaggctgttatctgtgaagaatttattttagatttaggagcaccatcaggtgaatgatgttcctgcttttgttttttccacttgtatatgcactaattttaattttttaaagactttttctgatctttgaacttttgccacattgtatacttacaatgggaaactttgcaaggacatttttgggaagcaatgctgggcagcgtttttgccattgagggttgcagaatttgctctttttgggatgggttgccctgaataacattacggaccaggtaaataatttcatagaagttcagtatagtacgtaattcttgtaagagtatcgtatgcaagctctctgtatgccacccactgttagttcaaattgagatttttgttttgttttgtttttaagaacataccaagaaaataccagtgaattgttggatatgaattccctgttagttgatttaaatcctttctgaataaagatcagataaacagtaactgaaggagcatgtatagctctttccttcaaattcaactagagcctttttaaaaagacatttgcctgctagtcagatacatttacatttatgcaaattttttaaataggagaaaattaagaaattgtgttaaaggcctaaagttcaggagtgtattactttaggttctttccagtttgctggttttttttttttttttttttttttttgggcgggggggaggtttatgaagttttgctctttgaaccacagctttattatggtcctttacactggagacagacacagagacactgttcagaagatgaactaaactcagcagtggtctggtatcaagagctttctgatgttttacagcctgaatttggagggataacgatctgctgtgcctttgcagtcactgcttagcccaaagtaatagtacttttgataataactcactctgtgcgatattcctgaataagtccatctcaaaagtttgggattttcctcctcttaactttcttaatatttggacatgcagttgtcgccaaacttgggtattcatggaatttctagtaaatgaaatacctatactttgatactgaagactgccaaatacataggaattttctttcttaaaaaacagtaatgaagactatatctcctttcccagcactgaatgttttactagcactgggtgctcaccatgcaactgaagaaaatgtggaaactcaaaaggtcaggacagacttccaagcacttgcaactgatgttactgtcttcaattttaataattacacatatttgtatatttcagagaagtttttaatatttctctgtccactttttataagctttaaaatgattttctctgccttgagatttgcatcaagaaaaagcacctctcttcacctgaaagctttgaagactagagacacgctttacacgttttaacaagtatattgagtccacgtttggtagcatcagttgttgagttaaaaagaaaattattgcatttgatctggatggattttaaaagaatataatgttcaatattaaaaggataattcacatttgccaccataatgttcttttttatgtaaaaagaagaacttggagacattaacatgaaaaagtcttttatcattagctcatgtatttgaggaagagcagctgtctttttatatgttttttgacaaatcatattgtattcttttgtacaaaaaagaactacttgtattctagaagaaatatgaaatgcttaatttataagcgggctggagattttttccaatattgttttctttgaaaatgaaaggggatcatctattttagttttggggtctgggaactttttgaaaatttaatttgtggaccaatgttttgtgaaagctaaagagggcaggggttaaaatagggcttgaatttctcattctgtatagaccagcaaacttccctgtgcaaggcaagtttacatcacaaatccaagaatgtttgcatcctaaatgctagtttgcttcagcccctagttaacctcaggacttggtttgcatataaaaggtagacagctgatatgttttcatgaataaatattgtcagccagaaaaggttggtgtcaggtaatgcatatttttttaagctttgttttatatttatttttcatttagtttttattgggaatggttttcaaagaactctcagttctgcctaggtgtttttgggggagccctgttttccatagtgtaattccatttaagaggttgtctaaaagtctttttaattaatagaaagattttaatatccaagagtagtcaaattaaggatataaactttccacaccttcctgtcgtgacagataaaagcacagaaaggacaacccttgaaatcatgtaacgttggtcatttcaatattttgtacctgttttaaattctgttagtgtatttacttcattgtaaatatttttgagggtacctttgtattttgcttttgaccttggttctgtgatttggatgtcaacaacttccctaaaaagcaccagtgtgttaggttctaatgtcatgacccaatttgtgttattcatctttaatcctgttttcagtctctatgtgtacagcagtatttttaataaagaattacagagataaatttgtccttttcttgcacgtgttcatataacaagatgatgattatcttatgattggattttaaaagattggttatttcctctgtattttggaggaatttttgtatttggatgaaatggcagcagatttattcattaatttatcaggtagtccttaagtcttatctactgtgtccttggatctgttctaggcactaagacagatacagggacttggtatttacagaatgtatagttatacccaaacatcttaatacaatacatgactaacaatgtagtttaggagagaagactactcacgagaaagcataaggggtctgccatgtgtatgtctggtggtaaagtattccaggtaagggaatgtttcagagcctttgcggaacagcaggggagcgaatgtggctagagccaagttaagtaggaagtgacgtcagaaaggtctatagggaaggggtgtgtcctgtggaccattttaagtattttggcttttaccctcaaaagaggaagccgtgccgggcgcagtggctcacgcctgtaatcccagcactttgggaggctgaggtgggcagatcacgaggtcaggagatcgagaccatcctggctaacatgttgaaaccccctctctatcaaaaataaaaaaattatccaggcgtggtggcaggcgcctgtagtcccagctactcgggaggctgaggaaggagaatggcgtgaacccaggaggcagagcttgcagtgagcctagatcgcaccactgtactccagcctgagcatcagagcaagactctgtctcaaaagaaaaaggaagctgcaggaggattttcagcagaagagtaacatgataagacatttaaaaaggatcactctggctacgacgtgaacagactgagggaggaagtgagctgttgacatggtgggaaactgacagcatcccaagtgaaggatgttggattttaaaacccatgtcttttgagttttgttgggtttttttgttttgtttgagacggagtctcactccatcgtccaggctggagtgcagtggcacgatcttggctcactgcaacctctgcctcctgggttcaagcgattctcctgcctcagcctcccgagtagctgggattacaggcatccgtcaccatacctggctaatttttatattttttgtagatacggggtttcaccatgttggccaggctggtctcaaactcctgacctcaggtgatctgcctgtcttggcctctgaaagtgctgggattacaggcatgagccaaagcgcccagccatctttgagttttaaaacccacctgcgactgagcacggtgtctcacagctgtaaccccggcactttgggaggccgaggcaagtggatcacctgaagtcaggagttccaagaccagcctggccaacagagctggtctgacaagagcgagactgtcaaaaaaaaaaaaaaaaaaaaaacacctggactagggtggtagcagtagaggtggtgcagagtggctggacttcaaataaggttttaaaggtagagccatcagggatgtcctgattcactggatgcggacaaagaagagagaagtcaggaatgactcttaagattttggcttgctggccaggtgcagtggttcatgcctgtaatcccgacacttgggaggccaaggtgcgcagatcaccggagcccagagttttgagacaggcctgggcaacatagtgagaccttgtctccacaaaaagtaaaatcagccaggcatggtgtcacgcacctgtagccccagctactcagggggctgaggtgggaggattgattgagcccaggaggtcaaggctgcagtgcaccgagatggagccattgcactccagcctgagcgacaaagtaagaccctgtctcaaaaaatattttctttggcttgatgctcacaggatagaggattctgctgaattggaagagactgttgtaagaacaaagagtctacagggcaggggaggatggagaaacaggaaaagacaatttgggagtttggtctaaggcccattaagtttgagatgtttagtacacatttgttctggttatttgctttgtaacaactccacccttaatggcataaaacaagcattttattacattcaaggattctgtgggtcaggaatctgggcaagacacagcagggaggcttgtctctatgccattgtgattgggcctccgctgggaaattccaatggatgggggctggagtgacttgcgggctggactcagctggctgctgtctatgggagcaccttcacatggcctccatgtggcttaggtttctccaagtatggctgctgggtccctggcgggaactgttgaagagtgagtgtaccaagactcaggaagtgcatgatcttttctgacctggcctccaagccatgcagtgtcccttctttcacattgcattgatcacaagtgagtcctaaagctagctctgattctaggggaggggacattgccaaaggtcgtgtgccaaaggtcgtgtgagatgggagataatcttgcagctgtctttgaaaaatagaatatttttgaaaaatacagtacaatatctttgaaaaatacacctgtatttgaaaaaaatacagtctgctagagcatcaaggggagatgtcaggttagcacttgtgtatatatgagtttagagtgttgcagcgggcaggaagaatctcttctgtccatgaaagtcatcatatgggtgtcattgaaagccctgagattggttgagatcatgaaggaagttggtatagactgagaaaagaaagcttcaagggcaagccctggggtaactagagcaatgttcaaaagtcagggaaaagaggtaaaaccagcaaaagagacaggtagcctatgagatgggaagaagaaagtatcatgtcctggaaccaaactgaagttgtttttgcgaataagtgtcaagctgctgaagtgtcaaataagaatgggactgagagttagccattggatttatcaatatggagtcactggtgaccttagcaaaagcagtttcagtgagtgatcgtgaaagctaggcttgagtgggtttaagagtgagtgggaggagaggagttggaaacaagtaataataactaataaccaactcgctcatgggattttgctgtaaagggaaatagagaaattgggtggtagctggaggagaaagtacagatgaaaattttgtaagatgggagaaataacatgtatgttccagtggaaaaggggaaaattgatggtggggggcggtggagaattgctaaagcaattcaagtctcagagggacaccagtgtgttttgggttggctgtctagaagggcaagcacagtatatggggacataagcttggaggtggggagatgtgacaagtggggtcttggagttctttaattttcccattgaagtaaaggatatactaatagtacctatcatgttagattgccttgaaaataagtgtgttcctttaaagcactttaaatagttgctggcacatattgggcactcaaatgatagcaa

SEQ ID NO: 95503 - DNA, 36929 bp, Homo sapiens
acacggttctggtgaaagaaatataaagtggaaatctcctgaggctgtctcttccctttccaaccttttcctgtttggaacatgggcatgaagtgctaactgcaaggacacaaactattttgaggatgacggagcggaaagatggaaagaatctggactcctgatggcactgctgagacgccgagaagccacaacagggctgggctgcttacctctggacttcttgtcatctgagagaaataattctccctccttttttgggcttaggcctccatatttggggtttttgatatatgtaaccacatgcattcctgatacactaagctagcacttgcctgcaaccattctctctttctcttttgtttttttagagagatggagtcttgctaagttgcccaggttggtcttgaactcctgaactcaagcaatcctcccaccttggcctcccaaagtgggattacaggcataagccaccgcgcctggccgctattctctcttaaattctttctaagcgtctagtccaacttttttttttttcttgcctttggggccataatgacagaattggagtaattttatacttattaattataataattctaccagtaattattacttactgagtgcctcctgaatgttaggaattgagctaagtgattttattctcacaacggtcccaggaaacaaatactattattttcctcattttcagatgaggaaactgaggctcagagatgacaaatgactggttcaaattcacacagctagaattgaagctgggctctgaacccaggtctgccttacgccaaaactcctgctcttcatcctcagcatggctagttcaccaagcttagttaacaggtagggaaactgaggtccaagaggaagagttactagctcaaggtcatgcagtgatttcagggggtcatgttacaagaaatcagacagactgggtccccattccagggctctttctatgatatcctgctgcttagcaaatggcagggcctgaagtccaggctgaggtctggggatgatgggagctattgaatgttctaagcagaattaggagagtgttccacatgccagacgagggttgtggaaacacttcctcttccttcaactatggtggagaaggaagtggggtgagaggacttgtattttacagccccataaacttcctgagcaacgtcccctagccagagaatggctctttcccctggtttgtccgtcacaggtggctgagtcccctgatcccaggagctgatgtctgaggctctgcggattacactgatggtgggggctggctggggaggatgccatggtgtgaccactcagccatcctgtgccaagcagatggtgctggctgtctagtggagaggtctgcgggacagggcacctgcagtggaaactccccagatgaacttggggactctccacttagagtctcctgcttgtttatcttcttggcccattcctggcaggatttgggtgtttgtttaaggattcagggtttgagatccaagataaccagcgatgagcgtaatagggagttacacttgtaaatgttgaaatcatacaggccatggctcaaatcccagctctaccacccatatatagcctgtggtataggctatagcaagtcagttaattttcctgtttataaaaatggagacaagaggaacatctacctcatggggctgttaggagttataaaggggatgatgcaccaaaaatctttagcataatgtctgccacatggtaagtgccccagaagtggttaaaactcctcccacttttcttcctctctgcataatctacggacatctttgagcctcattttcctctttgcacaatggggatcatgataccttcttcttccagcaattgtgagggtttccatgagaaagggatgtaaacgcatttggtaggccgggtgtggtagctcatgcctgtaatcccagcactttgggaggccagtgtgggaggatcacttgagcccaggagttcaagaccagcctgggctacatagtgagacccccgtctctacaaaaaaacaaataaaacaaaattagctgggcatagtgatatgcacccggtagttccagctactcaggaggctgcggtaggaggatcacctgagcccaggagatcaaggctgaagtgagccaagttcgcaccactgcagtccagcctgggcaacagagtgagaccctgacaaaaaataaccaaaaccaaaaccaaaacattattttgtgactctcagttctcagcttctcagctgaactatgttgcttaaattggatcccacacatcgctccacaagccgactaccaccctagcgagcctttctgtttccttttaacttcaaacactcgttggttatgctggggcttgggtacaggtacccggtattccagaacaaaagggttgggccttgaaacctgactcttactggttgtgcatcttggacaagctgcttcaacactgggcctcactttctttctctgtaaatggaagtgatgatactgactttataaggttgttgagaaaaatcacatgtaacagtgcatttaaaacacatagcattctaccctgcacatagtagatattcaagaaatattagccattattattattacctccaatggtcaaccctagcctggttctgagtaggtaaagaggaggaggaagggaatttttcatgcaaccctcttgctcaggtagggagtagaagcgagggccaataaagaactagcattgagctcctactgaatgctggggatgctcacagggactatcttacttcatcctcacaacaactcttgcaagagtggcattattaaccacgtttttacaggtgggggaactgaggtccacaaagggcagtttgctgcttaaggtcacactgagaggtcaggtggggtggaggactgggatttgaagagatattggattgagtccagagccttcctgcctgactgagaagctgcctacacaggtggggccgggtggggctgggtccatgagtgattcaggtaagagtcagctctggttttccaaatagtgggtggggcccagcaggagtgagacctctccaggagcattacaatccaggctgtagctagggtgagcaggagggcacgtgattggtgtggataatggggagggggctatgcagagagaaatcctatcccttgttaccagtggggtatagggaaggaggtccttgctgccttagctgggaagggctcagggcctggggtgaagctgggcctgtgggacagctgggggtgctggcccatgggacaagctggagaaggcagggaaactgaggcaggcagtgatacttttggtggccgtcacagcagatgggtggttggcagtcacttcgatgaggctggtgctggacctggtctgtttttttaatgcattcactactcttttagatactcattcatttctttgttcaagcaacaaacattccctggatgtcttttatccgccagatcctatgcttggccttggggctacaagagtgaccaggactcttatagcctcataatgtttgggggcagagggacaatgtgatcaggagtggcactgctgtggccagggaaggcacaggggcttcctagaggagagaagggggaggaggaggcatgttagaggaggcctaccaggggacatgggaggtggacttgccctataagtggaagctcacaatcttgaggactaggatggtgacaccagtcctaggcatttagactatagctttgcagtagggagcaggaaaaggtggccctgtgctgtggtctctttcccagggctggggcaagggctaccccagacctctcccctgtgtatccagctgcatgctggggcggttgggggtgctggcccatgggccaagctggagaaggcagggaaggtttgatcctcctcattccttgaagtggatcaaatacaagaagcccaaattcaaattccacctacccatgccagctccccttccctggatattaccaccagcattgagccagaaggctaggtgtcctcagcacctttcttcccctaagctctagtgctaatcggtcaccaagccctggcacttctgccaccatttctctcatctaccttctccccactccatgctcttggtcctgcctcatccctggagggctgcctcggcaccctgcctgctctctcagactccatcctctcctgtattgcagctgtgttgagatctgtggtgctggtcacagagcctggctgcagtgagggctcaattgctccatgctggaactggaccagtcctcagagaccatctgatctgctcattctgttgttcaaatggggaaacagaggcccagtgaggcctagcggcttgtttaaggtcacgctatggaagaagtgacttgaactcacttctgattctgaggtgaaggctcttcccattagtgccagggccacacaagtgtttcttgttttgagtgcagatgggtggcttggaagtcagcaggaggcacaggtgtggtgacttgatgggctcagggcccaaagggagggagggcctgggagtggaagatggaacctcattcaagcccgtctctcctttcttctcaccagaaactccccctttctttggacaactggacccccacacctccaccctgtccccatcccttttgctgataatcccatctccttgccctgtaaatgctagggggcccttgatttggggaggaagggaaggctgaagccggtcccggcaccctgagagccccagggccctccaatgccccactccttctccaggtctgccctggcttgctctgtctccctagggcagctggcttttgtcccaggggagcatgggaacagcttgggtgagaatgggggaggggcttcccagcaggtttcacctctcccacctggcataatttctaccctgcacccagtgatgcccaggagccagcacaagaacctctgagctctcctgccggctttccccactgtggggcccacaggatggctgggtgtgctggggaaactgagggagatgacttgtgggtgccagcaccatgggactttgggtgatcttggacctattccttcctccttctaggtgcttcctgagctggcgaaaaggagagctggatgctgggattctataaattcggcggtggatgtgagtctagctacagcatggaccctggccagccctggaatctgagttcagagatctttgaaaaaatgccttccgataactgagcacctactacatgctggacactgcaccaggagatttgtgtgcattccctcattgaatcttacaaccaccctctgggatggtttttgctattaagccgattttatagatgagaatactgagggctagaaaagataagtaccttgtccaaggtgacacggccagtaagctgtggagtctggatttgaactaggctctcttggagtttggagcccggtcttttcatttctggcagagacctgtggcttcagggggcggagcccagcccatgggggaagtaagtccttcctgttagatctgtctgaggagtagtgagtttctcatctaggaaaccatcagcaggccaggctggactgccccatttctagccccctttcttctctgcagactgccctgtttctagccccttttcttctctacccttttctgtagagtgcgttagacccattttacagaaggggactctgagaccctttcttctctgcggggcagggtatgtggttcagacgagccgcttccatccccagttctgtccctaagccctgggtgacctcagcattgagcatcgtctctgagcctcagtttcctgtctatatctagtgccaccaggcatcagaaacgtaagtgcttcaaggatcttgggtgaaaagccgctttagcggcgagcatacactaattaataaaatgccttggccggggctgggcagaggaagtaagcgggcagccgaggtgacagctggagggaggagcgggggtggagccgggggaagggtggggaggggatgggctggagctccgggcagtgtgcgaggcgcacgcacaggagcctgcactctgcgtcccgcaccccagcagccgcgccatgagccgtgagtgcgaccccggtgcccggtggggaattttcttggcctcctggtggagccttgaatgccaggctcagcccctcatctctctcctctgcagggagtctcttgctcyggttcttgctgttcctgctcctgctcccgccgctccccgtcctgctcgcggacccaggggcgcccacgccaggtaggcggccccatccctccccaagggaatccccggtcttgcgcccctggcctggtttcaaccccctcctttcccctccagcgggcccagcttcccctttctgctcgcggtgctgagaaagactgaggctgagtcttttggtgggatgggggctccctgaagcccccccggcggtgtggccttggctaatgggctatctagttctttcaggggaaacagcagactgggatctggtgccaacttggggagaagggacagtccctatccatccccctcacctgttctgggccccagatgtctaagcagcctctgcacccaacaaccccgctgtttcctataggggcctctttgggaggaagccgcaggcaccaagggaaatgagttccctttctccagcctctaaccgtctgggaacccatcctgattcccattgccagtggagaaggtctcccctggtgaagacttcgggagaacatgggagatggaaatacatttaggagccgggatgcttcatctggggtttaagagatccccattgagcaaatgaggaaaccgaggctcagtaggtgccatgattccccaagctcacaaaatacatggtgggcccaggatctgaactcaggtctgtctgcgtccacacacttcgcaaggtctttccacagaaagctgcttctacccacaatggacccggagccactctgggtttcatgggggaggttgatggggaaattccgcccttccctcccccatgcatgtgccaggttccaggtgaaggaattcagctcctcgctcagccaaccttcctcccccagctcgctgcttgtgtgtgtgcgtgtgtgtgagcatgtgtcccagttggatatagtttcctccaccacctagctgtgtaaaatctctaaaatgaggcccagagagggcaggagggagcagagggagtccgcactttctgctgtgatgctctaaggatctggtgcgtgggggaaagaggaaagatatgtacatggattttggatcagaccaagtttcctgaaacgggctttgggtgggtggcatttaggggacccaaagagaggacggagggtgctctaggaaagggattgcgttgaataaaagtctggtttatgggaagaggaggaggaagactcatgtggccagcactttaaagtttacaaaggttggttgtggacatccacctctttggtgctctcaacagccctgccagagagatgcgttagacccagtctacagaaggggactctgaggcccagagggagtgaagccacttgtctgaatcctcacagtgagctggtggtggggagtagaaggggctcttcaggttgcctcgctgacccatcttgtcagtccctggatcagcccagcacttcctctgaggccccatctggcctcatccaggcactcttggtatacaggtcccacccgtctgtattcttttttagtccattcactaaygcacaatgagccatggtctgtgctattttgttttttgccttttctgtttccttttgtataataaatgtttacacggaattgtttttttttatccccaagggttatttatgccagtctttggctggggcctggagacacggagctgggaggagctgacaggctgatggtggagccagaaatgccaacagactgtcatccaaggggaccagggctgtgcggagctcatgggagggagcaggggtatagggagcccagggaagggagcaggggtgtgcggagctcaggggagggagcagctgcctctcagtgcgaagaattgagggaggcttcttggatctgatgacttttggactggacctcgaaggaggtggcgggtgggggaaacactaagagactcgaccaggaaacaccgtaagggtaatgtggagcaggaggctgaggttggatgcgtaatgtggggatgagacyggaggccagaaaactggtaccgaggctcctgcaaggatctaggaaagaacgaatgactggtggagtgcaggggcagaaggtctgggttgccctcatatttccaagtctgcgagtaaactgagggccaagctacttgggcatctgccccaggaagccaaagcctgtcttttrcctctagaggcaaaggagatgaagagatgagggctgcactcacctaagagggcaggcggagggagagaatgctgcttttgcctctctggtgggtgaggagatggaggccagcctggaggcaaggctgtgcygggggcgccctgaatgctcaagtacttcccctctagtctctggacttgactcagtgcccatcttctagatggggatagggcatgacctggcaaccagagctgcatgccaggcagaggagccccaggccagctgaccygggcacatggggcaagatsccagctgtgccaaggctgcccgggtgcctgcacctgctctcgccagcaccagttgggtctgtgggccgggagagggcttccccaccagcaggctcttccagctgctgggcccagttgtctggatctggtgyggtggtgcttaggtgtggggactggggcccaggccaaaccagtcagggttccccaccttttttttttttctctctggctgccaggtccccagagactctctaaatattaytctttaggggatttgggtcctgcctcttcactgggcartcttgcagcctgacacctctgcatcctggaggacttggtgttccctggctgtgcctgtcccctagtcacgctcagtcctggacctggagccctgacttttgggctagggggtgttccttgcccaaacccttggaaaggtcctggaaccaggcagttctggacagtcctcatctgtggggatggggactagcagcttggcctttgggctgcgtgtgtctggyatgcagcgtggtgtgctgatcatctctgcctccgcgtgtcttggggactcagtgagagcaaatgggaaggttctctgctgatggggcagttgtgggagggttgtattgatacaaataatggagagggacagattggctctacccagagtagagggcctggacgtcgaaaggaaggcctcctttagcccgcctgctaaacccccttcatgggatatacagaaaaatgaggctccagaggtgggagggactcacccaagaatgcacagccagtaagagcagccactctctaatacagctctcccaagcaactacttggtgcctggccctgtgctgagtatgggggactcaaagtgaattagacttggtacctgcatctccttggttttctttcttgatgaacaggggtgtcctccactgagcatagaactgagttggcrtgaaaacatgcaggattgaagttagaccgaaggaaggccttcctgtacgaatacttcctaaagatctggttgtggcaggagatggtgatccccctggggtcctggtttcattcgttctggattttcaaggttcactttgaaggaatgtgacaaatccaactcaactgggtcatcctcagtctgcatcaaagcgactctccctttccatcccttccccaaatccagtcctgggtacctccaggagtaggaggaggagggagattaagtcttggctccgcaacttcaaagcagtggggtctgggcaagcctcctgctttctctgggccctacattcctcattatgcaatggggagtctcacctacctctcttagggagtgctggggagataaatgagcgtgggtgtggaaggttgtggacttggtcggctggagccctggctttctggctgggctgtgatggtcaggctgtagtctagtggcacccagtctcctctccgcccaccctgacaccttggggcaccagcggcaggcccactgttgtccttcctgggagaacttttcctgccccagagcagtggtgtttatggaaagaacgtggcgggggaggcgggaggggggaagctggatgggccggactgggagggaggagcctcagctcccgcacagcctctcttggcagggagggtgtgggcagccgttccagcttcagcgtctggagcttgtggctcttctgcctgccgaggcagagctctagggccatggcgggaggccttccggctccacctcagacagctgttgagggcctggaagatgagggactccttttggtcaggctggaggtgaccaatctcctcacttcattttatttattccacaaacattcgttaagctctggctaccacatctggatcccagacctggttaagccccaactgtgtgcatagcctgtgctgggggaagagaaagccttaagggaagcgggggtcccttctcctggaagcttatggtggagaagagcaggttgaattggaacccggagccagggcaagggagagtgggaggagggagtgtggacatttggggaagacttcttggggaggcaaggcgtgggctcagctgatttggaggaaatgtattaaggaggctaacagcctggatgaaggatggagatgctgagggtttggggctaagggaggggctggcgcagaatgttggagctgcacggacctctggagttcattttgagatccctgctgtggcagggatggggaaattgagcctaggggaggcctaacccctgtgcccttagagtggtagaactagaccgtgagtcctagcggaccttgtgtgccagggttgggagctgggcagtgggtgctacaggggctcctgggcaggtgagagagccaggccagcaggaggggcaagaagaagagttctagcagggtgacaagtcctttcttgggggaaccagacctctgagccagcacgggggctgctccagaggcttcttggcctttctgggcctgtggctgggggaggcgggggctggggtactgccaggccctttccctggatcctgcctgccaggtttgcctgtggctgcctgataaagcctttttgtccagccttcttcccctgacccctccctcctacacccctgctggggccattgtggggctgtggggagttgccagggcttaagcaaaactatttgcatgattcttgtggtccttgcttgtgtgtgtgtgtgtgtgtgtgtgtgtgtgtgtgtgtgtgtgtgtatttgaggtggtgttgccgtcttcgaagtggggaccaagaggactctgctgcccaggtcaagccctgtgctgtgaagtgaggagtgaggagactgagaccagggcaggggatagggggcaggtcttgcccagggtcatgctctctgatcctagcaccctgagatgacagcatttcaccctcagctgctctggcctttcactacccttttgacctgcaataaccagttgcacaaagaatccatattccctgtaacgttggctctgagcccagataaggaagtatgtttgcagaaaggagcccggcgttttctgtgtaaggtcagagatggagcctcctgccaggcgctaggagtttttggtctgcccagctctgttctgtttccttggccaagttatcacctgtccctgaacctcagtttccttcactgaacagggtggtgggggtgatggtggatcctactgaacctgaggagtctgtaactttgctgctaaagaatcactgaggcagatttagcaagggggtggtggtctgagggatctgggttagatgccaagagggatttccttatagagtttctccaggaggcagcagggcggatgccagagctccatgcaccctcccaggagattttctagccctatctctcctattcccttggtctgtgaccttcktctggatcctagagcccagaccccaccctgatgtgggccaagtctgattccatcaggaatgggggctraggcagctgagaccttggagtccccctcctcctgcacacccaccctctgtccccagggttctggaaaacttctttccttagacttggctgctgaggctgtgggggtggagtggaagtgaagggatgggcatttggtctggtgagacttgtggggtgataggtctggctttccctttttctggcttcaatttccccatctgcaatgtggacattatgatacctgctcttctctaccttctgcagaaatggaggaatggtgagggatctcgttttcctagtgttcatggggtggtggtctgggagaagtccccgtcctcgtcctcgtcccttttctgaccgcccccccaccccccgccccggcctgctcttgctactgaactctgactaggcaggaagtgaacgctctagaagcccgtggctgaggagttttatcagctctttcttaactttcagtgtcacagccggggaatcttctcctgccgccgtttggtggcaatagggagggagggggcgcttcccctgggggcctgatgtgggctaggctggagttccagagcagggcctggaaatgtcaggatgggtggtttatgttcacagaggtgggaacaggggtccccttgggggaaccctgaagccctggcacccagtgattcaggacggagctgcgacttaagtccatgcctctggcccctcattcccccatcaggggctagatgggggtcaggaggccaccctagcatggtctctgacctccatttctcacccacagtgaatccctgttgttactatccatgccarcaccagggcatctgtgtccgcttcggccttgaccgctaccagtgtgactgcacccgcacgggctattccggccccaactgcaccatccgtgagctgggccttcagccctcactccttccrtcttgagcccttctgctccccgggccctttctcctagaccctaacttcctaccctcctctctgaccatggccctgttctccttccttgcctggttctgcccctctccctgacctggcttcagcatgagctctcgctcttggtccaccctcactccctgcttctgagttccatggtgagtcttcaccacatgccctggcccctgtcctcacgcccggttctgtctctgtcatgtgtcattgctcccaaggttccatccttacccacttccccataggtgctactctgttccaccctggcccttgtcctcagtgccccatcttccaccctggctacttctggttctggtaggagggaccaactgagtgactsccattgcccctgcagctggcctgtggacctggctccggaattcactgcggcccagcccctctttcacccacttcctgctcactcacgggcgctggttctgggagtttgtcaatgccaccttcatccragagatgctcatgcgcctggtactcacaggtgggtgtggggcagggccccctgacctgggggagcaagcaagcctgctagtccttttggattcttggcatctgataagggtagtgggtggggagagtctatgatgcctgataaaataagccccaacccaggaggaggcaagaactgggatggagctgggggtggaaacacccttgtcaccgttatttttgctctctgcagtgcgctccaaccttatccccagtccccccacctacaactcagcacatgactacatcagctgggagtctttctccaacgtgagctattacactcgtattctgccctctgtgcctaaagattgccccacacccatgggaaccaaaggtaaaatggggtgaggagctgggcctggggattacaggaggygctcagttcttctctttgggaaaaatcaggcgaagaacaattattgacccaattctgcagatggctagaccaaggcaagacatatgacatgtccagagcctgggctgagaacaggcaagggcagcagagggtcttgcctgaggtcacctagagtcagaccaatgtttccatagttccagggtgcctctttgcttgatccttttctaatgatcagttgggtcctgccggggtggaagtgacttagaagttgagatgtaggaaagaatagtgagctatttattgggtgctgtctctgtgtttgggtctttacagatgtaaatagttttacatgcttcaccagtgtaaggtacaaataagccacatttttttctttcgttactcaagacttcacttagccacactggcaggggtcttccttgtaagaccttcccatgccacctgtaattatccaaaaacctgggatattattcatttcagacccatcagttcagcatcaagtacagagaggacaagagaggctcatcagtccactgctgctatactccagttcctgccacatggtggcactgttgaatgccagtcctgtgcagcctcatggttatgtgcttttttgggttcaaaaccttgcaccatgtccctgcttgggtctcaagagcactactgtgacggttttccatcatatggttagctgcttttcccaaagcatgactattctaccaggatagctgagtcttgccaactttgctgaaatcatgcttgcccagtgtcagtgagtgatgattccaaattacggttgacagatcactccctctaacttcccttttggtggattttctttaggggtacttgatattttttcctgccagaggaacccagtcagccatcttaatccaagtaatttccattgatcttgaaccttcaacatcagggctcacatcttgatgcattgtgaagagatgcctttaccagaactcaaaaaattctattcctttctgtgagggcaattgggtgacaactcatttgacactgacataattaaggaaggcctctcaatacttattctaaggatgacttgtctttatgccagacatagaaagattggcatcatttaaaataggttgacacacctattttaaggggagcaagcaagcctgctagtccttttggactcttggcatctgataagggtagtgggtggggagagtctatgatgcctgataggtggtggtgtggtggcacacgtctgtaatcccagcactttgggaggttggggtgggtggattgcttgagctcaggagttcaagtccaacctggatgacatggtgagacaccttgtctacaaaagaatacaaaagttagctgggtgaagttgtgtgtgcctgtagtcccagctactcaggaggctaaggtgggtggatcaattgagcccaggaggtcgaggctgtagtgagccataattgcggcactgcactctggcctgggcaatagagtgagaccctgtctcaaaaatwaataaataaataaataaataaataaataaataaataaataggttggcaaactacagcctgcaggccaaattcggcccacctctccatttttgtaaataaagttttattggaacacagccacacacatttgtttatgtgtcatctgtgactgctttcccgctacaatagcaaaaactgaatagatgtgacatgtctgtatggtctgcaaagcctaaaatgtttactatctggctttttccagaaaaagcttgctgacctatgatttaaaaaattctacccactggttctctgccatgcttacattatctctcgcagtcctcagattcactgtatcaaatgggtatcatttgcccctttttaaagatggagaaattgacacccagagagatgagatgayttatctgtattcacacagctagcaaatagcatagtcagttgcaaacacaggctaccttgactcagggcaagggagttcatgtttgtttttttctgtttctttatttctttttggtgaaatgtttcattatggaaaaattgcaaagatacacaaaagttgagagaaaagcagaatgaactatgtacccatctttcagtttcaacatttacccacagtttcttcatcttatttcatttstcccctctcatatttttataaagtattttaaatcaaattctaaaaatcatgccacttaaaattctaaaaatcatgccacttcacccataaatacttctagggtcttttggtagagagtgggttacttggtggtggtggggaggtggtcctgaggaggccactctgggcttcctgcttgggccagtttgcctggtgagcccagatgtccccagggcagcaagatccagataggagaagctactgctgtttcctaccccccaaccagggaagaagcagttgccagatgcccagctcctggcccgccgcttcctgctcaggaggamgttcatacctgacccccaaggcaccaacctcatgtttgccttctttgcacaacacttcacccaccagttcttcaaaacttctggmaagatgggtcctggcttcaccaaggccttgggccatggggtgagtacctaggaggggctcaggactgctctggacctaatttggcacgcgtatgtcatcgacagtgggccggcaccctggtgacctgagggaacccctctctgtccacaggtagacctcggccacatttatggagacaatmtggagcgtcagtatcaactgcggctctttaaggatgggaaactcaagtaccaggtagtgctgrgccagggggtagggcagagggaggggtctcccatggtcttccctggcaaagactgcttggggcgggggtctgggtcatgtcctgagagggccaaccacgggagtgggargcttgtgccaggagcgacagtatacgctgggaggaggcagcaggtatgagaagccagggaggagcagacgtggcctcccatgtcagccagggaggtggattttggagctcaacaggagatgaacatttgtagtctgcatttatttatttaattattccacaatattaattggacacgagaatatacctggcacaggtgattgagtagtgaccattatagttaatgggccctgccctcaaaaaaccacaggcaaactctaggatgttcattctatgagggcttttgtttaaatcagaacggtccaacagaaatataatgtgaaccacatacatagttaaaattttctaatgtccatattaaaagagggaaaaagaaacaggtgaaatgattttaataatacattttacttaatgcaatatgtccaggtaattagcattttagcatgtaatcaatacattattaataaaatatgtcacattcttttttcatgctgaagcttcaaaatctggtgtatatttcacactcacagggcatctcaatttggatgctctattttcactggagtgatctaatctgtattaagatttcataaaatgtacagctgaataagtagagtgacatgtccgacttgttccacgcatacttaaaggttttccaatagctgaagtatcagttttaaaattcaaatagaaattaagataaacctaaataaaataaattaagtaacattcagttcttcattcacactagccaaatttctagtgctcagtagctacacgtggctagtggctaccatattggatcgtacaaatcttaggcaagcaccaaaacaaagtttgatgctgaatctttagggctaagaacagtacttggcatgtagtagtctcttggcatgtatttactgaatgaatgaagaagctgccatataattaggtacacttgtagctgccaccaaggagaagctgtgagtgccactagagtgtttggatgatgggtaaaacttccctaggaagttacaaataaacccagagttgcataaaggatgaggaggagttagggatgctaagaatgggagagggctttccaggtagagggtttagcaagtacaaaagcttagaggtggagaacagcttggtgacttggagggagtgtaaaaatgggagcgtttgctgagcctagtgatggagcgtaagaatgactttacaggaaggtggagatgtctgtggggrccgtgttaaggaattctactttctgccaagagcagagagagtatttggaaaggttttaagtcagctcatgatgcaagatttgttgtttttttttttttaagttttttttttcttttttttttttttcttttttgcttgggtgcagtgcagagactggcctgtctggggataggagtggaaatagggagcccacttagggaaaggagtcagagtggaagatgagcggrggttgcttgaggtagtgrtggtagagatggagagcaggggactgattttaagagacattttggaggtggaatcaacagccttggctgaggggaactggcagctggaggcaggagtgggagggagttggttgtgggcagctgygggtgacccccaaccccaggttgccaggtggccccatcccacaggtgctggatggagaaatgtacccgccctcggtagaagaggcgcctgtgttgatgcactacccccgaggcatcccgccccagagccagatggctgtgggccaggaggtgtttgggctgcttcctgggctcatgctgtatgccacgctctggctacgtgagcacaaccgtgtgtgtgacctgctgaaggcygagcaccccacctggggcgatgagcagcttttccagacgacccgcctcatcctcataggtgaggactccagacctgccctgccctggaaggtcattccctccatcctgagaagttgggggcgggggggtacttagaggtggaggctgggattagaatcctcacccttctgcttagtggctagaagaccttgagcaggcccctcaacctctgtgagcctcggtctccaaatctgtacgttggggtgaacgatgattgtaaggatttattgagatcatgaatgggaaggcaactagcacatagcaggccttcagaaaatagatgactgtgatggttgattattagctgggtgactcagcacatttgattagccaccctgagtctcggtttccccygtgtgctgcgcccggatgcatacttgtggtccccagcacgtgcagggtcaaactgtaacttgcccggccttcaggaatcttcatgttcccttccctgcatgtrtctaccttcctgcagtttggtagcttctaggtgactcagggacaggatatttttgtgttccctatgggggcgagtctgcaacctaaaatgtcagatggtttcctgcctgggagcttggcccctgacatccctgtccagaccatgttcgctctgagtcaccagtaactcccttcccccacctctggcaccactgggcatggctggtcccaattatagagcctaattcactggagccatgaagagccaggcattgggaataggaacagtcattagagggaagaggggctggttctgaagtttcagcgttgcaaagaccttgacctgagagagctggaggctgtccagcacactggctggagatgaagctgtgaccaaaggcaggaccctagggcaccatttaactcccctacaacctcatgagcygggtatgattaccctgtgaaaatcaagattcagagaggtgaagtgaaytctccagggacactcagcagatggagacttgaggtckggttgccaccaaaatctatgctacttccactccatcacaaagggggctcttcttgaatgggaaggggttgcaaacctgagtctgatctgtgacatgtgagtattggaaagggattccccctcgcgtctacacttagtattcctacttttggctgacatatatggacaccccgtcttatgccaggcactgtgccagcagttttgctgtattcattgtctacttctctcaacaaccctaatatagtattgcattgatgttattattattattatttgagatggagtcttgttctgttgcccacacagtagtgcaatggcgtgatcttggctcactgcaacctctgcctcccgggttcgagcaattctcgtgtctcagcctcccgagtagctgggattacaggtgcccgccaccatgcctggctaatttttgtatttttagtagagacagggttttgccatgttggccaggmtgatcttgaactsctgacctcaggtgatccacccgccttggcatcccaaagttctgggtttataggcatgagccacagcgcctggccgcactgatattattataacacacattttacagttaaggaaagtgagattctgagagattaagtaactcagcccaagctcaggtggctggaaatggtaaagccaagatttgaatccaggtctgctgatcccacagtctgtagctccaggtcgatttccaaaagccaatttgtctaatggctaattggcctgcatatcagtttctttcaatatctagttgcccagttttaattttgttacagaatgttcaatttgcattttccctggctttttgctttctagctggttatagctacaaatggggcagaggaaaaacttatttataagaatcctgttatataagaacatataggaaatatgttttttgaaatatatttagggctaggctccccttctgtcctcagtattctcttttgccactgcagcagctctgagtggtctccttgaagtccccctctatcaccgagggtgtcagcatgatgacagctctcaccagtaaatcctccacttttccatcttttgtagtctctccaccttcttttaatgggcttcaggagggaggtcataagaccaattcttggacacctcctttgcatgtcctgcttagctgggcctagaacctccctctgaaatgtgggagtagctggtgctcttgtcttgagacctcagtcaaaatagaccaaaagttctattttcacatcctgttacaaagagacaaaatggaagaggccaaacaaaattaaacatcaacagcaaggccaggtgtggtggctcacacttgcaattccagggcttttgggaggctgaggtgagagaagtgcttgagacttgcagttcaagaccagcctggataacatagtgagaccccatctcttaaaaaaaaaaaaaaagaaagaaagaaagctgggtgtggtggtacacctgtggtcccagctacttgggaggctgaggtgggaggattgcttgagcccgggaaagttcaggctgaagtgagctgtaattataccattgcgctccagcttgggtgacagaccaagaccttgtctgtaaaaataaaaataaacatcaacagcaacaacaacaataaagagaccaaaagcaagcacctctcatgaactggcctgctttccaagctgggcatctaaatcactgtgcttggctgaccctatttccaatcctgccctgcccaggggagaccatcaagattgtcatcgaggagtacgtgcagcagctgagtggctatttcctgcagctgaratttgacccagagctgctgttcggtgtccagttccaataccgcaaccgcattgccatggagttcaaccatctctaccactggcaccccctcatgcctgactccttcaaggtgggctcccaggagtacagctacgagcagttcttgttcaacacctccatgttggtggactatggggttgaggccctggtggatgccttctctcgccagattgctggccgggtaagccccagaggagtgctggtgagggcaggtgggctgagggatccagcagacctgggtccaaattccaggttcttcttctgtaaaatggggctgatgtcacttctacagggcagttgtaagcattcctgtgtgagttcattggttcatttgtccattccacaataccagacattactccaggtactggagatgtagtgggaacaagacttttgtggttcttggctcatcttttagtgctcccaccctagaaagtgatggcagtcatacgacagctgacagcattagggcccttactgcgtgtcaggcactgttctaagagcttctcctatgttatcagaattctaagagtatgttataaaccatagtagaaaagcccaccatgctctgggagtcaggaagggacatctgacccagagttgcgggttatgggaaaagaagggatgtccaagcagaaattggaaggagggatakagattkcccagggtaagaggtggtgttagtggcaggggatggctgtgttccagatagagaggacggcatgggtgaaaggcatggaagtcagaggacatggcagtttgaggaacagaaggacattcagggcatggtaatgtatgtaacagtgcccgcctatggtgtttattaaatcataagcctccgctctgggctgaattgtggctcttttaaagttcgtatgttgaaatcctaaccgccagaaccttagtatgtgactgcatttggagacaaggtctttaaagaggtaattaagtttaattgaggtcattaggctgggccctaatccagtgtgacttataagaagaagagattaggtcacacacacagagggaaggccacatgaagatgtagggagaagaaagccatctacaagccaaggaaagaggcctcaggagataccaaccctgctgacaccttgatcttgaacctctggtctccagacrgaggaaataatttctattgtttgagccactcattctgtggtacattgtcatggcagccctagcaaacaaacacattctctttccctggaattcccagccaacgccttcctcaatctccccttctccacattcggaagctcccatctgcttcatcgcagtctctggctcccctgttgcctcacagtcctctgcttctctctaatccttgtccctaaaccctgtcatgaagctgtggcacacatggatttccatttccttctggtaatttgactgaaattagcatttgctgccccggtgggcagctgctggctgctttatggcctctttgtcggtttctttatggttctttgtggggacacaagacatgaacagagacaatagcctttgtgtgaggctggatggttttcagaacgttttcaaggaatgaccatgatgatgtacgtgaaaagccccggcgtcgtacctggcacaaggcagaaaggccgcagagatgtatggactgtcaagattttttttcttttttctttttttttaaatagagatggggttttgccatattgcccaggctggtcttgaactcctgggctcaagcgatctgcccgcctaggcctctcaaggtgctgggattataggcgactctcaggatattaagaagagtgagtgatgataagacagggcttcccctgataaccattgtccatggctaccctctcaggggttcccatgtgaccaatactgagataacagctttgcatagtttatcccatttaaattgaccacagccatatcaggtagatgctcttcccttccccatttttacatatgcgggaactcaaacttagcttgaatagctgcccaaggtccctatattagtttcctcaggctgctgcaacaaagtaccacaaactgggaagctcrgagcaacagatggaggctagaagtctgaattcaaggtgtcagcagtgccatgttctctctcaaggctctatgcctccttggcatctggtggtggccgacagtccctggcattcctcagcttgcagaggcatcgctctagtctctgcctttatcatcctgtggtgctctccctgaacttgtctttcctcattttataaagacaccagttattggattggagcccaccctaatccagtaggatctcatcttaacttgattacttttgcaaagacttcatttccaaataaggatgcattcacggatgcagagagttagggcttcaacacatatttaatattttagggaacacaattcaaccctcaacagccccacagcttgtaaagctgtaattggcaccatcctctgcttgctttgctcatattatttcatccaaccatgcctttcttttttgcccaattatagttgttgatcaaaatgactatctcttaagcatgaacgttattatttcatcctaagcaccagagctttcttttctttcctttttttttttttttttttgagatacartcttgctctcttgcctgggctggagtgcagtggtgtgatttyggctcactgyaacctctatctcctgggttcaagtgattcacctgcctcagyctcccaaatagctgggattacwggcacctgccaccacgcccagctaatttttgtatttttagtagagacgagtctttgccatgttggccaggctggtcttgaactcctggcctcaagtgatccacccgcctcggcctcctaaggtgctgggattacaggcacaagccactgtgcctggtcagcaccagagctttctttagactaatgcgccttaactgttagtaatcagaatctttttctgcagcttttttatcttgccaggttacctgggctttgagttctattttccctcccttcacagggggttacactacctcttggtgtaattcaacggtctggggagcagtgtgagccacaaaagaggtcctcttggcccattccacacttcaaagatgaggaagctgccggatgtggtggttcatgcctgtaatcccggcagtttgggaggctgtggtgggaggatcatttgagaccaggagtttgagaccagcctgggcaatatagtgagacctcacctctacaaaaataaaataaaacaaaattagccaggcatggtggcacgtgtctgtagtcctagctacttgagaagctgaggtgggaggattgcttgagcctgaggaagttgaggctacactgagtcaagatcatgccactgcactccagccagggcaacagagtgagacagtgtctaaaaaaaaacccacaaaaaaaaaatgaggaagctgagactcagaggggcttcctgagagagcatgacagcagcaggcccggggcaggtctgcagcatcacaactgctaggctgcccaacactctccatcctagctcagaagggactcccactggaagctcttgtcccaggaacttacccaggctccaggacagcctggcctggctcccagaccactgctgtgcttctctctcggcagatcggtgggggcaggaacatggaccaccacrtcctgcatgtggctgtggatgtcatcagggagtctcgggagatgcggctgcagcccttcaatgagtaccgcragaggtttggcatgaaaccctacacctcyttccaggagctcgtaggtgagcagctgtttcctggatgcagtccctgcccttgagggactggcagcaaagtcagggagacatcaaggaaatagaacgggacaatacatgcggcaatgtgtaacaaccagacttataatgggcgtggaagtgctgtgccagggtggtaaataagcctgcttggggagagaaggtgacttttcagctgggtttggagaacaaatggcattttcagtgggagaagagagggaggagtgttttaggcagagcaatagaaagtacaaaggctgccgggcaaggtggctcgcgcctgtaatcctagcactttgggaggctcaggcgggtggatcacgaggtcaggaaatcgagaccatcctggctaacacgatgaaaccccgtctctactaaaaatacaaaaaattagccgggcatggaggcaggcgcctgtagtcccagctactcgggaggctgaggcaggagaatggtgtgaacctgggaggcagagcttgcagtgagctgagattgcgccactgcactccagcctgggcgacagagcgagacaccatctcaaaaaaaagaaagtacaaaggcatagaggtcagacagcaggtatctagggaaacagtcatagatgtggctggggcaaggagcttatgttgtgggaatgattagtgatgggaggttggggccaaaccgtgtagaatcttggttttcatactaaatattttgagttttatttggtctagtgctttctaagtacccacttacgggccagctgcataaaaatcatttagaaagctgattaagataccaaatctcagatgcctctcctacggattctgattcaaccagcctgggtggtgcccaagaatctgcgtattcatatgaataaagtatatatacatatatatgaatatatatatgaatagagtatatatacatatatatcaatatatacatatacatatcaatacatatatacatatacacacacatatatatgtgtgtgtatatatatactatatatatacatatatatatatacatatatatatatacatatatatatacatatatatatacatatatatatatatatacatatatatatatatatttcccccaatatcctcagatgttgggcagccaagtttccagcccttgtcacatacaatggggagccactgaagcaggtgtgacatggcccatgagagttcccagtggaggatggatttgaggaactgggcagggaagcagggaagctccatatttgtctccccttggccacatgaacatgtggrtattgcagagtggagcagattctgtgcatgagctccttgtgatcctggaacagcatcttattctttactctcccatgacaaatggtccccgggggcagaaggaacactgccactgaatttctgtgtgagctcggacatgttacatctttgagctctagtagtaaaagggcttggcccaggctaaggtcttgaaatctgtctgtgaaggaagccagatggggagcattctcccttctgtgatgatcaggtaattagggcccagagttgctcaaggttataggctgtttggtggcagatctaggcccctgactttctctttagtagcattttccttccctagacccagtccctgaggaggggcaatttgtgcttttcctcttgacccttttccccagtgccaaccatgccaaattctagggcacatgctcagttgctcaagttagtctcctggagtccctattatccccagaaaaaggtggacctggaagggtcccgccccaggttgaccttaatggcatcatggatctgaygctagcatttccccttatctccttgtaggagagaaggagatggcagcagagttggaggaattgtatggagacattgatgcrttggagttctacccyggactgcttcttgaaaagtgccatccaaactctatctttggggagagtatgatagagattggggctcccttttccctcaagggtctcctagggaatcccatctgttctccggagtactggaagccgagcacatttggcggcgaggtgggctttaacattgtcaagacggccacactgaagaagctggtctgcctcaacaccaagacctgtccctacgtttccttccgtgtgccggatgccagtcaggatgatgggcctgctgtggagcgaccatccacagagctctgaggggcaggaaagcagcattctggaggggagagctttgtgcttgtcattccagagtgctgaggccagggctgatggtcttaaatgctcattttctggtttggcatggtgagtgttggggytgacatttagaactttaagtctcacccattatctggaatatygtgattctgtttattcttccagaatgctgaactccttgttagcccttcagattgttaggagtggttctcatttggtctgccagaatackgggttcttagttgacaacctagaatgtcagatttctggttgatttgtaacacagtcattctaggatgtggagctactgatgaaatctgctagaaagttagggggttcttattttgcattccagaatcttgactttctgattggtgattcaaagtgttgtgttcctggctgatgatccagaacagtggctcgtatcccaaatctgtcagcatctggctgtctagaatgtggatttgattcattttcctgttcagtgagatatcatagagacggagatcctaaggtccaacaagaatgcattccctgaatctgtgcctgcactgagagggcaaggargtggggtgttcttcttgggacccccactaagaccctggtctgaggatgtagagagaacaggtgggctgtattcacgccattggttggaagctaccagagctctatccccatccaggtcttgactcatggcagctgtttctcatgaagctaataaaattcgctttctaaagttacctgttatatatctcttttggtcccatcctctaaagcagaggcaacactggaacatggctagcctttcttgtagccatggctgggcgtgctagaggttgcagcatgagactttctgctgggatccttgggcccatcactgtatagacatgctaccactggtacttcctttctccctgcgggccaggcactgcccttttcaggaagctctcttaaaatacccattgccccagacctggaagatataacattcagttcccaccatctgattaaaacaacttcctcccttacagagcatacaacagagggggcacccggggaggagagcacatactgtgttccaatttcacgcttttaattctcatttgttctcacaccaacagtgtgaagtgcgtggtataatctccatttcaaaaccaaggaagcagcctcagagtggtcgagtgacacacctcacgcaggctgagtccagagcttgtgctcctcttgattcctggtttgactcagttccaggcctgatcttgcctgtctggctcagggtcaaagacagaatggtggagtgtagcctccacctgatattcaggctactcattcagtcccaaatatgtattttcctaagtgtttactatgtgccagttcctgtaacaggtgtggggacacagcagtgagtaatcaatacagacaaggttctgcccttatggagctcacactccagtggcagacaaacagaccataaataaggaaacgatgaaataagatatatacaaggtgagtgtgacttcccttctaaccccctctgctctgtcctcccctattgcgctctcaagaccagagacccaacagcagtgatctcagggcagacagccctccactccagctctgagacccttttctcaggacctctgtaggcagcagagagagaggacagaggggtaagatgaggggttgagggaaggttcttcatgatccacactttgggcttagtatttctcaggaagagctatggcccagaaacaacaggggaaactagagttcggtctgacagtccttggggttaagtctcctgtcttatggtccagaaactcctgtttctccttagttggctggaaactgctcccatcattccttctggcctctgctgaatgcagggaatgcaatccttccctgctcttgcagttgctctgacgtagaaagatccttcgggtgctggaagtctccatgaagagcttgtgtcctgtcctttcttgcagattctatttcccctcttctgctaatacctcttactttgcttgagaatcctctcctttcttattaatttcagtcttggtggttctatcaggggtgcattctggccaaggggtgggcctgtgaatcaatcctgggcaatcagacaccctctccttaaaaactggcccgtggagactgagatcactgactctgactcatccccacagctggctctgacaagatggtccatttgttcctgcttccgagatccccagggcagcctggatccctgcccttctcaagactttagcttttccttccatccggtggcctattccaggaattcctcttttgcttaaatcagttggagtttgtgtctgttgcttgtaatmaagcctttatggctgctgggctgagtgacacaagcactttaatggcctggagggacttttaatcagtgaagatgcaatcagacaagtgttttggaaagagcaccctcgagaagggtggatgacagggcagagcaggaaggacaggaagctggcagaacggaggaggctgcagccgtggtccaaccaggagctgatggcagctggggctaggggaagggctttgagggtggaaggatgggatgggttccagaggtattcctctcttaaatgcaagtgcctagattaggtagactttgcttagtattgacaackgcacatgaaagttttgcaaagggaaacaggctaaatgcaccaagaaagcttcttcagagtgaagaatcttaatgcttgtaatttaaacatttgttcctggagttttgatttggtggatgtgatggttggttttatttgtcagtttggttgggctatagcacacagttatttaatcaaacagtaatctaggtgtggctgtgaaggtatkttgtagatgtgattaacatctacaatcagttgactttaagtgaaagagattacttaaataatttgggtgagctgcacctgattagttgaaaggcctcaagaacaaacactgcagtttcctggaaaagaagaaactttgcctcaagactatagccatcgactcctgcctgagtttccagcctgctagtctgccctatggatttgaagtttgccaaccccaacaattgtgtgaattaatttctaaaaataaagctatatacagccatcctttggtatttgtgggggatttgtttcaggatctctacagataccaaaatctgtggttcctcaagtcctttatatgaagtggtatagtatttgcatataacctatgtgcaatctcctgtataacttcaatcatctctagattacttataatacctaatacagtgtaaatgctagttgttatactgtattttttctttgtattatttttattgtatttgaatattttgatctgcatttggttgaattcacagatatggaacccatggatatggaggatatgtgcacatatattcaggactgaatatatatattatacatatatatacacacagaactgaatatatatatatatatatacacacacacgactgaatatatatatatatatatatatatatacacacacaggactgaatatatatatatatatacacaggactgaatatatatatatatatacaagactgaatatatatatacatatacaagactatatatatatattcaagactgactatatatatattcaaggctgactatatatattcaagactgactatatatatattcaagactgactatatatatatattcaagactgactctctctctatatattcaagactgaatatatatatatatatatttctatctctctaataatacaagaacagaaaaccaaatactgcatgttctcacttatgcgtgggagatgaatgatgagaatacgtggacatatggtggggaacaacacatgctgaggcctgtcggagggtgggaggtgggccatcaggaagaatagctaatgttaatacctagctgatgggatgatctgtgcagcaaactaccatggcacacgtttacctgtgtaacaaacctgcacatcctacacgtgtaaccaatatatgtatattattattcaagttccaataatcaaataatacacaaaccactgtattatttgattattggaaatcaaataataataataataataataataataataataataatatacatatattctgttggttctaattctctggagaaccccgactaatacaatgggtgattcattcaggactctcaatgcaaacaacagaacattctctagcctgtataagcaggaaggaatttattataggacattacatagctcatggagccactgggaggaccagggaattaggcttggagggtttgcacctaggaatggtggccactgtccagtggagatgcctctactactgccatggacacagcatctcaaatgacacctttgctgcccaaaccccactactgctgccttccaaaacaggctgcttctacagccacttttgctggaaaatggaatctgtgtgatacttgcttcctctcttttctctacttagaattaaaattatctttattttgtgtcggattggtggagcccagctcatgtgtctgtactgcagctacaagaaagaatggaaagtgagttttctggtttgtgccttgaaaaggaggaacccatgataaggaaaattcctcatacatagggaaggtgttcaaaggggctgggaaacgtggaaagtctgcttcagtgaatctgaattttcttagttctgttctgcctctgtgggccctatccctagaatgttacaaagaccatcacaatggccttactgttgacctggtagcagctcgatatagttgcaagcaaagagcttaagaagtgaagttatgtaattatagaacaacagagaaacaaagactgttgggtacacacagtccactcttttagtaatttttgagttaaaaaaagtgtcagaaacgcaggaggcagagcaagaaggcagaatagaagcttctaccaattgtcttccccacaggaacaccaaatttaacaactgtctacacaaaaaatgcaccttcattagaaccaaaattcaagtgaatgattgtagtacctggttttaactttatattactgaaagaggcactgaggagggtaggaaggatggtcttgaattgccagagccatccctccccgatccctggcagcagccacatggcacagagaatctgtgtagggagagtgtagtggttgtaggactttgtgttagaactcagtgttgccttgttacactggaaagcaacaccaggcagaactcagctaatacccatgagggagaatttagatcagccctagccagaggggaagcatccatcccagttgctgaatgggctaaagggctctggggttctaaataaacttgaaaggcagtataggccacaaggattacaactcctaggaaagtctgatctgcgcttggagccagtggacttgaggggcatgtgacctgctgcgatagccaagggagtgcttgtgccacccctctcccaaccctaggcagtgcaactcacagctctcaaagagactccttccttcagcttgaggagagaagagtaaagaggacttgtcttgccacttggataccagctcagccacagtagtttagggcaccgggcagagtcctgaggcacccattccaggacctaacttccagatgacatttctagacatatcctgggcttatatgggccatataaggcagaagggaacctgttgccttgaatgaaaggatctagtcctgatagtattcaccacctgctgactaaagtgcccttgggccctgaataatcagcagcagtagccaggtagtacacactatggcccttgagtgagattctgagatgtgctgacttcaggtgtgacccagcacattcccagctgtggtggctatggggagagactccttctacttgagaaaagcagggggaaaagtaaaggggatttcatcttgcagcttaggtactagctcggccacagtggggcagagcaccaagtgggctctcagtatccctgattccaggccttggctctcgcacagcatttctggacctgacctgggccagaggggagaccactgccctgatacgtgagtcctaggtctggcagcattcaccacaagcttcctgaagagctcttggccttgtgtgaacattggtggtagccaggcagtactccccatgggcctgtggtggtgctggccatggggagagactcctctgcctgtgggaaggggagggatgagtgggaaagacttgacttgtagctttgtctgcagctcagctgcagtagaatagaacacaaggcagattcttaagattttcaactccaggctctggtccccaaacagcatctacggacctgcttgggggaactcgctgccctgaagggaaggacacaagcttggctgacttactgcctgctaactgcaaagccctaaagccttgagtaaacaaaggtggtggtagccaggtagtggttataatgggccttgggtaagaaacagtgctgtgctggcttcaggtctgacctagtgcagtcccagtggtggtggccacaggggtgcttgtgccacccctcccccagttgtaggcagctcagcacagagacagagagactctgtctgtttgggagaaagtaagggaagagaacaagaatatctgcctggtaatccagacaattcttccagatcttatccaagaccatcaagtggtacctctacaagtctgcaagagccacagcattactgggcttggggtgcctcctaatgctgatatgactatggtgaccaaaaacttagatgacaacacccaagtcccttcgaatacctggaaagccttcccaagaaggctttcccaagaagcccagactgcaaagactaccacaaatatctaacttttcaatgtccagacaccagtgaacatccacaagcatcaataccactcaagaaaacatgaccttactaaacaaactaaataagtcatcagggatttatcctagagagatagaaatatgtgatctttctctatctctcagagagaggtcatatatctacacctctaggcttttcagacagagaatttgaaatagctattttgaggaaactcagtgaaatacaagataatacagagaaggaattcagaatcctatcagatcaatttaaccaagatattgaaataattaaaaagaatcaagccgaaattctgaagctgaaaaatgcaactgactactaaagaatgcatcagagtctcttaatagcagaattgatcaaagagaagaaagaattagtaacatttctatgtgaaaacagtgaaaattctgaaaatagtaatcccatttacgatagctacaaataaaattaagtacctggaaattaatcaaagaagtgaaagatcttgacaatggaaaataaaacactatgaaagaaattggagaggacacacgaaaaacagaaaaatattccatattcatagattggaagaatcaacattgttaaaatgtccatacaacccaaagcagtctatagattcaatacaatccttatcaaaataccaatgacattctccatataaacagaaaaaacaatcctagaatttatagagaaccacgaaagacccagaatagccaaagctatcctaagcaaaaagaacaaaactggaggaatcgcattacctgacttaaaattatactacagagatatagtaaccaaaatagcattatactggcataaaaacagacacatagactaatgaaacagactactgaacccagaaatagatctatacacctacaggaactcatttttgataaagttgttaagaacatacattgggaaaaggatagttaatcttcaataaatgatgctgggaaaactgaatatccatatgcagaagaatgaaactagactcctatctcttgccatatacaaaaataaaatcaaattttgaattaaaagcttaaatctaagacctcaaactacaaaaccactatgcaaaaactctgtggaaactctctaggacattgaagtgggcaaagatttcttgagtaatacctcacaagcacaggcaaccaaagcaaaaatggataaatgggatcacatcaagttaaaaagcttctgcacagcaaaggaaacaatcaacaaagtgaagagacacctcatttgccctgacatgattattatgcattgcatgcctgtatcaaaacatctcatgtaacccataaatatacacacctgctatgtatccacacacaaaatatgtctcacacaaaaatatgttagacacgcctacaacccacttttcaactttatcatgcttttcctataaaaatggactctaaattaaaacagctatgtgtgaatgacagaaagaaatactaaaacttaaaagatacttttattgagtactattaagagaatcacagtgaagcactttcttcactatcttatctgttattcgtgtttcattcaaagttggtttccctccacacttggtcaaaatacgtcttttgctttcaatctttatcctttagtcaaaagggattttgagccatttgtacaattgcagcttgggtttcagaacgatgtggcagtacacccttgcaggtttctgtggcaggtcggtctccctcctgccttcaactggagtataacatacagcaaagagcattaatcttaagtgcataattcgacatatttttacacatgtataaaccgccatagaaatcaagatatagaacattcccagcactctagaaggctcttttgtgctccttcccagtcaaaaaccactgaaaggtaaccactattttcacttttatcacttttgattaattttgtctactcacgaacttcatttgaatagcgtcataaagtatgtacttttttgtgtgtttggcttcttttgctcaacataacgtttgttgacatccatgttgctgtgtatatcagcagtttgatctttttattgctgtgtaattaacgtatatcacagttgatttatctagtcttctgttgatggacatttgggttgtttccattttttttactattatgaataaaactaccctctatggtagattttaactcttttttttttttttgagatggagtctcactctgtcgcccaggctggagtgcagcggtgcgatcttggctcactgcaagctccaccttccgggttcacgccattctcctgcctcggcctcccgagtaactgggactacaggtgcccaccaccacacctggctaatttttttgtatttttagtagagacggggtttca

SEQ ID NO: 95504 - DNA, 12303 bp, Homo sapiens
gctaggaattctggttgacccttagtgccctctgttaggtgctgatatgacttcttccagtccagagacctatagactgaaatatgagttatctatcctcccaggtgcccaatacatgtctgtggagtaggaacaagataatcacaatgagaactctcattcagaaaagggaaggatggagattagcagtctgtggtctgtgttagctaacaattttgccaggcagtaattatgaaaagtttcctctggtattaagttcctgggtttgacctgattctgctgtctgagagggacgcctttgtccgcttgcctccatggtcacacctgaggtggacgttggagagtttggcctccttgtggctgcacagcttttatgacctgctttctacaggtgtgggtttggggacagaaaagttacttcagggtgagaggagggaatggcaaactatcacagcttctgtaagtctggtttatgttttatttttaagcagtacaatctgctcaaaaatgtaatagacttctagtctatttccttctagtcagttccatatgagggaaaccttagcaaaggccttaggtggtcatagttcttccatctgcagacttttctcttttatttgctggcttccatgcttggctcatccctctctccctcaattgaatgatctttgcaggtgagttgattcccactgtttgaggaaaagcacttaatggaaggccctgcatgagtttctgagggacagtgatatcttttgctctttgtcataaagttgtagttggatatcctagtttattaatccattcttgcattggcataaagaaatacctgagactgggtaatttataaagaaaagaggtttgtctcacagttccataggctgtacaggaagcataatgctgacatctgctcagcttctgggaaggccttaggagacttacaattatggaggaaggcaaagggggagtgaggcagctcacatggtgggagcaggagcaagaaagagaaagtggggaggtactacacacttttaaacaaccagatctcatgagaactcactatgttgaagacaacaccaagggggatggtgctaaaccattcatgagaaactgcccccatgatccaatcacctcccaccaggccccacctccaacactgggaattacatttcaacatgagatttagtgggggcacagatcaaaaccatatcatctagcttggttaaatcctcaatcactggactcccagtctatctatctatctatctatctatctatctatctatctatctatctatctgatagataatagatgtacatatattcagggtacatgtgataatttgatacattcatataacctataaagatcaaatcagggtaactggggtattgaccatcttgaatatttatcttttgtatatgtgagaaacatttggattattctcttctagctttttgaaatgtacaaagacttatgattgttaattatagtcaccctactgatctattgaacaccaggtcttatttcttctatctaactatatatttgtacccattaaacaacctctcttcatcctccccttctgccaacccttcctggcctctggtaaccaccaaaatactctctatcttcatgagaaccactttttttagctcccaattatgagtgagagcatgtgatatttgtctttctatgcttggcttatctcacttaacataatgacctccaggtccattcatgttgttgcaagtgacaagatctgattcttttttatatctaatatcatatatatgtatatatacatatatatatataattttcttcattcattcattgataggcttttaggtttattctatattttggctactttgaatagtgctgcagtaaacatgatagtgcagatatctcttcaatatgttgatttcctttcttttggctatctacccaataatggaattgctgaattatatagtagttctatttttaaatttttaagggacctccatactgtttcctagagcggctgtactaatttacattcccatcaacagtgtaggagggttccttcccctttctccacatccgcagcagaatcaactggtccctgtcttttttataaaagccactttaactgggatgagatgataccacgttgtagttttaatttgcatttctctgaagattagtgatgtacattttttcatatacctattggacatttgtatgtctttttctgaaaaatggtcagatctttagtccattattaagtcagattattagatttttcctgtttgagctccttatatagtctagttattaatctcttgtcagctggatagtttgcaaatactttatcccattctgtgggttgtctcttcactttgttctctttcctttgctgtacagaagctttttagcttggtgtactcccatttatctaagtatgcttatgtcacctgtgcttttgaggtcttatacaaaaaatgtttgccccaaccgatgttacagataatttcccgaatgttttcttctagtaatctcataatttcatgtcttagatttaagtctttaatctatttttatttgattttgtatatggtgagagataggtttctggtttcattcttcctcatatggatattcagttttcccagcacgatttattgaagagactgttctttcccattgttcttggtgcctttgttgaaaatgaattagctgtaaatgtatggatttatagctgggttctctgttctgttccattggtctagatgcctgtttatatgccagtaccatgttgatttggttattatagctttgtaatatattttgaagtcaggaagtgtgatgcctacagctttgttccttttcctcaggattgctttggctattcctgggttacttggggtattttgtggttccatataaattttaggattttttttctatttctgtgaataatgtccttggtaatttgattgggattgcattgaatctgtaaattgttttgagtaatattgatatacaaatttagcagtattaattcttctaatccctgatcatggaatagctttccaaattttgtgtcctcttcaattccttttaccaaagttttatagttttccttgtagagatctttcacttctttggttaattcctaggtattttacattctttgtcattattgtaattggaattattttcctgatttctttttcatattgtttgctcttggtgtatataaatgtcactgattttttgtatgttgattttgcatcctgcaactttactgaattcatttatcggttctacccactttttggctaagtcattaggatttttaaaatataaatcttgtaatctgtgaacaaggctaatttgacttcttccttttcaatttggatgccctttctttcttttcttttctttttttcttttttttttttttgcctaattgctctgtccaggacttctagtactatgctgaataaaagtggtaaaagtgggcatctttttcttgttctagatcttagagaaaaggcttttaatttttttcccattcaatataatgtttgctgtgggctgataagagatatattgagatatcttcccttctataaccagttttttaggatgttgatcataaagggatattgaattttatgaaatgttttttagaatctattgaaataatatggttttagatatagatatagtctattctggagaatgttccatgtgctgatgaaaagaatgtgtattctatgacatttgactgaaatgctctgtaaatgtcaattttgattacaggtctcagggctgaactgcaacatgtaggcatctgtgcttgcaaactgactaaattctgctttacttcatctctctcatggtaaatgcagtgtctttgtccatttgagctgtgatagcaaaatacaataaactgggtagcttatcaacagcaaaacattatttctcacagttttgaaagctgcgaagtctaagatcaaggtgccggcagatttggtttctgctgccgtcctactttctggttcagagatggaaccttcttgctgtgccttcaaatggtagaaaaacaaagaagccctctgcggcctcttttatgagggcaccatctcattcatgagggctccaccttcatgatctaattacctcccaaaggccccacctctgaatatcatcacactggagaataggttttcaacatatgaactttggaaggatacaaacatttgagccatagcgttcagtaagaaacagttaaaatatacgaatattctaggttttcccaatctctttttctagcatgggcctcgtaggtaactaaggcaagtgagacctttgtcaaatattttgccatggcataagaagagtcaagaaacttttagtttcaacatttatttcttcattcctattacaaaaacaattaactaatagcatgtgttttaggctcctgtttgatagcacctgattcctagtaccaatctctatataaattagggcagagctaagtgacgtagcaaaaacctctaaaatacagtggctcaaacaagatagaatttttaaaaaatatatatttctcacttgaaaacaaaagtaggctctgcccaggaaagtgtcccaagcatatgttgcactgccgtccgctagtatctcatgatcaaagccgaaggccgagtgcggtggcacacgcctgtaatcccagcactttgggaggctaaggcgggaaggctgcttgaagccaggagttgaagaccagcctggacaacacagcaaaacctcatctctacaaaaaatacaaaaattagtggggcatggtggtacatgcctgtagtcccagctacttggcaggctgaggtgggaggatcacttgaactcaagagtcagaggttgtggtgagacaagatcgcaccactgcactgtagcctgggcaacagagtgagaccctgtctcaaaaaaggaaacaaaacaaaacaaaataaccctggctcaccagctctataattgccccaatgagaagagaaaaagaatggatgtgatgaagaagctactctattcctttcactcatatccaattggccatttatatcccatttcacacctaactccaagggaggttgtgaaatgtagcttctagctacatgcctgctaaaatgagggccttataactaaagaaagactacgggagctggtaaaagtctcagctatagattcctgtgagccagggcctctgacctggcccctgtgatagctcatcagccagtggtagcccatagcctcctgcgaaacatctctttgcatacaaaggtactgtgattcgatctccccaacgatttttaataatatcttttcctgttgaacaaaggatttaagatctgtgtggtgattttagtatgattctggcctgatgtcctcaatttacaggatctgaagatgaagagagttggggacgtgactctcccaggtaaacagccacatttagcagacaggacattccaaggacttagaagttatctcccagggctctagggcaaggccaaactctgattgcttccatgagatagccagtttgttagtggcaaagctaagattggaacccagcatgctgaaatttctttcactatatatggggttttaaaatgaatatgataatctaaaaattatcccactagaatggaatacagtgacacacttagccttataygccattctcttatttggataatgmagtattttattaatttttagaattacagtgacacgctgctaactcctacttaacttgtggtttttacttgtctggatcgattttatgccatacatttgcaaagtaagttctgtcctagcatgcatttgtatagatttcttctttcgtgagttacttcttgtactctgcatgtgtcacttttgaattagttaaatttgtagtcctcttggagcctgtttaatatgagatgctttaacacatcaaacccgaggacatgcttgtgacccgccttctggaaggaagtggctaactctggtgaccgccatggagcagtgggttctggtggagatggtacaggcgctttacgaggctcctgattaccatcttattttggaagggattctgatactctggataatcagacttcttttctctaagacttacaaattacaagaacgatctgatcttacagtcaaggaaaaagaagaactcattgaagagtggcaaccagaacctcttgttcctcctgtcccaaaagaccatcctgctctcaactayaacattgttttaggacggagtcttgctctgtcaccaggctggagtgcagtggtgcgatcttggctcactgcaacctccatctcccgggttcaagccattctcctgcctcagcctcccgagtagctgggactacaggcacaagccaccatgcctgcctaatttttgtattttcagtagagatggagtttcaccatgttggccagaatgatctcgatctccttttttttaattaaaaagtaaactttaatgtcaaaaatgcaaacttggggagggcagaaagatcacacacaaggctgtcatttcacacttggaaggttgcacagcagccgggcagagacgctcctcacttcccagatggtgagggggccaggcagaggcgctcctcacttcccaggtggtgggggggctgggtagaggcgctcctcccttacaaacggtgagggggccgggcagaggtgctcctcactttccagacagggcggcggctgggcaggggcgctcctcacttcccaggcggtgcgggggatgggcagaggcactcctcccttacaaaccgtgagggggccgggcagaggcactcctcacttcgtacatagggcggcggctgggcagaggccctcctcacttcgcagacaggatggtggcaaggcagaggcgcttctcatttcccagacggtgagggggccgggcagaggcactcctcacttcgcagacaggatggaggcgaggcagaggcgcttctcatttcccagacggtgagggggccgggcagaggcacttctcacttcgtagacatggctgcggctgggcagaggccctcctcacttcgcagacaggacggcggcgaggcagaggcgctcctcatttcccagacagtgagggggccgggcagaggcacttctcacttcgtagacatggctgcggctgggcagaggcactcctcacttcgcagacaggacggcggcaaggcagagacgctccttacttcccagatggggcagcggctgggcagaggtgctcttcacttcccataccatgaggtggccaggcagaggtgttcgtcacttcccagatggggtggaggccgggcagaggcagtgctcctcctcaattcccagatggttggcggctgggcagaggtgctcctcacttcccagacagggcagtggccaggcagaagtgctcctcacttcccacggtgtaagggggccaggcagaggcactcctcgcttcgcagacaggacggcagccgggcagaggcactcctcacttcccagacagggcggcagcctggcagaggcactcctcactgcccagacggggcagggcccaggcagaggcgcccctcacttcccagactgtgaggcggctgggcagaggtgctcgtcacttcccagatagggygggggcccggcagaggcactcctcactgcccagacggtgtggtggccaggcagaggcgctcctcacttcccagacggtggggcagctgggcagaggcgctcctcacttcccagatggtgcaggcagagatgctcctcaggtctcagtctcttgacctcctgatccgcccgcctgggcctcccaaagtgctggattacaggcgtgagccaccacacctgccctgccgtctcttctttctcctcctaagcagctgtcttagtctcctgaattttgatgttctacttaacaccctcatgttcttatgcatgttgccctgctggaggtgtccttctctttgggaagcctgacccaccaacagtgcctcaggagatagacatggaagcttagctggtgggggcccctcgtctctatcccacctcagttgcaggggaggggtcggttgcagctgcagtggtggccccgacagttttcttttgtgggacctgtggccggcagctttgggtggagaagacctacttgatccaagagctgcaggatccttgggctgcatgtcctcccccaccatcagcaagcctggagagctgggcaggtagtctttacccagcaccttcaaggccgccttctctggccacagggagcagcccggaactggggcagggagcactgttggaagtgggtcaggcctcccaaagggaaggatgcctccagcagggctgtgtgaactggcgactccatggcccttggagtagaaactcactgcatgcacctgggccttgtcagtctggttcttttctgtcaagctcttgaggtggacatttccctccaagggcctgggattgtaccaggaggaagtgaggttcccctgagtctccaggggcctagaggtggaggctgcttccccattgctacaggggccccttttattgtcctcctgctcctgggtctctacctggtctttcacctccgttgcttctttgggctcttctgccctcacctccgtcttcgggagcctggctgggatcacctgctcatctaatgaaggaagttgaaggttaaacttgcctctgagatgagggatcctcatggggctgaggtgtccaaacatcatggagttgcgagcagacagcacgggtttcttccttgagggggtgctccagaccacaggaggcaggaccctctgtggggtgcccgtgttccgagggataagacacagcctcatagggtcgctgtcccacctgactggaaaagaaggcccaagatgtcgctgacggttgaagaggagtgggaaacggccccagattcccggcgcaggcacacgtgcaggagccgtgggggcagcccggccagctgggaaggcctcacggacaagacgagcaggttgctgatggcatggccagaacctgcagtgggaccaggaacaaaatacacttagtgagttgcccattttgagcgagttgtgcacagacgaaactaagggtcagaagtggagaggatactcctaagtcacccacttctctgtggccgggtgcacactgggcatctgggagtttatgacatcaccatggggctggtgacagagccagggtgtggaggagtgcttaggagcccagtgagggtgcctacaagaggagtcaaagggcaaagggtgagacccttccaccggtccagctggactctagcctcagggacgtcctgctcctgggggcaggtgtgtggccctggatgggcccccctgtggggctgttgggggtgcggggctgatctgccagagcccttctgcctggcgcctggcccaggtgctggctggcacccagtggccctgtcttggccagccctgtcccccgggttacagggccagaacctggaagcagagcgcaggaccagccagatcccgccaggctcccccggggcctctccagtgcctctgtgccacctggagccaggcccgccttctccatggctgccgtggcctcaagggccaccagcctcgctccgcaggtttccaaagagaggacgcggtgccctgacctgactgggtgcgcctcttaccacatgcctccctggcaggcaaggtctccactttttacaaatttgcctgagaccattcctcaggtcattcaggtggtcatggcccagccaggctttgaacccgggctgtgcaattccacagctggcgctctggcctgtgtgcctcatgatcatggatacagcatctattcttattttttcctgtagtcctgggggtacttagcaccgtggcatatctgtaataagcacatgcacaccttgaaggaggtcttcacttcaacatacaagttgaccatggcatgctctgggctccagtcctctacaaagatgtagggcaggaactaccagttgtcagcacagcaccatcccacattgctcttctaatggagcctttcaccccagatgttctttctcgtctgatgggaaggatccaagtatgtaaagattatgttctagatcagctttggtctgtcctaaaagaaatttgccagtggattattccatatggataaaagtcagtttctctggtcttcctggaatgtgtctagaaagcaaacacattatttacaagttcatagtagatcaatgtattggattaaaatatgacaaacataatttggtcattgtgagcatgccagctcrgtcaactattcaccacacatgatgccctaaatataactctaggttttcttatgcccaagagagggacatactcttgggtgtctggactagggaaacatgtatgaaaaaccatttggccactctacatcttgttattggagaatcgaaaccatctatattcaaagatattattaaaaggcaagaagttaacttcaaaataaataaataaataaaaataaataaaacatcaaaccctgggactaaataacaattttactaaagttaatatgcattatacccattctacacatacttttaatttactatatcactactgtaaataatacattaaatcatcatttactcctttagaagttatatcattttccatattttgctattttgactatgtattctaatattttctctggaagtatagcttgttggtctacaattctagacttgttctcctctaaatgtggctccccttttcacttttaggcttttccataaatacttttatcttacatttgtgtgtagaactatattctcaatgcacttctgcaaagtttgtgggtccccaagaccatcctcatttctaacgtcaacttccgagttctggggtctctaagaccaccttcagttctgacacagctatcagtttgggaggtcccccaagaaaactcagagaagctgttatattcacagtttattataggcaaaggatacaggttaacataagccaagggaagaggagcacagggcagtgttcaggagacgttaatgttgagcttcagttgttctcttcagtggggttgtgtggacagcacctatttctcccagcaatgatgtgtgacaatatgcactgcataggggcaaccagggaaactcatccaaaccttggtgtccagagtttttactagaattttgtcttgtggacatggttgaccacttgcatggctgaccttagtctccagcctctccagaggtactgatactgtatgatccaaaggccccactgtaaatcatattgttagcataaaatatctgccatggtccaaatctgccaggtaaacaaacacgcacttagcaagtaggacattccaaggccttagaagttatctcccaggactctaggccaaggccaaacctctctttgagcaatgttaatattcttctacacgactttcatatcaataatgtaagccttgtaaatccagacattctcagggttcagtcccataacactgctatagtcaagaagggtagtttgactcctgaaacataattaaaaagaattccatcttttataagatacctctcaaaggatgctcaaggggattcaaatacatactcgacatcttattaaaatcccctttccttttctacttctcttatcttcaaccccaccaccctacccccacaggcccctggccttctcttctttttctcttcacattatttagtagattggtttaggcttaaatttagcacaaaattatatttatcctttaagaggtgagaggagggggggaattgggctcgtcaatgcagactttctctgatgggtaggaaaagggggaaaatcaaaggtacacccatattaataatgtgttgacatcattgtaattctactcactgggcaccaactgtgtttcaggcactttacatacgtgtgtttctggttctaatatcccacatttttagagacgttacaacctgagaaaatttttaacaatcattaagtgaaagcagaattgttcaagaaatgctagaggaatatactgatgaagtgcctaattccatgatattttaacatggtaaaggaaatatataccacacaggaagaaaaatgaaaatgtataaagatcaaaatatttagccttaaaaattctttttttctttatttgttatttttttattctcatggttttcttcaatactgcatggttaatgtaggaga

SEQ ID NO: 95505 - DNA, 95521 bp, Homo sapiens
tgcaatggcatgatctcagctcactgcaacctccgcctcccagattcaagcaattctcctgtcccagcctcccaagtagctgggattacaggcacgtgccaaccacacctggctaatttttgtatttttagtagaggcgaggtttcaccatgttggccaggctggtttcgaactcctgacctcaagtaatctgcccaccttggcctcccaaagtgctaggattacaggcgccctgccactgagcctggacatctcagtttctttagagtgttctctagcctttttataatggagagtgtgtttccttttccatgagatttggatagcactaaggggaagatagtttgtgcatagaaaagggaaggtggcctgacagtgaagtcactggtctggaaacaggatgttgcagttgactgggtgcctacccatgggaggcactggcaaatggggtagcaatggtgggagtgagagtatcagcaaccaacacaggaaagatagaggttctacttaaacaagtcttcattatcaaagcttcagatagaagaatgttagagggagggttgttttaactcagggcaaaatgcacaaaatacaaagcagatatatttaagagtctcgctcacctggattctagggggaaatgaaaaaagatatatttaagaaatagtgtatttatgttttgaatgtaaatatttcttcttaaatattgaaattaaaccaaccaatacctatttttctctctcctttgtccctttcttttcagagaagcatcattacttgagaaagagaccactagatttttctttttctctaagaatgatgaacgacttcaaggtcagtccatttttttcatcaaattacatacatagaacaggtaataatacagctacagtaattcacatccaggaattttgaccgttggtaatgtcatgtggtttaaccccatttgttcacactgatgaatgttaacttgtaaagctgtcaaggtctgagagctccccactcaccactttctttgcccgctcattctcatcaacaaagggttgttttgttccaagggcttccttagatgttagacatataaaacccctaagttttagtgccataaattccatgtgaaaactcaggctgttggggagctcatttcttaaagcctagcataaacaaagttacataatagtaaatgatatatataaacagtaaaagcaatattatatttttcatttggaaagaaaaaatactaatttttgaaaataggtagaaactgagggaaaagaatgatcttaactggtattcgagaccttgataatgccaacacttagaatattaccaattttagtagtagtttgctgcctcatctttcttctttttcccctaataggttctgacttattctggagaggagtaggaagtaatatgagcaggaactcttgggaggccagaacaaccaacctgcgtatggtgagtaattgtttctccatattatttcctaaaatagacatgttacctatctagaattacagtcctggaagggaactcatgaatggtataggtgaggagactgcagactggctcaattgagtgactggtctcagaatccagccaagcctattaagtaacacgaaagcatcagatttttaaagactgaattatagttcccattataaacagttaatgccaaaaatgccaatatcccctcttcatttcaaaagagcactttcaaaataggtttccacagccctgacagtgagaataacctgttttacttctatctactgaacatcttaaaaacaatttgtttattgctaaccaagtcttttttttttcctaggattgtcgaaagaaacataaagacgcaaaaaggaaaatgaaaccaaaataataaatgtcagctggttttgatactgaatgtgaacaaggctcacctaaggaaactgacccagaaaacagttttagctgacaaagaagaaatttcagagtgaaggaattttaaaaatctggctgacggaatatcattctggttgccatctttttctgtggaactcctctgcatttcttcctaagtaattacttcaaaaattaaattcaacttcttataaaggaagaacaagatagtccttgaaaatactttttgtatataatctctttgccctctatcctgagtaactaatggacatcttctcatgcaaggtttacatgaagcctttttaaataaatgagtcaaagcacttgtattttccagcctaggctttgtgtgaattataggctatttgaaattttatttctgattatgtcaaatacaccttccattttgtcatttttgtttaaactgataaattacaagtcaacattgagttttatacttgtgttttggtgaatggttaactgaaatataggacatttcagaccaacatcatataagagttctgtgaggaccaggagaggaagccaaatacagttatcttgtcattgcctctaggaattaaggaacaacatctagatgtacaccaatcccaaaattctagttagactaaaagcttatgaaaaataccaagtgcctgaaagataggtagtcacaattaggagtcaggaccctgagcccaaatagggaaacagatttaacattacattaaataaaccaacctgcctagatttcaagacatacgtctcctatcaaaatgggctctgtatgaaatagtattacataggccgggcgtgatggcgcacacctgtaatctcagtactttgggaggccaaggcgggcggatcatgaggaggtcaggatttcaagaccagcctggccaacatggtgaaaccccgtctctactaaaaatgcaaaaattagctgggtgtggtggctcacacctgtaatcccagctgctagggaggctgatacaggagaatcacttgaacccaggaggcagaggttgcagtgctgagatcatgttgctgcactccagcctgggtaacagagtgagactccatcttaaaaaaaaaaaaaaaaagaaatagtattatatagttccaagggactatcattaagccatgatgtgtgtacctaaaattagtatttattgatttacctatgctgaatataaactcttaactgttgggatttcatctggtgtgttaaccattatgaccctagggcttatgctctatgtttttttagtaagggtccaaggaactaaataacttgaagagtaattctggattcctaggtttccaaaacttcagacttcaaggagagtgtggacaactaagcagcaggataaataattcacactttctaccttctcttgatgtagatcacatttgtaccttattttctattgctgcatagcaaatcatctcagtaacaatcatttattttatgcacaaatactgcaatttggtcaacactcactagggactgctgatctgtgctgtgtgctttcactggggtggttcagctagggctacgggatctgtttctaagatggcccactcagtgcctgttcatgggcttccttacagcatagcaaaaaagctctaggagcaagtgttctcagaggcaggaagcagatgctgcctgtctcttaaggcctggcccagaaaccggctcagtcacttcactgtattctacaggtttaaactgacacacagcccaaccagactgaaagggaggggacacagatcctcacttcttagtgggaggagtgtcagaatgtgtggccgtaatttaaatccggcacatgtttcacaagcagacaaataagtaacatcaagtagccttgcccaccccccagttcctgctccccagatgaaaccaccttcagcaatttaatttctctagtatttacctccatgtttctacctaacatgcttatgctctgatttcttggtttttcacttccagacactacatattctgaaaaggtgaaaaaattattcacctcttcagtccaagtaatatattttgactacagttaacttttttgctggaattttttcatttgcttaactttttctagacttagtcttcccataccttccaactgtgggacatgatgaggtttctcttcaaatagcctgatcaatcctttattctttaattcacagtgcccccctcttccctttttctcctctttcctttctgcctttgttacatgcctagacaggccacagtaccaggcgttatcagtaccagctcgtattccttatccgaagagaagactagctctctagctcattacagacagcccttccccctttcccctctctcttacgtgcccaccttatctaaagaaagttaaaatgtttagccaactgtggttattttagattgtgaggcccaactccggccaatggagaaagggtacaggggcagggtttgtgtcagggataaaggttctcgtgcccctttgttctggtgtgctctcatggtgactggccaaggagaagcacccctctgcgcagaagtaaaattgctttgctgaaaatcctttgtttgaatgttcaatttccttaggattttgagcattatttccaacacaacagtactattaatataaatgtttctcaatcaaatttttaaataattagacttggcctacctcacctttgtccaggagccctctgtctggctctatctgggctctctggataggtgacaaaaatgaactgaacaaggtggcaacgtgaggaatgtgaaaacttcaaacacattccaaatactttcagttaattaacaagatttgcagctattaaattatgtacgttatgtgagtatagtcagaacactgagttacccatgatggaggacatgaaaccactttaatccttcacacagggccaagacggtaagtaaagttaaatatatgctgaacagactatcaaaatgttcctaaacttaataagaaactgcattctacctattctaggccagataaattttttatatccctctaacggatacaataggcagctacggaactactcccaatttggcaagatccagaatttcctttagaggctctggggccaaagcccgaggcctactgccctttgcaaggctccagattttaaccagcagatcagtaaggtaccaagccgactcatagcaatgataataagtatgcaggccgggtgcagtggctcatgcctgtaatcccaacagttaaggaggctaaggcaagcagatcgcttgagcccacgagtttgacagcagcctaggcaacatagcaagaccccgttgctacagaaaatacaaaaattagccgggcgtggtggcgctagcctgtagtcccagctacttggccagggatgaggtgcgaggatcatctgatccggggaggttgaggctgcagtgagccatgaccgtgccactgcactccagcctgggcgacagaatgagaccgcttctcaaaaaaagaaaaaaaaatcgtttgtgcaatgttttcattaccggaaacattttaagtaaaatacaataaaacttttaaatctggttgtcagacccttccttcccttttgttattatcgtttcacgtagccatttatgataggagaagcggctttggggtcggcggctcagggcccaaaagtataattattaaagccacctctccggaagttgctgtttgtcgttatcaatttaggtacgaagtgtccagtcagataaatactgacaaaagcaaacaagatgaagaacatgagccccgacctcggcgccccttcccagtgggccgtcacctacccggaggtgcccacaacccgagtgagacctcggtctacactactgcaacggatacaagcagcacgcmcagcgccgccctcagcgctggttcgttttccacgtggaggcgcaaaaccagcaagcaccactgtcgcaccatccgagccagtgggcgcaatcatgtccggcgmgaccaatcggcgcctggcttgttggcaggtgtcaggcagcgcgcactgattggccggtgcggagcctgtctccttcactggatcccgcattttcagcgcgttgcatcacctccgtgcgcccggttgcagcgtggacgccggatgagttgcttttaggcttgctggcccgcggggctgtccaggcacgcgaggcccctcaggtacgccctctcttccctgcaggatccggccctcaaagacgagggtcacgcacgcgttacaaccccgaaacagtagcacaagatttaatttttaaaagagcgtgtttcttcggggcttgccgttcgttcgtttccagcctcaggaatttatggtcgcctttttgaatgaggtagtgtttgaaatgagtaaaatctttttaaaatgatatacatagtataaattgatatagctgtgactttatgtataggcaatacgtatttttatatgtcttaatttattaccttcaatggctgcgagatacttattttattgatgtaccgtaatttacttcagtcaccatgaatatttagattgttttcagttatttgcctggagaaacaattattcggtgaatgtcattgtatacacattttgtacatttgcatgagtatacctgtggagtctatgttaataggatataacwaaattgaggaaacgtttgagacggtcccactttcaggttacatttgacttaatagattatgaagacctgagaataaaaggagaaacagaaatggatttagaggagaatgaaaagggggaacagaaataggcttataggtaggatccacatgacttgatgattaattggttgtgtgtatcttctgagtagtgtcaggggtgactcaaaaatgtcatgcctaagtaatgggaagaatattggaaccactaatacagtagtttaaaagggaagcaattctggaaggaattatgaaattttaaacaaaacatggttttagtgtgcgtttctaaaatatattgaggcaaaataatatgaagtaatgtgaataatatgtagttaatatcagggagggtggtctcgaaattgctgaacgggaagttgaggttaargtgacctgaaggagttgtggagcagcgaagagtcaagggcctggattataataagagggaagcaaaggggatggcatccctctgcacaacaaggttgttgtgcaaggttaacctgctctgtccctgccctgtggttgctggatgctgttgtgcatggacagctctccagtggattcgatgggccatagcaatcctgtgatttatgcatggaggctgcttctcctcagcagctgccatagcccggtcgctggtacatgattcttcctgaatagtcaatgctgttatactgagtgtttatgcttgacgtaataatgcagtgattcttaatctttggggaaagtagagactccctaaaaaacacagtaaaagctgaatgagctggccaggcatagtggctcatgcctgtaatcccagccctttgggagcccagggcaagaggatcgctttagcctaggagttgaagaccagccagggcaacatggcaaaaccctgtctctacaaaccaccccctccccaccaaaaaaaaaaaaaaaaaaagctgagtgtggtggtgcacacctgtagtcctagctacttggcgggctaaactgggaggaacacctgaacccagggaggtcaaggctgcagtgagccatgattgtgccactgcactccagcctaggtgacagagtgagccactgtctcaaaaaaaaaaaaaaaaaaggaatgatcctcttctcagaaagcttaaatcttattttctcaaaaataaaaattcagatagatattcctgaataattgttagaacagtgcaagagtggtgatgttcagactttgatgtgaatgctcatcccctagggatcttgttaaaatgcaggttctgactcgtaggtgcgaggtgaggctggtaagtctgcatctctaataagctcccatagatgtgggccatagtaggaccagccttgaagagattagaatgtgttggtatctaaaggtctgttagtcttcagataacaatcccataagtttcagttggcctctgataaggtacacaatgaacctaaataaatcagtaaatgcacaaacacttattttggtccttgaaaggctagaggttataataagagttgaagatctaaaatgccttaaaccttctgtttaataccttttaatggcatactgtgatcagaaatagctatttcagttagttaaacagcccaactgttcttgtcctgttttttcttaaattaaactcagaggcactcacacatctgaaaaattaatgagggtaaaagaaaatgaaagatactacttgtcacagacttttttttaaatgataacttgaatcaataacttgattagactatgatgcttttgatgctttcaaaactgtttgaggtatgtaggtgtcttttcctgtagagttgattaccctggtctgttgtggttcttgagtacttaagattttttatcttctctgttgttcccttattagcaattttatccccttctgatctgatactgacttggaaagctcgtcacccaccttgttagaattgttaagtaaatataaatagactttgagaaggaaaggtctcaagggtggctcactagatacttaagtcatagattgatcaagtatctctgcatgaggttattagcaaaacatttaaaaagacactttaagacttctctcattagggactaaaccagaaaggtatagggctcatccttcataaaaatcatgaataagcaataaaaagggtaaaatggaaaactggaatctatatttgaatgtgagattctcatctttttagctttaagattttttaagttttaccagttttcctcaaagagaagatgaagttacttcaagagaactgatttctgtcatgtgagtgtaggtaagaaaattcttaactactttgagatatttttcttcagattattaatgagttttttgcaccactagatagaatttccaagattttcctgcttacttttggaaacattgtctctaccattactgaatattaaataatagccatgtacccctccctcacaccatatacgaaaataaaattatttgtggcctaaatgtaagcgaaaaatctataaccttgtttaggtaatggtttattgatgacaccaaaagctcaagcagcaaaaccaaaaattgacaaattgggcatcattaaaatgaaaaatctttgtgcttcaaaaaatgccatcaagaaaataaaaagacggcccacagaacaggagaaattttttataaatcatatatctgataaaggatttgtatccaggatgtatacataacccttaaaacccaaccacaaaaagagcccaattagaaaataggcaaaggataaatatctatccaacgtggatacgcaaatggccaataagcatgtggaaagatgctcagcatcattagtccttagggaaatgcaaatcaaaaccacaagatactacttaacatctcctagaatgactgtaattcaaagatggacaataagatgtgttgggtaagatctgaagaaattagaatcctcattcactgctgagggaatgtaaaatagtacagtcactttggaaaaattttggcattttctcaaaaagttaaatacagaattatcatgtgacccagaaattctacttctagctacaaacccaagagaaatgaaaacatagatccacacaaaattttgtatgtgaatgttcatagcagcgttattcgtaataaccaaaaagtggaaacaatacaggtatccaagaaatgatgaatggataaacaaaatgtggcatattcatgaaatggaatactattcagctatcaaaagtaatgaagtatgaatacatattacatcatggatgagccttgaaaacatgctagagaaaggaaaccagatgcaataggccacatatagatgattcmtataaattttcccatttatatgaaatgtccagaataggtaaatctgcagggacagaaagaagataaatcgttgccactggctatggagaagaaagaatggggagtgactgctaatggttttggggtgttttggtggggaggggaggttgaaaacgttttgaaattaggtattactagttatactaccttgtaaatatactaaaaagccactgaattgtacactttttacattacactatgtaaattgtacatcaataaagctgtaattttttaaaagtatggatagtgtcatgtacacccatgttaataatatggtactctgttattcctagatttctcttttgacagtaataaatttgatttcttttgcagcaacaaaatgcttcaacaagttccagaaaacataaattttcctgctgaagaagagaaaatcttggagttttggactgaatttaattgttttcaggaatgcttaaagcaatcaaaacataaaccaaagtatgtgaattttttaggttaagttcccttaagaatagtcatttcttagactgaattccattaaagcagatactttttttttttttttttttttgagatggagtctcgcactgtcatccaggctggagggcagtggtgcaatctctgctcactgctacctctgcctcccggatgcaagtgattctcctgcctcagcctcccgagtagctgggattacaggtgcccgccatcacaccagctaattcttgtgttttagtagagacggggtttcaccatgttgcccaggctggtctcggactcctgacctcaagtgatccacccacctcggcctctcaaagtgctgggattacaagtgtgagccatcacgcgcggcctaaagcagatactctttattaatctttctattcccagaatcccccagctccctatgtagtgggtactcagtagtagatatacattgaatgaatgagttctcaattattggggtaaattttgtttctttaaaaggtcatctgagtaaaatttatgtgtcatcctccgtgtcaccctctttccacctttattttcatcaccaccctcgtttaggcacttatacctaagtaccccatagaaggctactatagtactacctgcctttagtcctcattcacctaaaagactagtcctttaatcagtgttttcattatatgtctcctctggtcaaaaactatgagataggggtttattgccctattttactgatgagataactcaagatcaggataaataatttgccttatgtcatggaactaataaatgaaaaatggataatcaaatggaggtctctgtagctctaccacaattgtagcctttctgaaggcaggaccaccagtaaatatcaaatcaattatgtctgtcggtttcctgatcttgctgcttttctccttgaagactccactatgacaagagctatctatagaaaaatgccttaaattttggctgtttttaaatggcttgatatatttttattacctgttagatttaccttctatgatggtcctccttttgcaactggactgcctcactatggacatatacttgcgggtacaattaaagatatagttacaagatatgctcaccagagtgggtttcatgttgacagaagatttggatgggattgccatggcttacctgtggtatgtttgagtatccagctttataattttctgattttttttataagcattagattttgtcatataatatgttcaagtatgatgaacgttgactgtcagaccttctagttcatttctataatatttgtagtttgatttgttttgttttctagagttgcatagttgcagttgttttcatagggcagcgtggtaacagtcttatcacaaattttcaggaatatgaaattgataagacactgggaatcagaggaccagaggatgtggccaaaatggggattacagagtataacaatcagtgccgagcaattgtgatgagatattctgctgagtggaaggtatgttgggtttttttcagtagaatgaacagcaaatgtagttactaaatgggcattgaaatggtttatggtcccttgtgctttttttattaatttattttttgtagaaaaagtgttagcttccaccttcaaccctattacttaaacggttagcttaaactgaaccatctctcttctgacttctgtgtgcttaattggtctaactttcttgcatgatcaccaatagggaaaaattctaataagtataacatgatatataggccttttctttttttctcaaatacttttttcaatttttttaacttttcattttgaaataatttgacttattaaacaattgaaaaagtagtatgatgggttcccctatatccttcatccatctttcccagctgctaacatcttcggtaaccataatattaatagaattttcaaaagcagttgccccattaatttttatttctgaccaatcacatattgcatttggttgtcatgtctttttagtcttcttaagtatggaacatttatttagtcctttgtatttcatggccttctcacttttgaagattgcagaacagctattttctataatgtctctcaatgtgtgaggtttcctgatttaatttaggttatgcatttttggtgacaatgccacagaagtgatgctatgcccttctcaatgcattatatcaggtggcatgtgttgcggctatgtcacattgatggtgataactttgttcacttggttaaagtgctgtcagctttctgctttgtaaagttgtagtttttcctttgtaattaataagtatcttgtggggagattctttccaaatattcttttttttgtcatacattcacttattaattttaacatccatggatggtttttgccagtaataattatgcctgtgatatttgccaagtggtggttttggtagacttttataagtgaatatttatacttgtaaataacattttgtgcatgtaggatgaatgccgagaaaactggttcttaaccttacataatatgttgttggcagtatagatttacttgtaccattgattattctgttttcccaaaattttcatttgtgatgacaacagaaataaacacacattgatgtacaattataaatatcattgtctaatactgttctaatattaatattttaaagtctactgttagcagacttggccgatggattgactttgacaatgactataaaactctgtatccacaattcatggaatcagtctggtaggtttatttaaaattgtaaatatggtaaatattctattctgttgtattgataattggaaaaatgcactagcatgaatcagtttatttttgagtccatcgttatttctctgaaaatctttgggaacaggtttgtttttgaatgtagaacttttatttttatttttttgagactgagtctcgctcagttgcccaggctggagggcagtggcacagtcttggcccactgcaacctccgcctctcaggttcaagcgattctcttgcttcagcctcccaagtagctgggattacaggcgcccgccaccatgcttggctaatttttgtctttttagtagagatggggtttcaccttgttggccagggtggtctcgaacttctgacctaggtgatccatccaccttgatctctcaaagtgctacgattacagacgtgagccactgcgcccagcctgccagttgcttttcttaacattatgtgttaaatatcattcgatatcagtagatattagcattttaatgtctgcctgatgtcttactatattgatctgttataatttaccagccagtctcccaatgaaagacattgttttttcacttatttggcagacagaaactctaaaaagaaaatggcataaatgtttgcattttcagaaatagaattttgttctgtaattgtgaaactccatctcttaccaggtgggtcttcaaacaactctatgataaaggccttgtttatagaggtgtgaaagtcatgcccttctctacggcatgtaacactccactttccaacttcgagtcacaccagaattataaggtacgtgaaatgtagagacattattcagcattgagttttgtaggtggaagctgagtagttatgatcacagtaggtattcccaagtagacccagtgtggaatgttgcccacgacatccaccactttgaccacttcttactgagtgctggaaatattgccagttagtatactaaggctctgttaagatgagggattttttttccacattggatttatgatgtgtcttaatgtgataggttttgcttgttttgaccatatttttgtgcctctctgttgggttaacaagtccagctttgacatacttcctgtagtcatcgtttcttaagggttgagtaattttatgccttatctgggacctcatgatatcatttatttgttaacggtatttggaaaaaaawtaatttgagatgccaaatggtattatttttcctctgatgagatagaatcagttgttgttgttgctatgattgaggtgtttagacatgtttgatgtttacagagtgtattgttataccatatctagacagatattatatactagtaagtcttctgaaatgtgaaccatctcttctcgtgtgtatactgagttgttttcagttttgagagtttatctgaccctctgtttttaaaggatgttgacttgtttggaattcttgtttcatggcctaggtttgaaaattacattagtaaaatttgcctttcaaagcacgttttatttatagaatgctttcacatatcctgtttgattgatctttgtaaatccttgtaaggcaggtatgatgatttctattatctccttaccacctctctgtgctcatgtttgtatttttttagtaaaatattttaagcacttaacaatgtagagaatgatatggtaaacacaaggtttccaaggcttacctttgtcaaatcttaatatattgctatatttggtttttgtttgtttgtttgtttgagtcagagtcttgctctgtcgcccaggctagagtgcagtggcgcgatcttggctccctgcaacctccacctacccgattcaagcagttctttgcctcagcctctggagtagctgggtttacaggtgcccaccaccacgcatttttagtagagacagggtttcaccattttggccaggctggtcttgaactcctgaccttgcgatccacccaccttggcctcccaaagtgttggaattacagttgtgagccattgcgcccggcctgtttggttgttttttaaaacacttgaatgtggacagtttcagggacatrcaaaagtaaacagaatggtataattaatttctgtaggcccattaaggcccccagcaccaatgactggctaatcttgcctcattcatacacatattctttcccactttccttccaattctgaaacaaattccagatatcatattatttcatcaagaaataatccagtatagatctttcataaataatctttatcttctttaaacattgccatgttagcattcgttgtcacaccttaaaaagtcatcagcagttacctttttgttgttgttgttgtttttgagataggatctcgctatgtcacccaggctagagtgcagtggcacgatctcggctaaccacagccttgacctcccgggctcaagtgatctcccctttcagccccctgagtagctgggactacaggaacataccaccatacctggctaatttatgtgtttctataggagtggtttcaccatgttgcctgggctggtcttgaactcttgggctcaagcagtccacccgccttggcctcccaaagtgctgggattacaggtgtcagccactgcacctagccacctttaatagtttttattttaatattctcaaattatgtaattcctgaacatcatcagttcatatttctaatggtttaatcatttcccaaggggttatattttatttttatttatttatttttttaaatcaggatctaccaagacttaaacacatggtgactgttgtcttttaggtcttgtacacgtttcagttggttatataacaagtagtggaattatygagtcagagtatactttgttttaatttttatttttttgagacggagtctcactctgatgcccaggctgaagtacagtggtgtgatcttggctcattgcaccctcctcccaggttcaagcaattctcctgcctcagcctcccgagtagctgggattacgggtgcccgccagcatgcccagctaagttttgtatttttagtagagacagggtttcgccatgttggccaggctggtcttgaactccttacctcagttgatccacctgcctcagcctcccaaagtgcgggtatttttacaggcgtgagccaccacgcccaggtgagtcacagagtatacttaatttttagttctaatactgaggttgggaaactttcctctgcaaattaaatattttaggcttttcaggcaaagtgttctcaattttgtcaccattcttaactcacccactgtatgaaacaagtgatgagccagatttggcccaggggccatggtttgctgacctctattctacrcggtctgtatattgattgttaaccaagggtttttaaaatttttttgacttgaccaagcacagtggctcacacctgaaatcctcgcacttttggaggccgacctgggcaacatgacaaaaccccatctctactaaaattacaaaaattagctgggcgtggtggcgtgaacctttagttccaactactccacaggctgaagtaagagaatgacatgagcccaggaagttgaggttgcagtgagccgaaagtgtgctactgcactccagcctgggtgacagagttagactctgtctcaaaaaaaaaaaawatatatatatatatatatatgtgtgtgtatgtatatatgtaagtatacatatatatgtattggcttaaaacttttatttatttatttttagagaagggatttcagtctgtcacctaggctggaatgcaatggtgcaaacacagctcactgcagccttgacctcctgggttcaagtgatcctccagcctcaccctcctgagcagctgagaccacagatgtgcatcaccatgcccagaaaatttttttatctttgtagagatgggatctcaccatattgccccagctggtctcaaactccagagcttgtgcgatcctcctgccttggcctcccaaagtgccaggattataggcatgagccaccgtgctaaaaaattttaattttttacaaaaattagctgggcatggtggtgcacacctgtagtcccagctattcaggaaaccgaggcaggagaatgcttgaaccygggaggtgggggttgcagtgagctgagatcacgtcactgcactccagcttgggtgacagagtgagattccatctcaaaaaaaaaagaaaagaaaaaaattaattttgatgtagtttcaaactcacagaaaagcggagagttctttatatccttcaactagattccctaaatgttaaccttttaccacatttgctttatccttctctctttttatgggagtggggcacagtaccctttgagagtaagttgcaggaattatggcccttttcctctaaaaactatatatttcctaaaatcagtaacattgtttgaaataactggagttagaaaattaacattgatgctgtattacctcatgtgtagatcttattgggttctgcttgtcccagcagtgtcctttatagttaacaagaaaaaaagaaggaaagaaaaacaaaaaagacctacattgtgtgcttcatgcagtggtatgtctccagccttctttaatcttaaagagctctttagtctctttatgcctcataatactgacatatttgaggaggtacaggccaatagtagtgtctcttatttcaagtttgtctgatgttttacatgtgactaatggctctcgtgtcactttatttaaattgcagttggtttttgttggggattgattttttttttcctaccttagagctatttatttttaaatccttgatatttttgtgttgaaacatttccgtaaagttggagacaatcttgttcttatttaatgagctgaatttatatgggtctgttacaatttcaagtatgtgttgcttcagtaggatctttttggtattttgggcaaaaagataaccatattccagaacagttatctttttgatctaactcttgatggacttacaaaatagataatcataatactgaaacctccatcatatgttcctacttagacattactttaaaaagttaccagaggccaggcatggtgactcacgcctgtaatcccagcactttgggaggctgaggtgggaggatcacctgcggtcaggagtttgagaccagcctaaccaacatggaataaccccatctctactaaaaatacaaaaattagccacgtgtggtgacacgcacctataatcccagctactcgggaggctgaggcacaagaatcacttgaacccaggaggcaggggctgcagtgagccaagattgtaccacagcactccagcctagtgacacagtgagactccatctaaaaaaaaaaaaaaaaaagtcaccaggtgtcaaaagacattatttttgagactactaaggtgatgattaaaacattttttaaagtatttaaaaatttttttacttggaatttcttgctattttctgtttgtaagtctggtaagtggtttcttcggtttaccctgaagatttattttattcctctttaggagtagttcctttttcttaggtgtctgttattgtggatttctaaaacaatactttacctcaatttatttcaggatgttcaagatccttcagtatttgtaactttccctttggaagaagatgaaactgtatctttagttgcttggacaaccactccctggactctacctagtaaccttgctgtgtgtgttaatccagaaatgcaatatgtgaaaattaaaggtaagtgggaggctggttacttatgattaatatggataagataattttatattttggaaaatatgaaagcttacctttctttttgcatgaagaatagaattatttgaaaasaatctgacttaattagaaaaataactttaaacwtttgttttcatttctaattgaaaactaacaaaacaattaaaatagtacagagatataaaaartagaacataaaattttcttataatttccagtttatagtacatttttccacaccatgcccctgtgacagatgaagaatctaagattcagcgatgtggcatcacgtcgttactagcaattgataccagaacttgagaactttttgcctttcaaatgtcccctggtagagagttaccagtctcaacgagggcctttccgagatttaaaaagaagattggtactttgtgaacaaatataccttcaggtttggtagttttgtggcggtaaaagaaaaagagaaaaactcattgccatgaaaaaagctatggcacagctgctgtggaaggcagtgacatttcttcaaaaagctgaatgagatgacactatggcccagcaatttcacttctgagtgttttccccaaagaattgaaagcagtcttgaacagttacttgtacacccgtgttcataggagcattattcacagtagtcaaaagatagaagcaacccaagtgtctatcattggataaatgaataaaccaaatagggtatttacgtacagtggaatattattcagcctaaaaaagaaaggaaattctgatacaggctatgccttgaatgaacctggaggacattatgctaattaaaatgagccagtcaccaaaagacagatactacatgattctatttatatgaggtatcgagaagtgaacttcagagagcaaagactagtagaatggtggttgacagaggctgggagggaagggggagttattgtttaatgagtacagagtttcagtataggaaaatgaaaaggtttagggtattgataatggtaatgattacacaacattgtagatgtatttaattctgtgtaagaatggttaccatgatttttaaaaatagttgtattaaaacagtcaacttgattgaacaatagcttgtgttggcaagggaaaaatattgagaaaggaatggggaaagattgggtgccagaaaaaaggtacggagggagttttttatttgttctttcctgggagcaaataggactaagagttgacctactggaaagctgttggccwcaaagaggcctggctcaggtgtctgcagctgcttctctggagcaaggacagtcccatctgcacaatttccctatgtcactggtgggtcactagccattctgtggtgagcttgacaatctcagcagccayctgactgagatctcaaaacacatcacccatctacctgtgtataactcttgtgcttggcagactttgtatctgagctttatcagaaactgtggtccccacttacaatgaagttcctgtgaggtcagagctagggagtggcagccttattcatagcagtttttcaataaattggaaaggcttttacaatgacccatagatactcatttttcttatagtgaactaaatatatgacataggctctagtaaatctcagatgtgtaatatcatagcttatgatgagagtttaaattggcctagattttcagtatcaaagttttaactgttcatacatttgctccagcttttcttttcctaggatgccccaggtatcctccagaaacacttacaataagggtacacagatgcatcaaggacattcatcatgccagtgttcatagtagtgaaaatttgaaagcaatttaagtgtctgtcaacttgttagaaataattcgtacctctataaaatagcgtcccatagagctctttaaaaggatgagaaaagtctgtatgtgctaatacatggaagtatgttgacagtatattaagtgaaaagctacaaaatcagatagaatattacctcaattagaaaaataaaaagaacttacacatttacctatatgtttgtttgtatatacatagaaaaatatccggatccatagacacccaaatgagaatgtctgagagggggtgatatgtggcacttaatttgtgagctactttgtcaatgttatttttaaacattgacatgtttaccttatgaaggaaaaaataaagatttacttaaaatggatatctgagcgataaataataactaccaactgcctaagtgcatttgatgtttttgtcattttcatgtttgggaagcagtataccatagtgttctttgcagtatttctctgtgagtactgggtacagtagaggcacatggtacaggagctcctcaggacaaaagtatgcttgatgcatgtctttggaatcagccaagttcagaatataacccaagtccatgtttttcctttttctcgtagatgttgccagaggacgattactcattttaatggaagccagattgtcagccctctataaattggagagtgactatgagatccttgaaaggtgaatattcaratagttgctctgtgtttgtgtgcatgtgtctgtatgtgtgtctttagttttaaaaagaaataaactttgttatccaaaagcttgcattattcaaatttagttttaagtactaatactatactaagtactttgcagtcacacattacagcatgaatggctagggctaagaagccagtaaaccagaggggagtggtagcttgatgtggctgcagcctcatatttgattttaatctaattgtgagtttgcctttctccttttctagatttcctggtgcctatcttaaaggcaagaagtacaggcccctgtttgactatttcctgaaggtaagcttagggaccgctactgtgggcgctctccacaatctgattatttgatagctggggtgttgtgagaagtggaattgacattacttttatgagtgtacctgaatccagaaagtctgctttagtaccaacaaaattaaattgtttgtgtagctttcttgtcttagaggatttttttttttttttttaaaaacagggtttcctctgtcccccaggctggagtgcagtggcacaatcacagctcactgcaacctcgacctcttgggctcaagtgattcccctgccccatcccgagtagctgggactactggcacacagcaccacaccgggctaagtttttagttttttgtagagacagaatctcgctatgctgcccaggctggtcttgaactcctggaattgcaagcatgagccactgcacctggctgggattttttgttgttgttgtttttgagatggagtgcaaatatcgtgcaatagcgcgatcttggctgactgcaacctctgccccccaggttcaagcaattctcctgcctcagcctcccgagcagctgggattacaggcatgctgtaatttttgtactttttagtagagatggggtttcaccatcttggccaggctggttttgaactcctgaccttgtgagccaccgtgcctggccaagctgggattttttatttgaatatttttctcaaattgtatgaggaatcattttacatttgattggatttttaggtgtatatttttattgcatgtagtctacatatcacccagggtatttattgaggtttttgtttgtttgtttgttttgacaaagttaagatagtaatcacagtaaaacatcatgtggaaaggtaaacacaattttatttcaaggaggttaatgaggcaggtgttttaaatctaggcaccacgacagagctcatacatttagcaccttagtttcttcagagtcataaagttgttttatgtggttttattttctgacagtggagaatccacagctacagttgcaaaccctgctgtccccactcccacactctctcaccgaaagaatagtgtcaaagaggaatttctccgtccttatttaaaggtcttgaaatgagataatgagcagacctggccttatgtggaaataataatcaactggacatatcacttacgtcccatcccagaaaaaaatgttcgctgaaccctcagttgtttctgttccgtgtggggagagtctggttgattaaggagacctctgtggtttgggccctatccatggtgtgtctgttacctgccttttcacttttgtgcctcttgagtgttttcccacatttctcgttgcctacttgatagccttcttcctcctcccacgttgctgcccagtggatttccatatgttctgccctcatcccattcctccctacaggcgttagttatttaccagcaattaggacgtgccctccccagtcggtatgtggcagagctgcttcctgaccacatcctcccacattactttagacatatcctttattcagtcaaactggctcttccctttcctgcttccctgcctttctttaattaagttttcctactgtcttaaaagtctttatttttttcttatgttgatatctgctgagttaactcacccttcaggtctgaactcagatgtcctctgaaagttttctgaaatgcatctttggtttctcccttggaaaaatgtcattacttcattccattctcctatcatatagcttaacatactttgttttatgttgtattttttttattatctgaaatctcttccactggatcagtgactctcacctttctgaatcacaaaacctattgagaacccaaaaactcaaccccctgaaagaatgcacatggatacactagacaggaactttaggttaagtagaggtctgtctggaatatgcacttggtaggtattaagttgaataacacctactcattaaataagcttcttaaactacctgaaaccttcggtgactttaggcaagtactataaatcgtttgacccaggacggaatcatctgatgttcactgaaatatacctgttgtgaaatatcgagggaagctgagtcagcggacactgcctatggagcagcactgctgctcctggtggttggtatctactgacctgggtggaagcagcccagccatggcctgggtaggcccaaagtagaccctgagagacaagatgcagtgactttgtctatactgcttctaagtatagaacatgtaactaagtatacatgtaattctaaggacccatgtattctgtctttctgtttaaactatcgaagttttagcacctatcatactataacttctaaaatgtttcaaggtgatttaggttacaacaattaaaattttatggttatttttcaagtttagttttaagttccaaagaaaccgagtgctgtgatgtaattgaaaataacattgtatttgcaaccagaagacctgttccatgtcctggcttcatcattgctggttgtgtgatttggataagactaagtttaatctttgttctgagcttgctcatctgtgaaatgcaaatacagccagaatatttttaagacatgggactactaatagcttgttcacagaattataggagttaaatgtgaaaatcacttgtgaaagtactttttaccaatgcaaaaaggaaggacatcaaagggccagtttggcagaaacaagggtttgtggaaagaaatgtaaaaagatgaaagtagagtaggtctgttagcattatatgtattaacatgatgatattgctgttgcaaagaaaatgaaattgaacacatttcccctgagtattaaggtggtggagtacctgtaagtagaacttactactcgtggctcccacctgttcctttcaagatttgcctttatgactgaataacttgagctgagttgaaaggagaaagagaagcaaaacatatgcagtgattgaaaatgtaccaggaagtgaacaatttagggagcatgctttctgagactgtatcctaaactgcatagggacaaaaagttgggggagggagaactaatgaaaaacacgtttgtaaccaaggaaattagaaatttttatctgccattctccagataattatttcgtttataagtggtaactttttayttatgggaaaaatgtattgaattagcatgtttcttcccagcctgcattattctttcttttctatttctgaaaataattttaccrgttaaaagcattttcaggttcttaggaaaaactgttacaaagttaacgttgtaacacagtaatgtttcatccctgaagcctgctgtcctttctttccagtgtaaagagaatggcgctttcactgtgcttgttgacaactatgtgaaggaagaagaaggcacaggggttgtccaccaagctccttacttcggtgctgtgagtagcataagtctggcaaatgtatttgagtaygtcggtagccacttttcatagatgcggagtcctgtgtctcatcatgttgggttaccaggttggcctcttttctggctcactgcctgcaagatggcttgtaaaatttgcatctgcaattccctttcatcctaagctgatttctggaaagagtgggccaaatccagtaaactctttttggtgtgcagttccgtgagttttgacaggcatctagagacgtgcaggtgcctcagccaccaagatacagaccattcccatcacctctgctgtgttcttaattaaatgttcagaagggggaatctgacctctcccctcaaaacagtactctacagttaattttatattttgactagaataatttttctaaaaacacattcctttttatgtaatttgtgtatgaataaaaacagaataacataaaggcacatgctttacagtaaaccacctctcaccttaaatcatggcactgccactaacgggcagttcctgggtaagttgcctggcctatctggacttcttttgcctcctctgtagcatggtgtagcatggtgtagcacctacatacacattcctctaggcttgatcgttttgtcagtgagagggattggaaatgtgactttgttctaaaaggcagtggcagtagtctgccctcatctgccattttgctttcatgcttaatctctgggattttttacttttatagatgtagagggtacgggtgcaatttttttacattgatatgttgtatagtagtaaaatctgggcttttagtgtaaccatcacttgaatttttattatggaaatcttgaaacatacacagaagaaaatatgataatagattctttttttcacatcatccagctgcattaactctcaatgttttggcaatctctcgttttcttcctctgtacagtagcacacttttttattttggctggaggatttaaaagcaaatcctcatcctcatgtctttcgtgtctaagtaattctagctgcatctctgactgataaggacttttattttcagtataaatatccaataaagtcagcaattccttaataatcacctaatacctggtccattttgatggaaggaagcattcttgataatactacttaagagttttaggaactagtcaaatattgttcataatcattttagggtcaattaactggtatggttaccccactcttagtagataataaaaaggtaacttcttggttttgaattgtagtgtaggggtttttttttttttttttgagatgggagtctcgctctgtcacccaggctggagtgcagtggcaggatctcggctcactgcaatctccgtctcctgggttcaagcgattctcctgcctcagcctcctgaggttttcttttttaaatgtgggtgtttgtcattaactctagagttatatctcatatatctattctcaatgctgtgcatgttaatgttatagaagattcattctttaaactatagcttttaacaccatttggtaaattttttttttttkttttktttttgttttgttttgtttgagacagagtctccctctgttgcccaggctgtagtgcaatggtgcaatcttggctcacggcaacctctgcctcccaggttcaagcgattctcctgcctcagcctgccaagtagctgggattataggcacctgccaccatgcctggcttattttttgtaaatttagtagagacagggtttcaccatgttggccaggctggtctcaaacttctgacctcaggtgatctgaccgccttggcctcccaaagtgctggggttacaggcgtgagccactgcacccggccttggtaaacattttctgagaggccttcygttgcacttgtcttcaccaggcaagggtagtgtttgatcttcgcagagtctgtgcacttgtgcgtcatcctgttgaacatcactggttctggatgcattcaggaatgctgctcttagcttaatgcactgggtaaagttacttgctccacactcagtggttcaaattgctgcacttaggggcttttcctgtctacccacatgacaccacaccagtcagcctcagcacagggagaggtgaacacagatccaggtggaagcatgtcagctttccagcttgtcttggagtcaacccagagtgtggtttcaccaacataaggcaatctctttaattttatatttaggcatcataacacagtgatgaagactatagactctggagccaggctgtttggttttgaatcctagcattgctgcttcatagctgrgttacttcttggtacctcgactttcctatctgtaaaataggaaatttttggtttttcagatgtgtgtgctgctgttataaatcaaatttgatttagttttaaaacattcctgtgtggctgctctgcttatggagtagccattctttattgctttactttcttaattcctttcacttaaaaaattgatgtatgtcatctrtcttctcatttagtggatactctgctacatatggaggtctgggaaataatatttgagaagactagactgggtgacctaacccctgtccaactgtgagggtctgattctccgaatggtcttgagttamcttcagtttacaggacaaagttgatgaaatgtatatgttacaatatagaacaattatcttgggaatctattacctcatgctcacacccatacatagactgttttattcttccctctcttttgccttttctcaggaggactatcgggtctgtatggactttaacattattcggaaagactcactccctgtttgccctgtggatgcttcaggctgcttcacaacggaggtgacagatttcgcaggacagtatgtgaaggtctgtaatccatatagcatagaagggtgactgttacttctgattagtctctaccatcatttataattgtattgtaattcttctaggaagttgtttttatttggttttgtcatcgcatgaaatccgtaaagacagatgttatcagttacgttcagagggtctcatatctttagaggatgcatgctgaaatttcatggggaaaratcagaaaaactccagttcatgcctcatgaagcacctttgtgaccttggggttgtcatttcagatcgaaaaactttatgaccttaaatgttgtggaatgtacttgaaaattacttaaagttagtgactaaaaataataaataatatttgttatttgtgccttttattcataacaaggtatcagattctagtaatatattgttcctaagtattatagtatgttttaatggctaaattttaattttttttaataggatgctgacaaaagtatcatcaggactttgaaggaacaaggccgacttctggttgccaccaccttcactcacagctaccctttttgctggaggtcagaagaaacaaagactgtgttgtagctagagcttccagtctgtgcttacacttactatatgtgcccattccatcttatttgtggtgttcatctcacttgtatcctttagagttggtttgggaagccaccttcttacttcatttttaggagagttgggttttttgtttgtttttttgttgttgttttgagatagggtctcactctgacgcccaggctggaatgcagtggtgcaatcacagctcactgcaccctccrcctccccggcttaagcaatcctcccacctcagcttctggagtagctggaactatgtaggtggtgccatcacacccggctgatttttgcatttcttatagaaatgaggtttcgccatgttgtccaggctggtctcaaactactgggctcaaataatcctcccaccttgtcctcccaaagtgctgagattacaggcatgagccacagcgcctggtctaggagagttttatgaatggctaaaaatgttgctttcctaaggaactgtgagagaaaaatagacctgtacaaatctgttttgtattgtggccacattttttttaggatgagaagcatctctaaaattttgtaatagagtttattgaaaaatttaatatgattttaacctttaatataagaccatgctgtaaaagtatgggtgaaaatgaaatgttcagttgcatcgtgtttggtttccacattgcctcttctgtgttgaagttgaagttgacattgtttcttagataattgtcactagcagaactatttttttctactcttgttcttgtattagtttttgcctttcttactattgtggaaagatatgaccaattttgaagtcttagatgtttttatctataataaaaatgaatattagcagaaggccaagtaagtgatgatgctgtcaataagacatgaaaagtcagtcttaccgtagtgcctactagtctcagcctgagcagctatgtgtgtgtttctgcttccccagatcagacactcctctaatttacaaagcagtgcccagctggtttgtgcgagtggagaacatggtggaccagctcctaaggaacaatgacctgtgctactggtgagcagtaagatgtgtttcttcatmgtgtcttttgtcatgtggttagtaagtatggtttacacttcccccaagttataattttaataacccatcttttattgggtattgtaatagctatcttttcttctgtgtgtttaggagcacaaaataattcaaataatgttacagaacagaagtaacatccttcttgtgataaagtatgtaagggagtatttttctttttaaactcattggaaatgataaaccaccatttattcgatttagggaatgaaatgaccttggaaaaatatggctgtactgccagagtttgctagccttcaataatagtcattttcagagtaaacattattttcagatatacctgcaaaagccatttgtacttactcttgttggtcctgcagtggatgatgtaccctgtgcttggctgtatggataagctccaagcacagaagcctttgctttccatagctgatatgtgtcctgcaggtgatagcccaagaagtatcatttcagcctctgggtacaaaatgaaacaaggcttgaacctgtgtatttcagatgaatgtttttcactacaagtttgaaaagtaatcaccactcttaacttctcacaaggacccaactagactctagaaaactgtatctgagtttaggagaatggggagaatctcagggcagcaaaggaaatagttataaactgtagctttctaatatttcttagcagagtggtcctgatttctcaaaagacagcttttcatttttagagctagtaagctaattagttcccctaatgtgtaagatactagatatagaatattagtaagatagcctcgagggggtgcaggcatataaactgatctttgaagtacagggcagtaactgcagtgcccaagagaagaaggggaggtctggtagcctaccctgactcagccttgtgcttgaaaaggatttctgcaaagctgaacctcaaggaataaagagtactgggagtgggagggatgcaagaggatggatgcagargggagggaagctgcgtgtcagagggcaggcaggctgcgtgtcagagggcaggcatgggcaaagccagttaagtgagaaggattctagggaacttgcctcattgccagagcctgaaattcaagaccaaggatgaccagagaggtgactatagagagggctgctagagcagctaccaatcccctggcctgttggcctttgcttaatgagttcagaaaaactgctatggtgaggataatgtgaagactagagttgtatgggatgaggctggctaaagctaaggtgactggttagaggtatgtggcagctgtactccagttgaagaggaggacatgggaggcctgtgtgctgtggggtaatctattggatgtaggtcattgatggcagcacaaactgttgtgtgtgctatgctgtccatttagaagacattctctttgcagtgagcgccacgtttccrgagtgtttggtccacaaagcrttatacaaaggctcctgtgggtattatttacatgttgaatttttccatatttttatgtgattggttatgtgatctgtttattgcagggtcccagagttggtacgagaaaaacgatttggaaattggctgaaagatgcacgtgactggacaatttccagaaacagatactggggcacccccatcccactgtgggtcagcgatgactttgaggaggtgaggcatggcagtatttccttgtgttgatttttgctaaagcattttgttcatgaaatctgaatgtggtttaaaagaatagggtgtttttttctttgcccctttcttatttcatcttttttcctctttattcctttctagaatcatgacataagataatctgtttctggggtttttaactttttttccttgaattaaatacaatttataaaactttcctctgtaaaaataaaaggatacagttttctcagggaaatacacactttaaatgttttttttgtgtgtttccccgatgtcttttcttccccctacattaaggtatactattagcttatggttaaactgactttatagatgatgaaaaaagaaaacttgaaaagaaatttaccaaagcattacagacctttaacttctaaaatcaaatgaataagaggatgtgtgtagatatatagatgtatgtggatatactatgtcctcacttaatgtcatacagaggttcttgataactgactttaggccgggtgtgatggctcccacatgtaatcgcagcacttagggaggccaaggcaggaggatcgcttgagaccagatatttgagaccagcctaggcaacataatgaggttccatctctacaaaaatgtttgttaaattagacaggcatggtggtgcacgccacttagttccagctactgggacctctcaatgacatcaggcgaggacttactatacagatagatctgtgtgtttggccttctgtccaaagctgacagcattgttgcagtgatgagcggcagcaccctggggaccttggtgaatctcccatagggacctgaaaggcaacagtgaagtagctgaatcagaagacttttcaggactgaacaggaagggcagagaaagaggccaccagtgttcactaggatcagaagctccctgggtgagaacgcacagcagttcctactggtgtggcccttgtcagatgatccctccattctgagtgccccagctagccccatctctcagctctttacctggatataatcctagcatcctgtggctttgtctgattgctttaatcgggtccaagcataatatagtcatgcaccacataatgtcattcagtcaatgacagaccgcatatacgacagtggtcccacaagattatgataccatatggttactgtgccttttctgtgttttgtaatgtttagaaactcaaatacttcctgttttagtctgtttagtgtagctacaaaggaatacctgaggctggataatttataaagaaaagtagtttatttggcttatgattctgcatgactggaaagttgaagactagacatctgcatgtggggaggacctcaggctacatccacttatgatggaaggctggacaggagccagagtatgcagaaatcacatggcaagagaagaaacgggcggtggggtgggggcaggctcttttcaacagtcagctctcacaggagctaatagagagagaactaactcactgcagaaggagagcattggtctcttcacgagggatccaccctgtgacccagatgcctcccatcgggctccatctgtcaatactgccacactggggattaaatttcaacttgagatttgctggggacaaaccatatgaaaactagagcatttaccattgtgttacagttgcctgcagaattcagtacagccacatgctgtacaggtttgtagcttagaagtaataggctccaccatatagcctagctgtgttttaggccatcccatctaggtctgtgatgtttgcctaaggaaatcaccctaacaatgcatttctcagaatgtattcccaccattaagcactgtatgactataatttagctctagctttttcttgggaagattctagattaatgagccagattcaggtgccaggaggaaactaaaatgccttagagaaataatctaagatgtttcacttatgccagttactttgacaatttgcacataataaacccttaatatccattgagagtatggctatgaatgtttaagattctctctaggtagggactccctctgatactggggtggaaacagaggagcagtggcaaccctggcctcttcagagactaagagtaggctgtgtctttcatgagagagaagccacattagcaaatactatccttcggcccagattggtgtgttaatgtgcctttaaatcatcagtctcaggctgggtggctcacgcctgtaatcgcagcactttgggaggctgagggtggctgatagctcgagtccaagagtttgagaccagcctgggcagcatggcgaaaccctgtctttactaaaaatacaaaaaattagctgggtgaggtggtgcctgcctrtagccccaggtacttgggaggcttaggtgagaggatcacctgagcccaggaagctgaggctgcagtgagctgtgattgtgccactgcactccagcctgggcaatggtagtgagaccctatctcaaaaaaaaaggaaaaagaaaatcatcagtctctcaaagtaaacatgcatgctatataaattaactcagtatgctctgtttggctctaaggagctcctgctattgaactttgtttttgacaggtggtatgcattgggtcagtggcggaacttgaagaactgtcaggagcaaagatctcagatctccacagagagaggtcagtttctaaatgttcgattcacttcagttttacgattctcctattaagacctggtctctagcagattacagagccacacatggaagtgactagcttgctgaattactttgctgatgactcatgtcatattgcagtattgtggcctctgtccttgtgaaatgtgaggtgaatggtgcataacctttcagatggaggattcatggtgctctctgaaagcctttgagaattgctgatatttctgtttgcaaatgtgtataatatcttgtcagggttttgtgtttcctattagcaattaaactgcaagttctgttatgcttacagtyaatagaaatgactacttttctgtttgttagtgttgaccacctgaccattccttcacgctgtgggaagggatccttgcaccgcatctctgaagtgtttgactgttggtttgagagtggcagcatgccctatgctcaggttcattacccgtttgaaaacaagagggagtttgaggatgcttttcctgcagatttcattgccgagggcatcgaccaaaccagaggatggtatgcctccttgttctttcatcacgtgttttattgattttattttatttagggagtattttactaagtcactgccatttatctactgggtgatggagagattgtggcaaataagacaggctacattcctgccctctcccctccaccaccaagcacggacattaaagtgccttttgagtaggactctcccactacaatagggctgtagttttacaatttcaatgatctcactggcattttggaatatatgtgttacactggatgttaaaatgataaaaaaagttatgtgttcttagcttacgtcagatcatttactcaaatgtttgagtatttgcataaaagacagtagtttgggtgctagaaatttgagggatagttggtaatgtgctcagatattgaggctagccttataaatcaacattctaaaaaaatccagatttttaaaaaatatacatatgagagaggatttgggcattgatttttatctggtgccttatgtaaaacagttccttaattggaagaaggtgaattactttctttccatggattggctttgctggcccaggctttatttacttttttttttttttttgagacagaatcttgcactctgctgcccaggctggagtgcaggggtgtgatctcggctcactgcacccttcgcctcctgggttcaagcaattcttctgcctcaccctcctaagtagctgggtctacaggcatgcaccaccatgcccagctaatttttgtagttttagtagagactgggtttcaccatgttggccaggctggtctcgaactcctgacctcaagtgacccacccgtctcagcctcccaaagtgctgggattacaggcgtgagccattgcgcccagcccaggttttaattatacattcacagtaatgtttctgcaggggtgtgttaaaggaattgttggtgtcattttctctctttgacagctttgggtaatcattgaattcaagtcttcatgttctggaatgtgctgtcttcagattccagtcctttttgtctataggaacagctacccagcacaaattctgtttttagaaaggggtagatgccttaccaatgagcttgttcctttgaggagtagcaaagtctgttagctggtaacagtcctcatgtggatcccgtgtccttggtgcctgcctccttctccattcctgaggcctgggctacctctcctgggcaccagggctcctcccaactctcctttagaagtgggagggatatctggatcagtgtttatgttaactatggggtctggtctcctcagctcatgtcccttgatgttctcagagtgcaggactaggtaagagaggcaggaaagcatcacccccaggacagtggtcagggatatgagttcatttgggaaacaagctaggtagcacataaatgaggtacataacattttacagaataaaagcattttctagtctgccttatcacttttgggtgagagtgcattttgcatcttttgtcatcaaattgtcttttccatatgatcttgtgccaaattcaaaacccatccttcatcttcagctaggtgcttctgggtggtcctgagaggccacccagtgctgccatgtggctctccacacagacttcctgggagctctggtaacagagaaatggtcagtaaatcattccagacgtttatttcaatgcttctttcaaatcttagacagtaatttgattggtctccagtaaccaggattaagaatcattgctttaagtgattctcaagaagtgtgacttatcaaaaatagaaattcaatgaataaatacagtttctttcttatgcttggacttcatttctatttttattgaactgtttggggttttttttcaggttttataccctgctggtgctggccacggccctctttggacaaccgcctttcaagaacgtaattgtgaatgggcttgtcctggcaaggtaggtcaactttgttgtagtgacgggtggractttgtctccactgtttcttaagaaggagtgcgtgagagcggtcaactttgttgtagtgacaggtggagctttgtctccactgtttctcaagaaggagtgtgtgacagctaagcctgatggargaggaggaaggggaggactttcagattgtgctactrctagtaacataatgctactagtgatattactagtaataaaatagcatttactaaacttagcactttatgaaatacttttgcttatagatcttatttaatctgtacatcagtcctttcatgtagattttgttgtcctttttttaacacacgaggaagctgtgggttctagagaccacaggtgcccaggatcaaagctagtgacagccacactgggctygaccgaggtactctgccaccagatcccattcttcccctcatctgaaacttcctcccaatgggcattatttcccacattttgctattataaggaagtctcatttttcctttactttattacctctagtcattaagaataaaaataaacataaatgaaaattttaaaatgaaatattttaaaatagaatttgtgctgagtacccacacagaaatcctactttatatgctgtgtgaggaggaagaggatgtcacctaacattttgtgcatccttattttttgccaggccccactgtgtgcattttcacattttaactcatttaatccccagaaccatttgagatgggtcctataatccctttgtgacctttgaggaatctgagggacaggaaaaagtgacttgccaaaggacacacagcaaatgagtggtaaatgcaaattttgaacccaggcagtctgcctctgtagtatgtgtactactttttttttttttttaattgaaaattttattgagggctgggtgctatggctcatgcttgtaatcccagccatttgggaggccatggtgggcggatctcctgaggtcaggagttggagaccagcctggccaacttgataaaacccccgtctctactaaaaatacaaaattagtgggtgcagtggcacacacctgtaaccccagctacctgggaggctgaggcacaagaatcgcttgaacctgggaggcagaggttggagtgagccaagatcatgccactgcactccagcctgggtaatagagtgaggctccatctcaaaaaaaaaaagggggaaattgtattgagatcattgtagatttgcatgcaattgtgaaaaataatagagatcccttaaattctttgcccagtttcccccagtggtcacattttgcaaaactacagtatatatcacaaccaggatattgatatagcccactaatcgtattcagatttctctagttttacatatacttatttgcttatacgcatttacctgtatacrgctatcgtgtgtaggatcctgtatccagcagcacagtcaggttactgaatgaattcaacatcaaaggctcccttcctgcattgccttcccctcctgccttcccactgtcatccccaatccctggcaaccactggttttttctccatctctgtaattttgtcgtttccagaatgttatataaatagaattatacagtaactaacttgggggaattggctttttttttcttttttttgagacagagtctcactctatcacccaggctggagtgtagtggcgtgatctcggctcactgcagcctccacctcctgggctcaagcgattctcccatctcagcctcccgagtagctgggaccacaggcatgaaccaccacacccagctaatattttgtatttttggtagagacagggtttcaccatgttgacaggctggtctcgagctcctgagctcaggcgatccacctgcctcggcctcccaaagtgctagtattacaggcatgagccaccgcacccagctggctttttttaaatccacataattccattgagattttagatgactgcacctaccaatagttccttcctttccatggataaatagcattctgtattatgggtatgccatggtttgtttgatcatccacctcttgaaggacatctgggttgcttctaacatttggcaattgtgaataaagctgttgtgaacaattgataataggtttttatgataatgtaagttttcatttctttgggatatattctgacacatctttcttcttcagtctaccctgaagcttcctcatggacttagtatgatattcaaaaagaagtttgcaaatattaacaaaatatcttaccattgtaccttaacactgtttgtttcttttttgagacagagtcttgctctgctgcccaggctagagtgtagtggcgcgatcttggctcacttcaatctctgcctctcaggttcaggcaattctcctgcctcagcctccccagtagtggggattacaagtgtgcgcccccacgcccagctaatttttgtatttttagtagaaacaggtttcaccattttggccaggctggtcttgaactcctgacctcaggtgatctgcctgcctcagcctcccaaagtgctgggattacaggagtgagccaccgcgcccggcctattagcactaacttctayctaagttactccttcccatttcattttgtatattcctgtttgcaaatgatttgtatccttaaaacaagatcatctgtgatattgacttacttaattggcatctcccttttgttttacaagtgatggccaaaaaatgagcaaacggaaaaagaattatccagatccagtttccatcatccagaagtatggtgctgatgccctcaggtacaaaccagtgctttgccttgtgtgtatctattgtttttttatgtaagcatctcctatactattaatcagtattcttagatttggtttatagttaggtttttagcaacatatctctgttatttggatgttatgttggtatggttgttgattttaaacccccaaaatagttttctaaataataaaggcatttttaaacctagaggtctgtttgaggaagaggacctgtgttgggtgttgttgagctgtccaagtcctccccaggctagatgctgattgcctctgccttacttcctttctaggttccctgtcttgttggtattagaattctctttcatcatttgttttaattttgtacttacagagccatgtgagatatatctatgctagaggtgataaaaaaactcatattgaaaagcttttggagaaatttgagccactgcttgaggtagctgtaatcatgaaaccacacagtgttcaagttgaaagggacctagagatcttgttcagcatccctgtgtcctaggcatgagaccagtgcccaggcctgtgactcagcaccttcacacagtacctctgttgaccaggagccattagtggggctctcccccaattctccactgtctcttagactcacccttggcactgctgcccatttgggctgtgtaattctttgtggtggtagttctttgtaggatgtttagcagcatccctaacctctgcccaccagatgtcaagactctgctctgtgaaggctcttccttgtgagtccctctctctgcaagcagcagatgcaggtcgtgtccgtgggaaggacacagtggctcttgacgaggaccaggccagcctttctcttagtgctggtgtaccccattggtcctgcagtgagagtggcataagatgcatttctgtgctatacagtgccatattttggtgtcagattatatacgtcttttataatttgctaagtctcttatagaaagtgagagtgagttttgtgagttttaaattgaccactcaaagagtattcatarttacccccttttgtagaaaataggactgattttcatcttgctctctcaatatgtcgagtagtaataattggtttactgtctaagtaccttttctgtctaatttttctccctcttccagattatatctgattaactcccctgtggtgagagcagaaaacctccgctttaaagaagagggtgtgcgggacgtccttaaggatgtactgctcccatggtacaatgcctatcgcttcttaatccagaacgttctgaggctccagaaggtatgggctgtagggggctgcacatgtacctgccgtgtctccacagcgctcccttcaccaagctgtgaggtggagctctgtgtgagactttagggctgctgttctctgctgcctgatgctggggtaacttagagccatggggaggccatacatgcaggtgcggaaggtatctagggtccgggctatgccaagaccatgggccctagcctgcaaaagagttaygtcatatagttgtttagtcgccagttgttgtttttktttttgaggtggagtctcagtcttgtcacccagactggattgcaatagcacgatctcggctcactgtaacctctgcctcctgggttgaggcactgcctcagcctccccagtagctgggattacaggcacccaccaccatgcctggctaattgttttatatttttagtggagacttggtttcatcatgttggtcaggctgatcttgaactccagacctcaggtgatccgcccttcttggcctcccaaaagtgctgggattacaggcatgagccacggcacccagcttcgtcagccagttcttggtaccaggaacaccatgttgagtgagacacccctccccttatggaaccaatggagtgggaattgggagatacagtaaagagtcagcaacttttagagagagcacccagtgaaggcggagtcacaggcaagctagggctggccacttgagatgggtggtcagagaaggcccctcagtggggtggcatttgggctaatctgagagtgacagcagttctcgatggagttttcagtgggttgttagggtcacatataatagttgtgatgtatgtggaagtgtacttcaatggcagttacctccacgcccaggagttactttctcacctgagaagcccttgctctagagccaccttccatgccccacaactgaccattgtcagcgtccatcaccttcattgaacatgttcctgtatgggctttcaagacctgatttggggtcagagttccgatactgcacatctgatctccagcaccttacaagtaaaattgcttgtaagtaaataactgttgaatgaaaatgagatattattcctgcttgagcagwtgaaaaagctggttggaaaaatgaactcttgttatcccactccagcaggcaggtcaattacttctgctccccttgggctctggttgttctgctaatgaggacacatcatgttcacctgaggctctcagagtagcctttccccaggaattgagaagggcagtcatcttccccaggctcccagcattcctcctctctgcagcctgccacctgtcctgcatgtggttctctgccaagtagggcaaacagtccttgggcaggtgcactctgcaggtctccactggtgtgggactcaggaatacaggcggggtcaaagctccccacagccagggcccatctgaatataccagcaagacacagactccatgatcagggccttaaacacagaggaagagtcacattatcactgccccgctagcctggttgtggtgctgccagagaaacaaagcaggacatgagttctgtttgtagagcaaggacttaagatcaaggaggattttgcaaagcaaaaagagtgggatagaactttctgggtaaaatgaacagccttagcatggaaattatttcccagtactcattttcagtttgtggacaatcattcaatcctagacagttctactgtccttccttcctgaggtttaaagtaactaaaccctayacttttctgacaagattttagaatatctttcaattcataattactctttggtgcagagaagtaatgttttcctaaactctcttcagtttactcaaaaacataataaattaattgaggacttaatgtgccacgttggtgcttatcttgaaaatattgctgaaaatcagaaattcacattgccagtagggtctgggattttttctttttgtttttgtttaagtgatttaagaagtttatttcctcatagtaactttcttcccaagtgtgccagtgtttcattaattgttccttcctaggaggaagaaatagaatttctctacaatgagaacayggttagagaaagccccaacattacagaccggtggatcctgtccttcatgcagtctctcattggcttctttgagactgaaatggcaggtgagtctctcttggtctgtcctcccaggaataaggactattctctttgtaactgcccttttgatatttaatagtggaaatattgagagatacagaaaattaaataattgtttccttttacctctcatatagttttgttaaggcttgttaattgtcgtgatatctttgtttcaagaccctggggacttctggcctggtgtggtggctcacgcctgtaatccccagcattttgggagaccaaggcaggcaggtcaccttaggtcaggagttcgagaccagcctggccaacatggcgaaaccctgtctctactaaaaatatatttaaaaaaaaaaaaaaagttagctggccatggaggcgggcgcctgtaatcccagctattcaggagactgaggcaggagaattgcttgaacctgggaggcggaggctgcagtgagttgagattgcaccactgcctgggcaataagagcgaaactccatcttaaaaaaaaaaaaaaagccctggggaattctgtctttagggggtgtcctcgtggtctcaatgctccacagaagagctttagagctggatagccatgggttcagagcccaactctaccacttgttcccaatccagagagttgcctgaagtctgaccgtcaatttccttttttttttttatgggtacatagtagatgtatatatttatggggtacaggagatatttttatataggcatacagtgtgtaatagtcatatcagggtaaatgggatatccatcacctcaagcatttatcatatctttgtgttgcaaacatctcggttataccctttttcttgtttttaaatgtacaagaaattattgttgactgaaatcaccccattgtgccatcagatgccactcttattcagcctatcttgaccttcagtttctttatctgcagaatgcccagtagtgtttgtaaggcttaagtagagacgatttacataaagtagctggcagatgataggtactcaataaataatacttgttattaatgcatttataacttatttttagttctattttcattactaaatagtccccttcttttccagaaaaattagaaaagtcagaagagcaataatgaaatggacattttgctgttatttctattaactaacaacagtgagttcgttgggtaattttacagagattcaaaaagtacattatgttggcttccttaaggtttgagataatcacaactgtaggtccaggtgagaaatctgggacacctcagacagtcagttaaagtgggtggacagaggccctgggtcacagtgagggcaaaagagggcaaggcaaatccaccctcacagggctctgcggttcctgctgctgttgggcaggagcagcrgccgccacagacctgggattcaccattagcctagatacgggcacatgctgctccctggagtaggcgctgctgccccatttagcacagaaggactgctacaggatttgtccaccttgttaaacatgtagaaggatcacgacagtccagctgttgctcagatagacacagatgaagatggaagtgagtgtgaggctgagtgctgccctggcgagggcagcactgggagcccagcacactccccagacatgctcacacctgtgtctgcttttccctcctgagtgatacaagtgggtgggaaacgtggggattgttgcccggacccccttcaatatttgggcaccagctgccatgacctcctgtgaagctgggtctggagatgygcattctggctggagcctggtctgcctggaaactggagatcggcagccacgttttgtgggccgtgtttaagtcccggttctgccggcctgtcagcttcatgtcctccactccctcaggagcactgtgggtatgagaggacctgcctcacagggtggtggtggcctgggtagtggctgctgctgctgcccctgtgtgttgtatgtttatccattgtatgtggagttctatttgggttcatttactccctcagagttgaaaccagaacatagaaaacctgagcttcctggaaggtaaaaagtgccgtgaaccctagaaatcatttagacaggtctcagttactgaaatcacatgtctaagaaagtgtgaccagctaacgactctggcctggggctcagcccactgacatcygagttctggtctttgtgaaaagcagcagagagcagctctgccggttgcaacttctcgtctcttagcttagaccagaagcctcattaacagtccctggactcttttcattattataaattgtatttgtttctaagtatcggtcttattctttttgttttttgtgtttgtttttatgtaacaaagagtattaattaaatgggaggtgaatgagaatccttaaaataagccttgcctcagacaattggctaaacaccctttctttcctacttgatctctgagtttctcagggaactcttcaaatcctcctaattcctcaagaccttcactacctctgatgctgtttttactcgactgttttaatgtttagaaggccagttctattttattcatagcctgtgccagagtttcttaactgcagcactatgggcagtttgggccaggtcatcctctgtggtggggctgtgctgtgctttataactgagcagcatctctgggtctacccattagattccagtagcaccgtgctaccctccaagttgtgacaagcaaaatgtttctccaaacgttgacaaatgtttcccatrggataaaattgcttttgtttgagaatcactggcctatgctgtgcctcttagcatctgaattgtgctttttgtcttttagttgaagtacagtgtaatacaatggaaagaagttgggcattgttgatgctgtcaaattgcacagctccgtgtaaatggcacttcctacagttgtgtagtgggcagtcttggactttgatccacacatactggagtttttggcttttctcactgaccaatgggaattcgcatgtggctcacatggtgatttttttgtgtgcacccctaaacactctgactgccatgtagcacatcctcaacaaacagtcattatgtgattgattcattttggttcttttctccttagtaagtggaggcacttggatggaaggagctgccccttctttgttgtatccaaccctctccccaccccagatgcctggtaacccacttgctgcctgattgactkgtcttacttttagcttataggctttatactgtggtgcctcgcctggtcaagtttgtagatattctgaccaattggtatgttagaatgaaccgcagaagattaaaggtaagtgcagactgctgttgggaaaagcaaaaagtgtatgaagtttgaaagtagaagaaatatgagaatagccagaagggagaggaacattttcagttgctctccgtttttgaagctttgtttttcttttccttttacattgcattttaactatatttgtcatttgagggatagggatctataagttctaaaagtcattttgcattattttcacaacacaattatgtacatgtcatattggagggagaatgtcaaggcacaaacaggactacactgagcagacctcttaaaattcaaaataaaatcatgcaaatattttataaaaatactggtagatatggcattaatattgagaggggtacttccttctaccacaagggagtcagatattatttactgtggacagaactcctctgtagctgttgggggtttaggatgagcagagcataggtcctggtctcaggacttaagccaggtacataaataacaatgatgcttaatagagagagcgaggtctctttactgcaggcccaatgaaggctcccactacccattagtcatgtctttttttttttttttttttttttttttttttttgagaaggagtttcactcttgtcacccaggctggagtgcagtggcatgatcttggctcactacaacctttgcctcccaggttcaagcagttctccctcaacctccccagtagctgggattacaagtgtgcaccaccacgcctggccaatttttgtatttttggcagagacagggtttcaccacgttggccaggctggtctcaaactcctgacctcaggtgatccactggcctcagcctctcaaagcagtggtgttacaggtgtgaaccaccgtgcctggccagtcatgtcttaaaaggcattaataataaaagcctgcaacacaactgtaatttcatttttgtgcagatgtatctcacacacacgtatctagaaggacatatgctaagatgcttacagtagttgtctctggataaattaattatgattgtaggaaaaacaaagataatgaaaaaatttcaatgaattggtattttttttaatacacattatatacttttttaacataaatcttatttaaaggtactttaaagtttttggttagcaactgtttttgtctgttgtgggtagatccattctaccttcagccttcgggtcctacagttaggctctacttccctgtcagctcgcctcaggtggggatagtcagtgggacagcaggtgcacatcctggccaggcctcctgcactgccctgaagggccaccctggtggcactgaccgtggatggcctgtggtcgtggccctttctcctttctctgtctcrtgtcttgtctgtatgctgcatgttctttgaagattgcctctttttaataaacttatttttttaatgataaacacttatttaacagtttaatgtttatgtttcctttttactcattagggtgaaaatgggatggaggattgtgtcatggccctagaaaccttgtttagtgttctgctttctctttgcagacttatggtaagatgattggcttctttctagtaccctttggcctatgggctgccttcagcacctacttgctgcagcatcctccatttatatccattctgtattattctgccaaaaatagatatagaagttttataacaccttatagctctagttccttatcagaaatcttgttagcttatacatgttaagtaaggactaagaaatactagattctttcttacastctctggcagtacaatatatgtcagggcccttggctctagaatgaggatctacagttcaaagtaagacatacctcatcttaatgtggattgccataattgtgagtaatgggggaggttcttcagctaatacctgtctgagtaaatatatatatatcacaaaaaatactttaacttagcattgagaggaaaacgtgcaagtaattgtttgatatatgttcttatcagttcagatattagttaaataatataaaagtggaacggctccaactttaattctttttatcctgtttcctttactccatatgttataaggctcctatttattccttaaccgaaggaaaatctgctttgtacaaggtgctgtgcctggtgctctccatgcctgatctcatcacctccatcctgtgaagcagggggtattttccccagtttacagatgaggtttctgaggtgtgggacagtcagtcttctgtgcatattgacttggctgatacatcattaggtgctcctgtttctattttagacatccttcagaattctagaggtgctttgggtttttctatctacagtcctgcagctatgcttcagggatatgaggccatttctcattcacagggcatgttttgtaacctcatgctcattttggtgcctattactgtgtcattctctaacatgtttagttgtttctcagtataaatgagatcagttgttgatgactgcatataactgacatgatgtcctgtgtcttcatacaggctccctacacaccttttctcactgaattgatgtaccagaatctaaaggtgctgattgaccctgtttctgttcaggacaaggacacactcagcattcactacctcatgctgccccgtgttcggtaggactcaaatagaaataagcctcacctgtgccaaggaggggagagttgctcaagcatgtggggaagaggagggatttccctgctccagctccatctgtgccttgcctcccgccccagctgacatgaactcctcaggctgcaggatggggcccactttggtacacggtagcaaggatgcttggtgtggaacccctttgtagagctgtggcaggtggggtgtgggcatgccccatgggggctccttggggagatgccgggtgctgagtggtaggcactgcgctgcccttccccagtgcttcaccaggagggcctagccacacttctctagcctgaccctcttcctcgcttatgcatgcctagtgccttcaattttctcctcttaaatctaaactctttcatattcctacctctaccactcagagaagaattgattgacaagaaaacagagagtgcagtatctcagatgcagtctgtgattgaacttggaagagtgatcagagaccgaaaaactattcccataaaggtttgaaattttacttctattttacatggcacagacctaaattaattaagtgtttggaatgcttttttaatatagagagcttccaccaatggcctttttccttttctgcagtgagggtgtgaatgacttagtactagtccagcctgactagagcttgagattcaaataaacatttaatattccatttttctgcagttttagaggactggctgctgagtgaactttcccctcccttttcctcctagtatcctttgaaagaaattgtggttatccatcaagatccagaagctcttaaagatatcaagtctttggagaagtatatcattgaggtaaggtagatgatttgtctgtttttggtacagatagacttagaacattattttgatgaataatcctcaaartacatattgactctataatttatttttattagtatagtcataacaaatgtaataatccatattttacactgtgcttggaatcaacataaatttgttgtaattcttttaaaaatatttcaagatcaatgaatttctttacctatcatctatcatcttcattcacttccctgaagttctgttcttttctgtcctgtcctttccttttccttttcccttactttacttttctttcttttctttcgacagagtctctcactctgtcatccaggctagagtgcagtagtgccttaccacaacctccacctcctgggttcaagcgattctcctgtctcagcctcccgagtagctgggattacaggcacccgccaccatgcccagctaacttttgtatttttagtagagaatggggtttcatcatgttggccaggttggtctcaaactcctgacctcaagtgatctgcccgccttggcctcccaaagtgctgggattacaggcatgagccactgtgcctggccttctgaagtactttttgataactaccaaagaaactttgttcctccaaattatgcaagtgacaagtaccctcgcatgtaaaaagtcgaagcaatagcatagggagcctctctccaccccatttctccctggagtctcacttcctggctgcttcataatttatttaattactgtcccgttgtttgacatttaggtttctgattacaaacaaaagctttgtgtgtacatatatgcatatatcagtgtatggatattggatagattccagaagtggagttttggggtcaaagtttatagtgtcagttgtcttcctaaacatttttattccatgatattttaaaacatctttattccatgatgttttaaaaacgcatatgttttacctcatcttctttgtgatgatagaaaacaaatattttttaaaatttcattgtttattcttttcacaggtgatatttaaaatcattattatagaaaatgttaatttctatatttggttttcagttgcttgaaagttgcagagaaatattagaaaccaaaagttagattttaaattctgacattagtacctgtggctatgcataaaatagaaattttttttttttttttttttttttttgtgacagggtctcgctctgtcacccaggctggagtgcagtgatgtgatcttggctcactacagcctccatctcctgggctcgggcaatcctcccacctcagcctcccaagtggcggagattaggcatagtagtacaggcttttgtagagatggggtttygccatgttgcccgggctggtctctaactcctgagctcaagtgatcctcccacctcgatctcccgaagtgctaagattacaagtttgcgccaccacacccagctgaaaaattttgaaattaactacttcacttaaaatgagattaattaatgtagctaaatataatggcaaaactaaacattccgtattatttgcttcaagctgttctcattttcccatccgctactgtgccatcaccatccctgccgcatcagtaatcctcagtagcatgactgaagcatgaagtgttctgtttaactgatcttctgcttagttaatagttaaccttgtggtactctgcaattgcttgcacaaaggttacctctgagggatgaggtttatatttctgggtctggagtcctttttctgttatgctcaactgtcttgatagatcttcataacaagcattttcttcttaccatacaaatcactggtttttaagcatatttatagaatggtacaactatcaccatagttttagaacattttcctcgtcccagaaagaaagccagtattcattarcattcacaaaccattttcccctcaatatctgaccatttcctggcatccacgaacctatttgctatctctggatttgccttctctggacatttcatataagtggaatcatacaatttgtaatctttatgtctggcgtgtttcacctagcataatgtttcacattaatttatgttgtagcacatatgagtgcttcagtccttcatattgccaaatactctattgcatgtgtatgctgcattttgtttatccattcacagttgatggacacttgaagtgttcttgctttctggcagttaggaataatgctgctgtggacctacatttttgtgtgaacatatgttttcatttctcatttttgtttcctcttgtgcattaactgtaggaactcaatgttcgaaaagttacactgtctacagataaaaacaagtatggcattcggctaagggcagaaccagatcacatggtcctggggaagcgtctgaagggagcctttaaggcagtgatgacgtccatcaagcagttgagcagtgaggagctggagcagttccagaagactggtaggtgtctacacagacaagggcaccatttatgtcctgagtctgagggatactttttaggctactgtttgacttttaatatcacatcctttcctttcctgtcctgtcgtgtcccgtcgtgtcctgtcctttcctttcctttccttactctcttctcttttctctcttctctcttctcttttcttgacagaatctcgctctgtcatccatcctggagcacagtggcgcgatcttggctcactgcaacctctgcctcccaggttcaagtgattctcctgcctcagcctcccaagtagctgggattacaggcacgtagtaccatgcctggctaatttttgtatttttggtagaaacagggtttcaccatgttggccaggctggtctctaactcctgacctcaggtgatccacccgccttcggtcccccaaattgctgggattacaggtgtgtgccactgcaccggtccatccttttcttaagtaaaactttttttcctgttgataaaaatgtttattataaataattcttacagtttagaaagaaaatagctgggcacagaggctcacatctgtaatcccagcggctcacatctgtaatcccagcattttgggaggcccagttggatagatcacttgagatcactacaggcacatactaccacacttagccagatgtggtggtatgtgcctgccatcccagttactctggaggctgaggtgggaggatccctggagcctagggtgattttgtccttactttcatggtgcttgctgacattgaagatttgggaaaataattatggttttgataagtgttataaagggaaggtgtagggtaacataaaaacatgtgggggtacctaaccaaatgatgggattaggaaagggaaatcagccccatcttgctacccctatacagagcatttcagggtgcccagaaatttgcagctctgccatgattagaatcatacatggtctgagtgtggctgtctgacatcctgtaactatcctggggcacaagctgtttattgttacggcttcctctgaagttgaaaatcataagctaggagatgtcttgagaagagagatttgaggattcataaatcagatgggggaactgtccctaagattctccaaatatttagatagaattaataaaacataagacatcagcagctaaacctcaagttattactaattactaatcaactcaaaatattaaaataacaaagtgttacgagccttyaagccacaaatctaaattgttcrccagatagccaaagcatcaaaaattcctgagatggctgggggtggtgactcatgcctgtaatcccagcactttgggaggccgaggcgggcagatcacgaaatcaggagattgagactgtcctggctaacacggtgaaaccccgtctctgctaaaaacacacacacacacacaaaattagccaggtgtggtggcaggcgcctgtagttccagctactcaggagactgaggccggggaatggcgtgaacccaggaggcagagcttgcagtgagccgagatcctgccactgcactgcagcctgggtgacaaagcaagactctgtctcaaaaaaaaaaaaaaaattcctgggctaaaccttatttgaaattgaaagcctagtttctgagcgtactgttctgcactgatggaaaacaagrtcatcttcagaacacagagacaaagtaaacataaaaatgacacccgggtgctcagagcccaagaaggtcatcatcagtgacaacagtgggcctccctatcagcgggggtgttaacatcagcagctgttcacatttctgcctcccctgaacaggcatgatgctcagtactacacactgcccgtctcattttagcctcaccacaccttgctcagcaggtagcagaacaccatgtcatacaaccagcaaatagtggacctaagttcactttctctttaaagactgtattttcttcatgacatcctgctgctctgtgtttatggtgagcatttgttgcctcttggtgccttcccttagctttgtcatgtctttggacctgagagtttatataaaacagtagatactggtgatgacttaactgtcttcaaggtagcatagtgtaatctaaagaaagtttgtcatgtcttggctacaaccatgacatgagtcagagggaaatgatctcttgaagcctctgtggctttgttattgtgaaattttaatcaagaaggggcataatacacgggtagtggggcagcttgaagaggaggggaagctgattaacagtgtagctgcttctccatagggaccattgttgtggaaggccatgaattgcacgatgaagacatccgcctcatgtacacctttgatcaggccacaggtgggactgcgcaatttgaagcacactcagatgctcaggtatttttctgtttcctagaacatttctttaccaagagatgagagcataagaggagaaagtatttgcctgtgcctttcctgataatgttgacagcttgtctcagggtaaaataaaccagttacttggtttagattggctttattaaactaatatattattatgcccttaacatatgcatttgtttagtgaatacataagtaagcrttttgtgatttctacatgtcagtcattgtcccaagtgtggggttgcacaaaaatgaacccttcaaggaatgagtcagtcaaggacacctgaaattaagccagttcttagtattctacctgataagttatctggtagaaataagtacacagagggctcctatccaaaaataggtgtagggtgaaaagtggtcagggaacactcttttcaagagaatatacaaactgttttagattccaggatcaatattttttgccatattggagaagagactatctctttgcagtcctgaccagacatccccagtcagcatagttgtaagatctcgcatgtgggtttggggatattgcaggggtccctctgtgcttagcataccatgtgcaggggaaggtagagcagcacctccatgaaaggaaggtcgacctcctcagtcctttacccaggcgcttaagttagatgtgtacagaactctacgtgggaagacagtggcaaggagtcggaggtatcgtagctgggaaagaaggcagggaggaggtttctaaacactgacagtgggcagttcttcctcattacagcagatgttaggggcctgaaaagttgtccaccttacaaaagtgtcatgtgatgcttstgagtttcttgacatggcttacatgttgtagtggccctgcactgactggaattttgagtttatcatgcatttcactacctctgatgcctttatgaagtgagtcatttcttaacttctctrtttactcaaaggtaaatgagatgatgcctaatgtacaagtcttttgtagagtatattttactctgcaacatgctgtgtaacagaagcgatagtgtcattattgctacatcataatcagcaaccttcagaatagatgagatagaaacattaaccttagcaaaaatatggcagtttaagtcacagaaagttttgtggtccattgtagaatttgtcttgagtcgttctgacaaacctgaagatcacaggggtcatggtataggaaagtcacttggagttgactgcgctgaggccgttgatccacttgttgtggcctgaaaagctgtgctgctccaagggcttcatgattattgatcttacttattagaagagttgatattacttcttagatggccaaaaagcagagtcatgtgagggactctgataagaggtggtcccagggcatctcctgtgagcagcaccctacaaaaaaacaagaaacaaaaacctgcacacctttctccagagacagaggactagctgattatgaagaagtacctgaatgataaactagattaattttattgcttttgctcatttgtgtgaaaaaatagtgctgcattatagactctccagatttaaataacattttgctgagttgggaagaagtgtttctccttatttgattgtcatggtgtgcactgttcattcccacaggctttggtcctcttagatgtcactcctgaccagtcaatggtagatgaaggaatggckcgggaagtcatcaatcgcatacagaaacttcgcaaaaaggttagtttgtcagttaagaataagctactgttttggctttttgtttgttttggttgtttggagaagataggagaggcaggtaatataaaccatagtgatcaatgcataacaatcactaatccatagtccatttggaatgtattctgcagaaaagtcactcctcttcctctccccacgtgttcactcccargtcrtagctttcagccagcctgtgccttttcccatccttttttttagctccgttgggcttctacagaatatcccctgtgactggagcagaaggtaatcagagctgatagtgtctttgcagaagggcagaggtgcagtcagcatagacaggcttctagcttaggggagattcccggatttggacagagttgggtagtttttccttattagagagctgaggaatatgcagggagctcatcctggagcgcagaggggctgcaaagcccctgctagtgagagaatcaggaatttcttgccctgtagagggcagtgacagctaacatacatctttcttcccagacggttcaaggtctgaggaggctgttccagcagatgagtgggtgcttgtgacctctgaatcagttcagagctttgtaagtgggttctaagtaatttcttggtttcaacattcatgaggtactgattgttctaggaaaagaaacatgccctatcccccaaagagtggtgaaaaagacacaaagttaatcatgtactgagtgcagttagtcttacggatcacccagcagggagggaagggtgactgcccttctgtgatgattcagcatgggatctgtagcccttgttcaacagtaccttccttcagttctgattaatagaatgtacttcccttttaaatttttctgtgtgtgttttcagtgcaatctggttccaactgatgaaatcacagtgtactataaagcaaagtctgaaggaacatatctgaatagtgttattgaaagccacacagagttcatatttaccaccataaaggctcccttgaaaccatatccartttctccatcggataaagtccttattcaagaaaaaacacaggtgagtcctgagttscactgaactactactaaagggtttcagattaggtttgactttgtgtactcacgtgttgatattctgtcccacagtagagatcggcacagcactctgtcttgaagtattgctctggacagtagtgggtagagtcagagagtggaagctcagaaaagatggagcagggagggaagatggaactgttttcacaacagttctcttgaggaaggtagccaggagggtacatgagctttgcccggaaataaaatggcctgttttttctaaaactagaaaaggcagtgtgtggattctggtaattatcattaaaagtaaatagcaattggcttgaaaaacatttaactcttctggtagtgggttctccataaaagtacagtacaaaaaaagaaagattacaatagcatttctgttgttacatctaggaattttagatatacttatgaaagtatgatattaaggtagggaagatattggcttataacttagaagtagatcatttagactgggcacagtggctcacacctgtaatcccagcactttgggaggccaaggcgagcagatcgcttgaggtcaagagtgcgagaccagcctgggctggtgaaaccccatctctactaaaaatacgaaaattagctgggcatggtggtacacgcctgtaatcccagctactcgggaggctgaggcagaagaatcgcttgaacacaggaggtggaggttgcagtgagccgagattgcatcactgcactcgatcctgggcgacagagcaagaccctgtctcaaaaaaaaaaagttgatcatttaaaatatacctcagtcacttgcttaatcatttgctccggtctcattctatgagacaagtaggacaagacaaggaggggctgatgatggctgtttattttttcagtgaggcgagttgcagtgtagtttcattttgtattttgcatattgtgtaattatttgactttttttaagtgagcatatatttttaagaaaccaggataagaagagaagaaaaatgggatataaattgtagcttttgatactttgagtaatgagattgaatatgttatcaattgtgtacagctcttgttgttactgagaagtcactgtgttacacgatggtgtggcacattgcagtcaggtgccacagttactcagtcatacgttctcatgtgctcagttgaagggatctgaactggaaattacactcaccagaggatcttcccttcctggtcctgcttgtgcatatgtcaatcttaacatttgtgcaaatggcagtgaacaaggtaagagtaaattccatgatttgtgtgacttttttttagttatacttatggatgtgaaaaaacaaccaaaaaaacttatggatgtttttaagagaattggaataattatttaatcatgtttaatagataactttttcttcttgtcatcaaaatgaattcactaggcgagatgcagtggatcattcctgaaatctaccacttttggaagccaaggtgagaggattgcttgaggccaagagttcaagactaaccttgccaacataataagatcctgcctcaattaaaaaaaaaaaaagggccaggcatggtagctcacacctgtaatcccagcactttggaaggcggaggctggtggattacttgaggtcaggagttcaagacctgataaacatggtgaaaccctgtctctactaaaaataccaaaattagccaggcatggtggcaggtacctataatcccagctactcaggaggctgaggcatgagaatttcttgaacccgggaggtggaggttgcagtgagctgagattgcaccattgcactccagcctgggtgacaaagcaagactgtctcaccaaaaaaaaaaagaaaagaaaaatgaatccactaaagtaaatgattggacttatgcttgtggaagcatgaagcagatacagttttccctattcctcctgctaaatacatctaaacaccctggatattacatgtaaaaacaagcataagaagactctcaaagatgtaaggaagaaagcagaccacctaaggaccttgtaaccaagtgacctaaaagtagtaagttcagggttttcttttctgcctcgtatacccaaagttggaactgaagaagctggcaacctggaaatgtcaagtacagaccaaagaaagcctcaacaaaaattctgctcccttgacaaaggatcaagagatgggcagcctagcaagacagaaaattttgaaacagtaactgctctactctagccagacaccatagaaaaaactatggccccaccaccacccacattagcaaaggccaagtggggagcctggacttcacccttgccaagctgaagacccctcccctgtcacaggggtatcagagaagacaaagtaggaagctgggactttcatcctagtggggggcagtaatgagcccctctgcccggtggcatcagtggaggccacatggaaagcctagatttccatcccttctgggcagtaacaaggcatccctcccatttacaaatgcatggcagcagtgaggccacacaccacgagcaactcctctgtagtgtcagttaaggtatgcgtgaaacccaaacaggataaacccaaaagaatccacatctacatatatcataatcaaacttttgaaaaccaaagacaaaaaaagtcttgtgtgcagtgaaaaagatataacacctaacttacaggggaagaacaaatgatattggatttttcatcaggaactacagaggccagaaaatgaaaaggcagcatttttcaagtgctgaaagataagtattgtctaccaagaattccatatcaatcagaaatacccttcaggatgatgggaaaataaagacattctcaagtgaaagaraactaaaagaatccgttcccagcagaccagtcctaaaagagtagctaaaggatgttcttaccacagaaaggaaataatgaaagagggaatccagaaacatcaggaaggaaaaaagaaaaatggaaaatcaaaatggagggtaattcaatagactttcattactctcatgggtccagcaagcactatatcattgttcgatgtggttctctgtgtatatacactaaggcctcaacatcatcagtgagttcttgggtcctgcaactttaagtgaagtgatgtactgtgtgccatgggaacttaactcctgtggtaaagttggtttattatatagtacatcattctgcttgaagtcacagtttccaagaacctaccagcaacattaaggatttactgaacaagaaataatagttaagacaattacaaaggagcraggtttctacatttgtcacaaaccggtaaaatattgacaccagtggaccttaggaagttatgtttatgttaggtactacttggagttaccactaagaaaagactataccacaggatacatataaaaccctagaaaaataaaaaatggaactctaaaatatgttttaagtaactgtattagtccatttttcattgctataaaggaatacctgaggctggctagtttataaagaaggtttatttggctcacagctctgcaggctgtatgagaagcacggcacaagcatctgcttctgttgagggcctcaagaagcttttactctgctttacagaagatgaagtgggagcaagtgtatcacatgatgaagagagggagcaagatagaagccaggctcttttaaataaccagctatcgcatgaacgaacagagtgagaactcactcattactgcaacaagggtaccaagccattcatgagggatcggcaccagtgacccaaacacctcccactaagccccactttcccacattgaggatcacatttcaacatgagagttggaggagacaaatatccaaactatatcagtaacccacaagaagctaggagagaaaatcagaacaaatatgccaggcacagtggctcacgcctgtaatcccaacactggaaggccaaggcaggcggatcacctgaggtcaagagttcaagaccagcctggccaacataatgaaaccccacctctactaaaaatacaaaaattagccaggcttggtggcgggcgcctatagtcccagctactcaggaggctgagacaggagaatcgcttgaacccgggaggcggaggttgcagtgagccaagatcacgctcctatactctatactgggtgacagagcgagactctgtctcaaaaaaacaagcagaacaaatgaaagattggcatattgttaaaaacacattagccaagtatatgctgtctataacaaacttctaatataatgatacaggtgagttgaaagtaaaagggtagaaaaatatatactatgcaaacattaatcaaaagaagcaggaatggtcatgtttgtattagatgaaacagacttcagagcaaagaaaattaccaggggcattaaataatgatagaagtgtcagtacacaaagaaaacagtgatcctaaatttatatgcgtctaacaaaagagttacaaaatacaygaaataaaaagatacagacattaaaggagaaatagacaaatctacaactatagttggagacttcaaagtacctttttcagtaatcaatagaccagttagaacacctcagccaaaaatagcagaatataaattatttttgagctctcacagaactttgctgagatacattataacctgggccataaaacaaacctcaaccaattaatacagttgaaaccagagtgtgctctctgaccacagtagaatcaaactattaattagtaatataataatgaaaatctccacactcttaaaaataaacaacatgcttttaaattatccatgattagggaagaagtctcaagagggaaagaaacatagaactgagtgtaaaggaaaatacgacatcaaaatatgtggaatgtggctaaagcagtcctgagacggaaatctgttgcactaaaaactgaaagaaagatggtttcaagtcataacctaaggtctaaactcaagaaactagataggaaaaaaaggcagaataaatgcaaagtaagaagaaggaaaaacataaaaataagagatcagtgcaattgaaaacaaaaacgatagagaaaattaatgatacagaaatctggttcttacccaaaaattcagcaaaattaataaacctctagtgagactaataaagaaaaagaagacacagttgcatatcaggaataaaaagaattattgatacagattgccaaaatcaaaaacgcaaatactatgaataaatctccatatgtaagtttgacaacttggatgcttgtcgcccaggctggacagtgcagtgatgccaactcagctcactgcaacctccacctcctgggttcaagtgattctcatgcctcagcctcccgagtagctgggattccaggtgtgccacaccacgcctgatgaatttttgtatttttttgtagagacggggtttcaccctgttggccagtctggtctcaaactcctggcctcaagtggtctggccttctttggcctcccaaaatgctgggattacaggtttgagccactgttcctggcctgaagtgaaccctgtttctaaaaaacacaaactactacaactcacacaatatcaaacagataattttaatggccctataattattaaggagatgaatttgtaatttaaaatctctgaactaatctccaggcccagtttcactggagaattcttaccagaattaacaccagttgtacacagactcttccagaaaatagaagaggaaggaacatttcactcattttatgtggttattaacctgctaccaaaaccagataaagacagtattaacaaaaaagataggctgggcacggtggcttatgcctgtaatctcagcactttgggaggccaaggcgggtgggtcacctgaggtcaggagttggagaccagcctggccaacatggtgaaacaccatctctactaaaaatacaaaaattagccaagcctggtggcgggcgcctgtaatctcagcctactcgggaggctgaggcaggagaattgctgtaacctgggaggcagaggttgcagtgagctgagatcgtgccattgcactccagcccaggccgacaacagcgagactctgtctcaaaaaagaaaaaaaaaagatagaaaacagatattccacatgaatataaatgtaaaattcttcccaataaattattaaatagaattcagctatgtatacaaagaattatgcaccatcaccaagtgggatttattccagggatgcaaggctgattcaatatttaaaaatcaatctagtccaggcgaggtgggtcacgcctgtaatcccagcactttgggaggctgaggcgggtggatcacaaggtcaggagttcaagaccagcctgaccaacatggtgaaaccctgtctctactaaaaatacaaaaattagccgggcatggtggcgcgtgcctgtaatcccagctactcaggagagtaggattattgaggcaggagaattgcttgaacctgggaggcagaggttgcagtgagccaagatcgcaccactgtgctccagcctgggcgacagagggagactccatctcaaaaaaaaaaaaaaaaaaaaaatcaatgtaattatcgtattgtcagactaaaagattacatgagtatagcagttgattcataaaaagcatttgatcaaattcaacacccattcatgatgaaaatcctcacaaaaataggaagagatgagacctttgtggactggataatgagcattttgcaaaaatcctacagctaccattatacctaatggggaaagcctgaattctttctacctaaaatcaggaacaaggcaatcacaactcatattcgacattgtactggaagttctagccagtggaccacggcatgacgaggaaataaaagtcatgcagataaagaaaggaataaagctgactctatagaaaatcataaggaacatacatacaaacacctgaaaaaataagccaggcttggtggctcacgcctgtaatcccactttgggagctaaggcaggcagatcacctgaggtcaggagttcaagaccagcccggccaacatggtgaaaccctgtcgaaaaaatataaagaattaggtgtgatggcggtcacctgtactcccagctactcaggaggctgaggcaggagaatcacttgaacctgggaagcggaggttgcagtgagccgagatcgcgccattgtactgtagtttgggcaacaagaacgaactccrtctcaaaaaaaaaaaaaaagctcatattgcctggttttaagatgtggcctgggatcaccatattgatcttcccatgccagctgctcccatgatggttgtgtgtttatttagacctgtgatgatgtctcagacagtacatggttccctgaactgctttgcaacttcagtgatgttgtatggcattgagctggtccatcactgccaacatcctggctgtctcaggttaccctgtagaaggaatcggatggtcagtggtgtgcatcagtaatgtaaacaagaacagtgttcttgtacagagggccagcagcatgagcagtgataagacaggtagggcctattttcccatctaccaactccaggactggccattcctgggtcagttgaccagacacctggaaagaagagctctcaactccaagattattttcttagtaatrgctttaaatgcagccacagcttggtcgtctgccttaatatgatttgatatgttttgcaatttactgtcctgctgaaagcattcatattatgagggaaaaaaccatacaaatcatcgctaaatctgttatttttaaatgtttggcctttttctataccctttggattcaagcattaattgggtttccaaagtaattgaatagaaatcatattgcttataaaaaagaaaaaaacttttgagtcacaggatgtaagataaacatacaaaaatgaattttatttcataatagcaatctatactagcaatgaacaagtgggcaatgaaattaaaaatgtggtatcatttacagtcacttaaaaaaagatgctaggycaggcgtggtggttcacgcatgtattcccagcattttgggaggcttaggcaggaggattactttagcctgggagttcgagaccagcctcggcaacaaagtgagaccccgtctctacaagaaataaaaaactaggcaagtgtggtggtgttcgcctttagtcccagctacttgggaggctgaggttggaggattgcttgagcctgggagatggaggctgcagtgagccatgatcatgccactatactccagcctgggccacacagtgagaccttgtctccaaaaaaatattcagatgtaaacctaataaaacatgttgggacttgtatactgaaaacttcaaaatagtgatgaaaaaaatcagacaaaatctaagtaagtggagagacgtgtatggattagaagattcaatatagtaaaaatgtmtcttctatcctgctgtggtttgagtgtgtcctccaaaactcaggttaaaatgtcattgccattgtgacagcatcrtgaattagttaattacttcacaagagttatgataattcttacccagtccaatggtgtgatcttaacatcagaaacctgtacttgtcagagtcctttccattgcatctcctcaaagatgaaacactttagattcactgttgcttacaatagttttcaggaaagtgccagagtaaaacaattaactatcgttggatgacaagactttaaatggccatggttaaatatctaatgagagttcattatactaatgttgcaattgacaaggaagtttagttatttctgtggtatacagcattttaaggtaactagaattatgactgataacattagaccaggctatcagatttctaagaatttcacacaatttctggaacacattatttgtacaagttaaagaaggttaaacaacatttcttatttgacagcgcttcccatgcagatctaacgtagtcaaataagtctaacttgtttactgtttctcttcataatgaaagaaaattctcttgagatatttcagggggcctctgaaagctcccaaagttagcttgaggtcagaaagacttaagtttagagtttgattttgggaagctagtaaaaaatatcaaaggcttaaaacacttgattaataggattgcaggtcactgaagctacagtcactcatttaaccagagtgataattaaaaatatcaaaggcaaatatagaaagtcacaaagttataaaaagacctgagcagttttaatagagaggactctgtttctctgttttcttttctgtagagacagtgtctcactacactgcccagtctggtcttgaactcctggactcaagcaatcctcctacctcagcctcccaaagtgctggtattattaaggcttattaatttgataatttataaataaattcattcagaacttacccaggttgaccacacataaaattccttttccaagattcctcttccacaaacctactacaactttctcatacccttctgttttggattaaattcttcctcttactgtgaaacaagtcattctactataaggcaaaagttagtctttttctcttaacgaacacacatccttcatacttcatagcttcaccttaccaaaaccatgtcttttcctcacatacagaatcatttctcttattctagttataactgtcacatcagcattctatagattggcaaatctatgaatcaaatttgtagaaacatatgcttccttgtagtataatttatgttccactattaatgcttcagtattttatttggaaaatatctacatatccaatgaatattcatcatttaaattaacaaaacccctaggctgtaaattaccagtggggagctatttttgagtagacataacacaaacaaagctagctatcattaagttatttctctgttagctacttttacagcatgtgcatgttcggcagtcttcacaaaaacaagaatcctaaaaagtttaatagatgagattttttgtttttttgctgcactcgaaaaacgtgaagtaatggatactggcacccacttgcacattgttcataggttgaactcatagttgtataattataaatatgtagtggaggtaacataaacttatttgataataaatcctggtaggatttaaaagttgtatatctgcattatatattcttacccaagtcacatgaacttgaaaagcatgtgtgttggtttctatattgctgagagaatacttaatttatgtgaaatgcttatttttctttamatcaattaaatagaaatcttttatgaattaatttttgaccataccatctggaggtagaaaaacatctcatggctgggtgcggtggctcacgcctgtaatcctagcccttttggaggccgatgcaggcagatcacctgaggtcaggagttcaagaccagcctgactaacatggagaaactccatctctactaaaaaaaaaaaaaaaacaaatacaaaattagctgggcatggtggcacatgtctgtaatcccagctactcgagaggctgaagtaggagaatcacttgaacccgggaagtggaggttgctgtgagccaagatcatgccattgcactccagcctgggcaacaagagcaaaactccgtctcaaaaaaaaaaaaaaaagaaaaaaataacacatatacgtaacatacctacatgcacaggcatgtataagcatacagataagcagatttcttagctttcatttgaaaactgtagccatgtgctaggtactataatataaaacacactagtttatgaaacaatagctggatcaaaagtatattcccagcagatggaataaattaaggttacttacttaggtggccaaagtgctctactagtatttttggaaaagtcttaagatttttcatttaaacattaaacaaagagttttaaagccttgacacaaaacactgtccttaaaagggaaaagtgatatattgaactaaatgaaaatttaggttttgctttgaacatcctataaaaggatgaaagacaagctacagactgggagaaaatctttataaaacaacatatttgacaaaagacatatctagaatacgtaaagatcttttaaatctcaacagtaaagaaaaatccagttagaaaatggggtagagatatgaacagacatttaccaaagggaatatacaaatgacagaaatgtccatgacaacatttaacgtcattagcygttaggaaaattcaagttgaaatcacattgaggtcttaatacacagctatcacaatgactaaaattgcaagtagtgacagcaccaaatgctgtatctcatacattgctggtgagaatatagaatggtatgatcactctggaaaatagttcggcagtatcagaaaactaaatatgtgctttctataatgactcgcagttgcactcctaggtgtttatcccagagaactgaaaactatgttcaccaccacatgaatgtatatagtacttatattcataatagcaccaaactatagatgacccagatattcttcagcagataaatggctaagcaaactggggtacatatcatagaacattacacagtaataaaaaggaacaactatcagcacagtaacttattttaatccttagaaattgatgccaactgaggccaggcacagttgctcatgcctgtaatcccagcactttgggaagccgaggcaggcagatcacctgaggtcaggagtttgagaccagcctggccaacatggtgaaaccccgtctctactgaaaaaatacaaaaattagccaggcgtggttgtgggtgcttgtaatcccagctacttgggaggttgaaacaggagaatctcttgaatccaggaggcagaggttgcggtgagccgaaatcgcactactgcattctagcctgagcgacaaagctaaactccatctcaaaaaaaaaaagaaaagaaaagaaattgttgccaaataaaaaaagtcccaaaaggttccatactgtatgattgcattcacataacatgttttaaatgataagattatagaaatggagactgtttgccagggattaaggagggaatgggcctgggagggaattgggtatggatattaaaaggcaacacgaggattctcatggtggcagaactactctgtatcttaatgatggtgatgggtacaggattttacacgagtgataaaattgcatagaactaaacatacccacgtgtacacatgccccagtgagtaaaagtaaaactgaggcaatctgaataggatcagtggattgcatcagtgtcaatatgctggttgtggtatacactgtagttttgtaaaatgtcaccattaggggaaactgggtaaggggcctgtggtatctcactacgtgcatttggctctacaattaactcaaaatgttcaaatatattaataaagtaaatatccgtacatgaatctaaggtgcagaataaatcaacatcaggggtcagatagtatttttaaccatcgtgacctgtgggaatatacatatggcacaaaatgaaaaatgacaatcataaataagaatcatgaatacaaaggtttaaatctagaaaaagacaagaacagattgcctggtagagttctatgcctggaccatagctaccaaggattgccaaaacacatgccaaggatggagatgtgtgtgtgtgtgtgtgtgtgtgtgtgtgtagtgtatatattgcatatacactatatatgtatatatatgtatatatatccatccttggtatgcttttatatgtatataataagctatatatacacatatatatagtgtatagttgggggaaaaggaaaaawattagggcttgaacccctttgtatcccttttcctccaaatgtaacattttctttttagttttatttgtctgattgaggtgttatttttgtggctttttaggtggagtattgctcctggaaaatccaaaaggtgacaataggttggaccttttaaagctgaagagtgttgtcactagcatttttggtgtgaaaaatacagagctggctgtcttccatgatgaaacaggtatgtggaaagtgagaggagcctacgtcctttgactcaagatggattggtgaaggtcttaatttgctgtcagttgtactatacaacttttgcatttttcctaactctcttgagtcagggcccaactcttcagcagtgcctgcctgcagtgtctattcatgcctcctcattgtgtcatgtgactgaaaaccctgggcttaatggatctaatctttccctctcacctgttagctagctggtggacttcaggcttcagagtcctctgttgtgaggttgtttttgtttttgagacagggtctcactctgtcacccatgctggagtacagtgatgcagtcatggctcactgcaccctcggcctcctgggctcaagtaatcctcctgccttgacctcccaagtaactgggactacaggcatgccaccaccatgcttggctaattttatttaatttttttggagagaccaagtcagtatattgcccagtctggtsttgaacccagggccttaagcagtccccctgccttggcctcccaaagtgccgagattccaggtgtgagctaccacacccaaccgtgagttttaactttattaaacacaatgcctggatctcactaagtctggattctcaataaagcaaacctgaaaaatttttaaagaattatagatgcattctcccgctgttacgtattgaattgtgacctctgaaaaaaaaaagattatgtcctaaccccttgtatctctaaatgtgacctgtggaaataggattatcgcagatgtaactagttaggatgaggtcatactggagtagcgtgggcccctaatccagtatgactgttgtcattataagaaggtggccatcgggctggtctccagctcctaaccgccagtgatccgccagccttggcctcctgaggtgccgggattgcagacggagtctcgttcactcagtgctcaatggtgcccaggctggagtgcagtggcgtgatctcagctcgctacaacctccatctcccagccgcctgccttggcctcccaaagtgccgagattgcagcctctgcccggccgccaccccgtctgggaagtgaggagcatctctgcctggctgccaatcgtctgggatgtgaggagcccctctgcctggctgcccagtctggaaagtgaggagcgtctctgcccggccgccatcccatctaggaagtgaggagcgcctcttcccggccgccatcccatctaggaagtgaggagcgtctctgcccggccgcccatcrtctgagatgtggggagcgcctctgccctgctgcctcgtccaggatgtgaggagcgtctctgcccggccgccccgtctgagaagtgaggagaccctctgcctggcaaccgccccgtctgagaagtgaggagcccctccgcccggcagccgccccgtctgagaagtgaggagcccctccgcctggccagccgccccgtccgggaggtgaggggcgcctctgcccrgctgcccctactgggaagtgaggagcctctctgcctggccagccgccccgtccgggagggaggtgggggggtcagccccccgcccggccagccgccctgtccgggaggtgaggggcgcctctgcccggccgcccctactgggaagtgaggagcacctctgcccggccaccaccccgtctgggaggtgtacccaacagctcattgagaacgggccatgatgacaatggcggttttgtggaatagaaaggggggaaaggtggggaaaagattgagaaatcggatggttgccgtgtctgtgtagaaagaggtagacatgggagacttttcattttgttctgtactaagaaaaattcttctgccttgggatcctgttgatctgtgaccttacccccaaccctgtgctctctgaaacatgtgctgtgtccactcagggttgaatggattaagggcggtgcaagatgtgctttgttaaacagttgcttgaaggcagcatgctcgttaagagtcatcaccactccctaatctcaagtacccagggacacaaacactgcggaaggccgcagggtcctctgcctaggaaaaccagagacctttgttcacttgtttatctgctgaccttccctccactattgtcctgtgaccctgccaaatccccctctgcgagaaacacccaagaatgatcaataaaaaaaaaaaaaaaaagaaggtggccatgtgaagacatagaaacacacggagaaaatgccatgtggtgacaaaggcagagattggagttacacacagctgcaagccaagaaacaaccaagattgccgggagcctccagaagctaggaagaggcaaaaaagrattcgcctacaggtttcagagggagcacatctgccaacactttaattttggacttctgacctccagaactttgagacagtacatttcttttatttttattccctagccccctgcagtttatgggactttactatggcagcctcagaaaactaatactcattttatgaatctgaatgctcattttcagaaacttttaaataacttaaaagaagaaatgcaaatggccaactaaggaacaactggtgcatcttaatggtaatcaggaacttgcaagatagtaccacagtgaggtactattaactgccaccagattggcaaaaactagaagaatctggcagactcaaatgttgtcagggatattgcataatgggaactctcattcactgctggattatgaattgttggaaccactggaaaactgtttgctattgtatccattaaaggttggataggagaagcaaaagcaatgtgggagaaaccaagtaaaattctacaagaaggtagcaagttagaggtctgagaaaaatctctaaccaggttccaccaaggtggtggataagtcagtggaaagctggatctctgcctaaagtcacggtaggatgagaagtagaaacgagcaaaaacaggctagagtgcacatctatctgacctcatcccacactgacaggtgccttgcagaagaaacygctggtacacttttccagagagttgcacacattcctggcctggaagttggaagagcagaggcaggagcgtgggctgctcactgtcccacttaacccaacaagttggcagattcacagcaacctgagaaagccaagggcacgggccccatgttagcctgtttagcataatgactgttactaaacttctaccttctaaatcctgtgtagatttgtctgtgatcaagccattacccagaaccaggtcagacagagaacctgggaaatagttttagcttagctgcattgacacaggatgaaaccaccatagttcaccccattgtgatcttgacatctatacatggctctttaaatcatatgtaacttccaaataaagaccctagtagattaaaaaaaaaaaaaaaaatcacacttttaactctttcttgtactgcttcaaagatgctaacttcattacccaaaacgagatagaaagttaccttatccttctttgggtgatgttgatttctcttctagytgagccatacatccctcttttgctgttctttaacttcactgaggtataaggttaacccgttaaaatatttcatgttatatggtaaggaaataagagagtggaaaaataagaattggctaatatatattaatacataatgccacacttcatttgctgaaaaatgagttctctggtcaagcgatgctatgtggaatgctgtgttggtaaataagacattctctacctccatggatggtgggtttgccagaagcattataggtgacagtggcaaatccttgtccaaaaggagtgtgtgttccagtaagaccaaagcactrccttttcccataatggaaacagtgcagtacaaccaagctgccatcaggagtctggcttgtctttcctggcaataacactgtatcgaaagctcaagtaatggttcccgctgttggtaggtgggatacgcagtagcagctgtagcaaaatcagccttagggagtggaagtaatgttgtggagcccgtggttattcttcctcccagtctgggtggcccctttgttcatcaatccattgggcaagggcaggagtggctggcggcagaatagaacatgtccactgattattattatttattttttattttttattttttgagacagggtctcactcgatcactcaggctggagtgcagtggctcaatcatagttcagtgtaacctcaaacttctgggctcaagcaatcctcccacctcagcctccaaagtaactaggagtacagacacatgccaccatgcctggctaattcttttcttttttgtagagaggaggtcttgctgtattgcccaggctcagtctcctggcctcaagcagtcctcccctttctgcctcccagagtgataggattacaggtgtgagccactgtgcccagcctcacccatttttagatcctcattcatagtctgcccatttgtagagatctgtccacatacctcttgccctaacttccttgtcaccagttttctaattctgttctttgagtccctggctgttctcgtttagtccagctattggccagtgtccatgaatcagtgtagatctactcctagctatttctgctgagcaaaatgaccagccggctgcactgaaagaagctgtgcccattgggaggatttccacccatcactattcttcagggctacccagagtcagaacagggccgttaagactgtaattgtctactttggatgatacagcgtattgtgcagtaaagccctacacagcaagccctaaaatgttttctttctctgccagccagtcctggaagacttcctacaaggccacacctgtggttgagagaagagaccatgtgggcctaggctgagcatgagcatctagccactggtgcagcagtttccttgttccctgagccagtgccccagcctagtctcatacctaccatttccactcaatatttggaggctgccctgtgggcctgtcctatatcacaaccattaccagtcatctgcctgcgcatgcatccccaagcaacgtttaatgttctctaaatgaaattacactgcatatgttctgtgtatcatgctttttttcacatctgctcctgagtcaaataacatcttctgactgtaattagcactttttaatgtaagtttttcatggtgaagcttgagattctgatataggaggaaattttaagaggagctgtattatacagagaaartactaaaatagagaaaacaattagccctatatttcagattatgaatattatgatgtttgttttgcaacattgagatttcctaccattacatgtcattaaaggctggttttatagaaaaggcaatgtctcttgataaacagaaattaagtggaaagcattatcgtaaaaagatacatgatagttaaataggaaaaattgaatgacttcagttttgaatttgttcgttaaccctgaaagaattgttgttgttatttttagaaatacaaaaccaaactgacttactgagtcttagtggaaaaacactttgtgtgactgcaggatcggctccctctctgatcaacagttctagtactcttctttgtcagtatatcaacctacagctcctgaatgcaragccacaaggtatgtgcctccccacagcaggcagactgtggggtgctgggcattgaagttgtctttaatattcaaatatgtgtgtatttctagtcggcttcaaagtatygctttaaagtrtgggctctcacgcaactttggggagcaaccacaggcttttcttttggtgtgttatagagaccctcatccatctggcatggttaggaaatgaaaaaattggttaggtaaaaattacaactaaattgtttgagtgccaaaacattttaatctcaaattttactttcttttctgaggaaaaatgttctgaaaacttctatacctccatgccttaatcaacagactagattgatagtgatttttttcctgatattttaggatcctcattgtgcacatttgtactgaagtcttcgggctcctcacttcactgtgtactgagtatctgctccccaagctgctgggcttttatataagttttttttttttctttttccccytccccttcacctctatgaaatgttgagagctgtttctgcatggactgcatcttcagcggtcacactcacgctcctggacgcactgctggcctcagcactgcctgttagagctgtccgcagtggccacctcttttggagctagagggtgaactctcgagatttaatccagtttgttctgtcttccacagagtgtttaatggggacagtgggcactctcctgcttgaaaacccacttgggcagaatggactcacccaccaaggtcttctgtatgaagcagccaaggtgtttggccttcggagcaggaagctaaagctgtttctgaatgagacccaaacgcagggtaaggagattgtggaccgtaagttttttatttttgttgaaagtagattttgatgccattaaccatttgtagcatatacatgtaagatagtactattgttatcctgttttgttattctttccccagaaatttaccataatataattttcttttcyttttttttttttttttttttttttgagactgagtctcactttgtctcccaggctggagtgcagtggcacgatcttggcttactgcaacctccgcctcctgggttcaggcctggggcttcaacccaggaacaaggattctcctgcctcagacttccgagtagctgggactacgggcgcctgccaccatggctggctcatttttggattttagtagagacggggtttcaccatgttggccaggctggtctcaaactcctgacctcaggtgatccgcccacctcggcctcccaaagtgctgggattacaggcgtgagccgtgatgcccggtcaataatataattttttaatagcaattaaaagtataattactttttgctaaatctaaaaactacattggtatgttattaaaaatacatgcttctaggtaaatcagcatatttgctgaccctaaaattgttctttcccccaaaagtcaaaattatcacagggttgtaaartagcctgacattacagccttacagctgacattatacctccctttacagtttataaaacatgcttacctgcattttttccttgagacacgtaacactgtgaagagctagatcatcagttgacatattccacattctattatctagaaaatagaaattaaggatggcgacctgcacttacttgctggtgtcaggcagcttattttctcctcctcccgttctcccacttagcactattcacttctgagatttcagcttctgtggctgctctgtcaacttctctgttgacatcctcaccctaccctctgagtttcgttctgtaatcctgctacacatcagacatgttcactttaatattgctgccactgcaatcacttccccagacagcttccctttgtgggatctgtttttttctatttatacccattcttgacatctcaattcaagacttttaccatcccatccttttatttgtaacacctgatagcctgggatttattgggctttctgtgtcagtatttgtgtctttcggcacttgtggaaaattgccagacattatcttgtccaacttacctcttattcattctctctggtattctctccttctgacaccttgtttagacatattttagatggactttctcactctatcctacctcttattctcttttcctattttccctccttttgtccttatatactacattctggataattttggcttttttatcttacccttgttcctctgcaggtaaggtgctgcttttctctgcttccttgaagattttccctttgtcttttactttctgcagtttatgatttccctaggtgtacattttttggtataaggcagtgtttatttctgttacagtgttttggtttttttgttttgttttgttttgtttttgagacttggtcttgttctgtcacgcaggctgcagtgcagtggctcaatcacagctcactgcagcctcaaactcctgggatccagcgatcctcccacctcagcctccctagctaggactacaggcacgcgccaccatgcccagctaattttaaaatttttttgtagggacagggtcttgctataaggtcaaggctggtcttgaactcctgccttcaagtgatcctcccaccttggcctcccaaagcattgggattacaagcaagaaccaccacaccctgcctaatttctaccattttcattctattcgtgttttttgtttgtttgtttgtttgtttgtttkttttgagacagagtwtcactcttgttgcccaggctggagtgcagtggcacgatatcccagctcgttgcaacctccacctcctgggttcaagcgattctcctgcctcagccwcccgagtagctggaattacaggcatgtgccaccatgtgcagataatttttgtaattttattttattatttttttatgattattatttttattattattatactttaagttttagggtacatgtgcacattgtgcaggttagttacatatgtatacatgtgccatgctggtgcgctgcacccactaactcgtcatctagcattaggtatatctcccaatgctatccctcccccctccccccaccccacaacagtccccagagtgtgatattccccttcctgtgtccatgtgatctcattgttcatttcccacctatgagtgagaatatgcagtgtttggttttttgttcttgygatagtttactgagaatgatgatttccaatttcatccatgtccctacaaaggacatgaactcatcattttttatggctgcatagtattccatgttgtatatgtgccacattttcttaatccagtctatcattgttggacatttgggttggttccaagtctttgctattgtgaataatgccgcaataaacatacgtgtgcatgtgtctttatagcagcatgatttatagtcctttgggtatgtacccagtaatgggatggctaggtcaaatggtatttccagttctagatccctgaggaatcgccacactgacttccacaatggttgaactagtttacagtcccaccaacagtgtaaaagtgttcctatttctccacatcctctccagcacctgttgtttcctgacttttkaatgattgccattctaactggtgtgagatggtatctcattgtggttttgatttgcatttctctgatggccagtgaygatgagcattttttcatgtgttttttggctgcatacatgtcttcttttgagaagtgtctgttcatgtcctttgcccactttttgatggggttgtttgttttttcttgtaaatttgtttgagttcattgtagattctggatattagccctttgtcagatgagtaggttgcraaaattttctcccattctgtaggttgcctgttcactctgatggtagtttcttttgctgtgcagaagctctttagtttaattagatcccatttgtcaattttgtcttttgttgccattgcttttggtgttttagacatgaagtccttgcccatgcctatgtcctgaatggtaatgcctaggttttcttctagggtttttatggttttaggtctaatgtttaagtctttaatccatcttgatttttgtataaggtgtaaggaagggatccagtttcagctttctacatacggctagccagttttcccagcaccatttattaaatagggaatcctttccccattgcttgtttttctcaggtttgtcaaagatcagatagttgtagataygtggcgttatttctgaggggctctgttctgttccattgatctatatctctattttggtaccagtaccatgctgttttggttactgtagccttgtagtatagtttgaagtcaggtagtgtgatgcctccagccttgttcttttggcttaggattgacttggcgttgcgggctcctttttggttccatatgaactttaaagtagttttttccaattctgtgaagaaaggcattggtagcttgatggggatggcattgaatctataaattaccttgggcagtatgaccattttcacgatattgattcttcctacccatgagcatggaatgttcttccatttgtttgtatcctcttttatttccttgagcagtggtttgtagttctccttgaagaggtccttcacatcccttgtaagttggattcctaggtattttattctctttgaagcaattgtgaatgggagttcactcatgatttggctctctgtttgtctgttattggtgtataagaatgcttgtgatttttgtacattgattttgtatcctgagactttgctgaagttgcttatcagcttaaggagattttgggctgagacaatggggttttctagatatacaatcatgtcatctgcaaacagggacaatttgacttcctcttttcctaattgaataccctttatttccttctcctgcctaattgccctggccagaacttccaacactatgttgaataggagtggtgagagagggcatccctgtcttgtgccagttttccaagggaatgcttccagtttttgcccattcagtatgatattggctgtgggtttgtcatagatagctcttattattttgaaatatgtcccatcaatacctaatttattgagagtttttagcatgaagggttgttgaattttgtcaaaggctttttctgcatctattgagataatcatgtggtttttgtctttggctctgtttatatgctggattacatttactgatttgcgtatattgaaccagccttgcatcccagggatgaagcccacttgatcatggtggataagctttttaatgtgctgctggattcgttttgccagtattttattgaggatttttgcatcaatgttcatcaaggatattggtctaaaattctcttttttggttgtgtctctgcctggctttggtatcagaatgatgctggcctcataaaaggagttagggaggattccctctttttctgttgattggaatagtttcagaaggaatggtaccagttcctccttgtasctctggtagaattcggctgtgaatccatctggtcctggactctttttggttggtaagctattgattattgccacaatttcagagtctgttattggtctattcagagattcaacttcttcctggtttagtcttgggagaatgtatgtgtcgaggaatttatccatttcttctagattttctagtttatttgcgtagaggtgtttgtagtattctctgatggtagtttgtatttctgtgggatcggtggtgatatcccctttatcattttgtattgcgtctatttgattctgctctctttttttctttattagtcttgctagtggtctgtcaattttgttgatcctttcaaaaaaccagctcctggattcattaattttttgaagggttttttgtgtctctatttccttcagttctgctctgattttagttatttcttgccttctgctagcttttgaatgtgtttgctcttgcttttctagttcttttaattgtgatgttagggtgtcaattttggatctttcctgctttctcttgtgggcatttagtgctataaatttccctctacacactgctttgaatgcgtctcagagattctggtatgttgtgtctttgttctcattggtttcaaagaacatctttatttctgccttcattttgttatgtacccattagtcattcaggagcaggttgttcagtttccatgtagttgagcggttttgagtgagattcttaatcctgagttctagtttgattgcactgtggtctgagagacagtttgttataatttctgttcttttacatttgctgaggagagctttacttccaagtatgtggtcaattttggaataggtgtggtgtggtgctgaaaaaaatgtatattctgttaatttggggtggagagttctgtagatgtctactaggtccgcttggtgcagagctgagttcaattcctgggtatccttgttgactttctgtctcgttgatctgtctaatgttgacagtggggtgttaaagtctcccattattaatgtgtgggagtctaagtctctttgtaggtcactcaggacttgctttatgaatctgggtgctcctgtattgggtgcatatatatttaggatagttagctcttcttgttgaattgatccctttaccattatgtaatggccttctttgtctcttttgatctttgttggtttaaagtctgttttatccgagactaggattgcaacccctgcctttttttgttttccatttgcttggtagatcttcctccatccttttattttgagcctatgtgtgtctctgcacatgagatgggtttcctgaatacagcacactgatgggtcttgactctttatccaatttgccagtctgtgtcttttaattggagcatttagtccatttacatttaaagttaatattgttatgtgtgaatttgatcctgtcattatgatgttagctggttattttgctcgttagttgatgtagtttcttcctagtctcgatggtctttacattttggcatgattttgcagcagctggtaccggttgttcctttccatgtttagcgcttccttcaggagctcttttagggcaggcctggtggtgacaaaatctctcagcatttgcttgtctgtaaagtattttatttctccttctcttatgaagcttagtttggctggatatgaaattctgggttgaaaattcttttctttaagaatgttgaatattggcccccactctcttctggcttgtagggtttctgccgagagatctgctgttagtctgatgggcttccctttgtgggtaacccgacctttctctctggctgcccttaacattttttccttcatttcaactttggtgaatctgacaattatgtgtcttggagttgctcttctcgaggagtatctttgtggcgttctctgtatttcctgaatctgaacgttggcctgcctcgctagataggggaagttctcctggataatatcctgcagagtgttttccaacttggttccattctccccatcactttcaggtacaccartcagacgtagatttggtcttttcacatagtcccatatttcttggaggctttactcatttckttttattcttttttctctaaacttcccttctcgcttcatttcattcatttcatcttccatcgctgatattctttcttccagttgatcgcatcggctcctgaggcttctgcattcttcacgtagttctcgagccttggttttcagctccatcagctcctttaagcacttctctgtattggttattctagttatacattcttctaaatttttttcaaagttttcaacttctttgcctttggtttgtatgtcctcccatagctcagagtaatttgatcgtctgaagccctcttctctcagctcgtcaaagtcattctccatccagctttgttccgttgctggtgaggaactgtgttcctttggaggaggagaggcactctgctttttagagtttccagtttttctgttctgttttttccccatctttgtggttttatctacttttggtctttgatgatggtgacgtacagatgggtttttggtgtggatgtcctttctgtttgttagttttccttctgacagacaggaccctcaactgcaagtctgttggaataccctgccgtgtgaggtatcagtgtgcccctgctggggggtgcctcccagataggctgctcgggggtcaggggtcagggacccacttgaggaggcagtctgcccgttctcagatctccagctgcatgctgggagaaccactgctctcttcaaagctgtcagacagggacatttaagtctgcagaggttactgctgtctttttgtttgtctgtgccctgcccccagaggtggagcctacagaggcatgcaggcctccttgagctgtggtgggctccacccaattcgagcttcccggctgctttgtttacctaagcaagcctgggcaatggcgggcgcccctcccccagccttgctgccgccttgcagtttgatctcagactgctatgctagcaatcagcgagactccgtgggcgtaggaccctccgagctaggtgcggggtataatctcgtggtgcgccgttttttaagcccatcggaaaagcgcagtattcgggtgggagtgacccaattttccaggtgccgtccgtcacccctttctttgactcggaaagggaactccctgaccccttgcacttcccaagtgaggcaatgcctcgccctgcttcggctcgcgcacggtgcgtgcacccactgacctgcgcccactgtctggcactccctagtgagatgaacccggtacctcagatggaaattcagaaatcactgtcttctgcatcgctcaccctgggagttgtagaccggagctgttcctatttggccatcttggctcctcccccaatttttgtaattttagtagagacagggtttcaccatgttggccaggctggtctcaaactcctgacctcaggtgatccacccacttgggcctcccaaagtgctgggattacgggggtgagccaccacacccagaccattctattctttgagtttccgtctttctgtttacattgcccgtctgctctgcttgttctgttatgtttctgttgaagcccagttttaagaagcatacgtctagttccttggagacactgacaacccagacacactttaaactcaatcattttggaccatagggagaatgttaagaaagctgtgactgggtctgcgtggtggctcactcgtgtaatcccagcactttgggaggctgaggtgggcagagttcaagaccagcatggccaatatggtgaaaccccatctctactaaaattagctggacatggtggcacatgcctgtaatcccagctacttgggaggctgaggcaggagaatctcttgaacctgggaggcagaggttgcagtgtgctgagattgcatcactgcactccagcctgggcgacaagagttaaactccatctcaraaaaaaaatctatggcattcccagtcatacacaaaggccaggagttgtgatggagacaggatctgtctatccctactccaaaacaaagctaagtgaggtgattttctctgtattggtttctgtggctgctgcaacaaatttccacaaatggsatggctcaagtcatctcacagctctggaggccagacactgaaattagggtgtcagaaaggccacagtctctctgaaggctctgtgggagaattccttatatacttcttctagcttatggtggcgccaggcatcccttgacttgtggccacatcacttcagtctctgactccgtggtcacattgcctccttctcttctgtttcctctttttccaaataaagtgaacattcacagctcctgggaatttagaacctgggcatatctttggaaggccattattaaccgattacattctcttcactttttctcttgtggtgaaggaacttactcaaattaacccttttgctatgggtttcttatttgaagttccagtttcttcagcagagatttgttggacttcccggtttgtatataccggaggcttttctttccctgctttcctagctctttagtgccaaaagcattaagccaccagaccccatgggagtcattatttttggcctctgtgtaattctcccgttttcttcctgtgcagcttttttttttaaatttagttgcatatcgtacttttaaattttctgtcatgatgttaaatactaaagctctatttcttcttgggttcctccttccctccctgggtttattttcagtgactctcctttgtcgttttccctctcatctcatcaytgggcctcatcatccatctaagtcaccagtctgcagtctgtactcttcaccagagctatcttcatgaacattcctgccttgattttgttcccttgcttagagcccccaaagctccttattctcttatgcctcagaatcttcccttccacacaagatccttcctgctctgggccttccctgtcttgctaattctgtccatgagtctttcactctatcaaaggcttttttcactctccctcgaacacacttggctctttcattgtggtatggtagtaaagatcatctaataatgtagctttctattttgataagcttatataaaactttagagataattcttaactcttcttgtccctcaaatcctttggtcaccaagtactgttgtgcagtggagctgaagatgacatttatctctcacttgttcttgcaagcaaatgcagtggcatgattgaacctggtcaggggtagaaccatgtctgtatgaattatgtatttataatactacctgcaattcacagaaccattcttaacctgtgctgcctttctgtattctctttactctgtgacgttagttaggcaaaagtttagtgggtgagaacttttaaatgtttagtgatttatctaagattaccacaaagttggaactttttctaattcagtatctttccaatctagtatctatagcttcgttttcattatgccttttctctcagaattgtctttcataaagtatcaataacttggtaaattagaagagccacaaaatgttgaccattttagaaacccttagatgtcttcttgcttgctccactaaactctaaacatcatctccaggtcctgtaattatctattaaggaagtagctttgagagtattctcacatctaggattgctgctaggtaggacaagagctatttttaaaggaagctcatctgtttgctttaaattcagatctgactagaagcaaaatgctccacagtaggcagataactttaaattttctttttttttgtttttgagttrtatattcagtatatttcaatcaattgcatttgggttatatttttggatgctcagagttttygtcattggccatattggatcctgtattctttaacatgatcctttgtctttggtaaattcttgctttctcacgtagcaacatgtcctaggcttattatgtacttttacttctccagacgtagaaaatagctgttcttcaaattatagagaatcatattttgaaaccacatatctgggatactgagttggcacagcctctaggctttttttgtagacataggaagtatctgtgtatgaggaaaaataaccatcttggcagtacccagagttagccaaactgtgaagtgatggcatagtcctccagaaggctccaggagtctgcccgatatctaactccacctgcaaggagtgaggattctactcagggaaagatccacacaagacccccatcactgctggcaccaactgcaagttccagggattttcctaaaccaccctcaggttcagtaacctgctaggaggactcagactcactaaaaggtattacactcatggtttgaattagggtagggaaaggatacacgttagaaccagcgagagtgagwgagagagagagaccctggagtcatggataatgtttcttcctctcatcccttacatctgacaacacagagactatattaccaaccagggaagctcactcgagccttggtgtccagtttctgttgaggtttcattctgtaggcatgattgctgtctttctcaactgatataccatgtgacccaaagtccccatcctaaaycatatacttggtctttctgtcctggccagcactaccctgaattgtctcattagcaacaactgtcaggtttggtgaacatacccaccatgagaaacaaagattcctaccaggaaattccaaggatttagaggttcacctcaggagctgggacaaaaggcagaactcttaggataaggccaaattccttactacacaagcagttaacatttttttaaatattcacccccaataggtaaaatactgattttttttcaactttttctttccattctagaaattacagaagacatccccgtgaagactttgaatatgaagactgtgtatgtttctgtgttaccaacaacagcagacttctagcatgtacttatcaatgttgttcggtcagcccttccctaattacacctatcccctacacatacatgcacatagacacacacatgaacacactgaagatatttccttcaggtgtgtgtaaaataygctgcttggattgaaattcaaatgggattgattagtcaagtaacttgagwcctcacagtaatcttcacacttaaccttagacacctatgcagtcatgttgggagyaggttacaatgttacttcagcccacagtttatttctatacttgagttcttaagtacagaagatagaagtgatttaaatggcatagtatatatatcattttctggccttttaaaatttatttgagacctcttgatgaaatgracatattatatatttctgccacctggattttcctggataatttgatggaatattttaagtttcagtaaatcagaacaataaacaaactcagatataaatgtgttgaaagtaattcattctcccatagataaatgaaacttgaaatgtgtaaactttgaagaacataaaaacttcatggtggtttcttattaagacagtggactagacatctaataaaacttctttccaaaatcccrggtgataatttgagtcctcagagaagcagatgacatgacaaagttagatgtgcaagaatttattagaggaaacataaatggaggataaacgggagatggagcaagcgtaggtcgagagagccttcagactgcagtgtgggtctgacacctgtaaaaagagaaaatgaagattgattagcaaaaacttagactgcagtgcaactctaagatgaagtcttggtcaggccaatggagagttcccaagcaaggattccttttagtagagttcagaattgggcagaaatagcctggctttgtttctctgacttcctcaagtcagtttctgggaggagaccaaggggagcgtggccttcgcacaaatgccttgatggatctgaaagtaccaactacactcctcatgtcagattcttttgaagggagatctgaatgatacatccctatggctactacaacagatgcattcacacaaaaacccacaagttggagaaaatagaggaaacaaccagaacttggggaattggaaagcagatagacggtgttaactaacttggtagacccaggaaaccccaattctaaatcaatggaggaactgataaacttacttacatttcagaattcacagcaccagttaacctctgggatgaaaggtagaagaggcacagaaatagggacgattgcgtgaacactgggaagccttatagcttctcccatttccacgttgctaagcaactttattccccccacagttggcatctggaaggtaaaaagtgactggttggtagaagtcggagtgaatggaagacaagagtacttgtaagcctggaggattcctaaaaccaaccctcagcttagataatttgctagaaagactcagaactcaatgaaagctattgtattcgtggttacagttaatgacagggaaatgttaaagatcaaaatcagccaaaggaagaggagagggcagagcccgggagaagtaccaaacacagctcttgtcctgtctctctgaagtcagcaagcattactctactggcatcagtgtgtgacagtatgcacagagtattgccagccagggaagctcacccaagccttggaacccagagtgtttactgaggctgctttacatatccatgattgattgtccatgtggttaatcgcagtctctaggtcagctgctcgtgcatgacccaaaacctccaccctaaatcacattgttggtatttctgatgtgttgtacaccccccccaccataagactgtatagatttgtcccaccccagccataaatcatactgtcaaggctattcagtatgattcaagatccccaggtaaacagaggcattcctatgtagcataacatccaagggcaaggccaaattcctttatacagagtactgtactggaaacaagattaagtggctttatgtatactgtccactataccaaagaagaatataaaagattgacaccaagtattggctgggaaaaaggctcactctgaacaattaactttgaagttgagaagtccatactcaggtcagtgttttagcccccaactcttattcatgagacttccatctagaattacgagagatctagtgaaagcctctaatccaaaaccaaaagagagtaccaaaacaactttgaggaatcaagcaatgcagtgagaagaaaattccccctgccaaatgtgttaatatccttagagttataagatactacatctgtaaaataacgatgctacaaaacatgaaaatctcaagaggagaaaaaaatgttcctgttaatataagacttaatagaaaagaaaaaaaatcattggaaaatagtgtgaaattttccagacactagatagattaacaataaatatttaaggtgggagaaaagagatattatacataagttagagtccaggagttccagtatccaaattgtaggaattccagaaagaagaaaaataaggtcagaaaattataattaatgtaaacaaattttgcagaacctacagccagattgaaagatatctttggccgaacacggtggctcatgcctgtaatcccagcactttgggaggccgaggtggacggatcacgaggacaggagatcaagaccatcctggctaacatggtgaaaccttgtctctactaaaaatacaaaacatttagccgggcgtggtggcaggcgcccgtagtcccagctactcgggaggctggggcaggagactggcgtgaacctgggaggcggagcttgcagtgagctgaggtcgtgccactgcactccagcctgggtgacagagcgtgactccgcctcaaaaaaaaaaaagatatcttcaaatgtctagcacaatgcatgaaaatagactcacttccaaggcacataacagaaatttcagaacataaagaaaagactaagtttctagaaagaaaaaagcaaaagggatatacaaaagattagcagttagtaaggatttttcttttcaacctctgggagcacagaacaatttagtaaggatttgatttctcagcaacacagtaagaagagaatctccccaattctttggggaaagttttctaactatattgtacccaaccaaattatcaaacaagtatgaaggtagaataaagacattttcagacatgagttaggtctcaaaaaaaaattatctcccatgtactctttctcagggagttattggtagtgtactctaccaagctgcagcaaccccactgaggtcgtggttcctaaaaccattctcccatgaagggaactaggtttccctgggaaaaaaatggctgcttctagagctggagctgggaatgtacgatatgaatctgaaacatcttgtagtaacagaaagtaaagtgatcaaaaaacagtggtgagtgacatcagcaagatggcaaaatattaatagtaagccctgctgggcgtggtggctcacacctgtaatcccagcactttgagaggctgaggtggtggatcatgaggtcagaagtttgagactagcctggccaacatggtgaaaccccatctctactaaaaatacaaaaattagccgggcgtggtggcacatgcctgtaatcccagctactcaggaggctgaggcaggagaattgcttgaacccgggaggcagaggttgcagtgagtcaaggtcgcaccactgcactccagcctgggcgacagagcaagattccatctcaaaaaataaaaaaataaataagccccaggccctcattctcccatagagacactgacttaacaatatacggaccaaactgcctttgtgagaatttttcagaaatcagtttaaaagttgcagtaccccaggtgaacgtagaagcaagaagagctgatttgaagcaggtgagaaagtccattacatttgcataccataggttctcccagtaccaagcacagtgcagcacaatctggagatacctcccacttgcaccttccttctcaagagggaaagagtagagtggaatgtatgtcccatgttctggcttatagtggggctgaccaaaggactgatttctgttcatgtgactcagagcactgacaggaacagtgtcatactttggatgactaggggctgctgagaacaaatgtgagacctatagccttgttacagcactgcaggaactagtatcataaacagataccaaggggagcaagaaattatgagttccttaaaaagacacaggggcaaacctcttcaggaaattgcacagacaaacccagagaagatacatcgctagaaaagattcaagaggtccccaagatctccagctaaactaatttgtaatgctgttcctttttacaaagccagtctataaaggctaagagagatggctgttttttcagatgcccaaatctcaacaaaagattagcaggtggccggacacaatggctcatgcctgtaatcccagcactttgggagaccaaggcaggaggatcacttgaatccaggagttcaagaccagcctgggcaacacagagagacctcatctttacaaataatttaaaaaattagccagctgtggtggtgcatgcctgttatcccagctactggggaggctgaagcaggagaattgcctgcgcccaggagtttgaggctgcagtgagccgtgatcaagccactgtaccccagcccagaccctgtctttaaaaaaaaaaaacggctgggtgtggtggttcatgcctataatcccaacactttgggaggccgaggcgggcagatcacctgaggtcaggagttcgagaccagcctggccaacatggtgaaaccccatctgtactaaaaatacaaaaattagctggacgtggtggagggcgccataatcccagctactcgggagactgaggcaagagaatctcttgaacccaggaggcgaagggtgcagtgagccaagatcgcaccattgcactccagctttggggacaagagcaaaactctgtctcaaaaaaaaaaaaaaatcacaaggcataccatgaaacagggaaacatggccctatcaaaggaacaaataaatctctagaaactaaccctaaagaaatggagatcaccaggcaaagtggctcaacacctctaatcccagcactttgggagactgaggagggaggatcacttgagcccaggagttcaagaccagcctgggcaacatagagagaccctgtctctagaaaaaataataaaataaataataaataataaaatacaattagctagatgtggtagcatgtgcctgtagtccccgctacttacttgggagaccgaggcaggtggataacctgagcctggcaggtcgagctgcaatgagccatgattatgccgctgcactccagcctgggtgacacattaagaccatgtgtcaaaaaaaagaaaaaagaaaaaaacagaaacgatggagatctattagttgtctgacagaattcaaagtaatcatcttaaagatgttcagtgagctacaaagaacacacaaaatcaggaaaacaatatctgcacaaacaaaatgagatcaataaactataataatgtaagatgttagtgatcaggtaaactgcgtgtgagtatatcagctgtatttgcatcttttttataaatctgaagatatagaagttcatttttaataagtgtcagaaactgaaattaaaaacctattgtaggctgggcacagtggctcacgtctataattccagcactttgggaggccgaggcgggcagatcatgaggtcaagagatcaaaaccatcctggccaacatggtgaaatcctgtctctactaaaaatacaaaaattagccaggcatggtggcgcacgcctgtagtcccagctactcgggaggctaaggcaggaattgcttgaacccgggaggtggaggttgcactgagccaggatcgcaccactgcactccagcctgacaacagagcgagactccatctcaaaaacaaacaaacaaacaaacaaaaaccctattgcaatagtatcctaaaatatggaatactcagagataaatttgaccaaagatgtatagtgcttgtatactgaaaactacaaaacattccttagagataataaagaaaacctgtaggccgggcacagtggctcacacctgtaatcccagcactttgggaggcctaggcaggtggatcacaagatcaggagttcaagaccagcctggccaacatggtgaaaccccgtctccactaaaaatacaaaaaaattagccaggcgtggtggcgagtgcctgtaatcccagctactcgggaggctgaggcagagaattgcttgatcccaggaggcggaggttgcagtgagccgagattgcatcactgcactccagcctgtgtgacagggcaagattccgtctcaaaaaaaaaaaaaaaagaaaagaaaaaaaacaaagcctatataaatggaagagagaaataatgtttatattagttagctaagattgccataacaaaataccacagactgggtggcttaaacaacagaaa

SEQ ID NO: 95506 - DNA, 68543 bp, Homo sapiens
gtccaagctgcccagccccctggtgccacctgacctctgcgagtctgtttgcaccatcaggggtggaaaacaggcctgcaggtcaggcattgaactccctgatgtgggttttccacgaacccaacaactggactctgtgttcctgtgggcgaggactggcaacctagggtctggcctggaggacactctcttttcccagggccaatgcccaggcttgggcagtggcaaagtggcttctggtgccaaccacaaggaggtttcagggtgagatccttgaagtctctacacacccaggccccttcatgcccagcaggtccagagcccttgggtggcagaggcgagaaacggaggcaggaggaagcccactccagggctctgtacacaggctgtatctatgcctttaggtggctgggggcattcgatgaggtcacatccattaagcttgccctgtagccactcagacaagtggccaccaaagttagagctgaggccaggcgcggtggctcacgcctgtaatctcagcactttgggaggccgaggtgggcggatcatctgaggttgagttcgagaccagcctggccaacatggtgaaaccccgtctctattaaaaatacaaaaattagccaggtgcggtggtgggcgcttgtaatcctagctattctggaggctgaggtagaataattgcttgaacccaggaggcagagattgcagtgagccgagattgtgccactgcactccagcctgggcgacagagcgagacttatctcaaaaaaagaaaaggtcagagctgactcttagaaaagcccccagctgcaatgtggagcatggagcagaggggatggtgagcacaggcaggaggataggtgaggtgtctcctgcagaggtgcatgtgagaggtcacagtcatccaggctaagataagagcagtggggagagacagcaggaaccagagcgctcacattcttccattttcttgctggaggcctcagccctctgctctgtgccagtatcagagcttatgacaagcaactgatctggtgggggagggaaaggataagaggcatcactaaggagcagtgtgtggaaagaccacatggcaaaaagggcttgacacgttgaaacaaccacagccaggccggcagcagcagtatagtgggtaagggcagaggaggaagtacagccattgagatttgatcctaagagtcatggggaccatcaaaaccttgcttcagaaaccattttattcattaatattgcagtacatagctctaaaactttacaaatctttcaataaaaatataactacaagctgggtgcagtggatcatgcctgtaatcccagcactttgggaggtcgaggtaggcagattgcttgaggccaagagttcaagaccaccctgggcaacatgatgaaacccatctctactaaaaatacaaaaattagccaggtgtggtggcatgtgcctgtagtgccagatactaaggaggctgaggtgggaggatcacttgagcccgggaggtggagctgcagtgagccaagatcgtgccactgcactccagcctgggagacagaggagaccttgtctcagaaaagaaaaataactacaatatcattattattacacctaaaaaatcaatagtaattctgtcttgctgttattgaatatctcatcagtgttcaaacttccaactgcttataaaaatatttcttgctgggcgygggggttcacgcctgtaatcctagcactttaggaaggcaaggcaggcggatcacgaggtcaggagatcgagaccatcctggctaacacagtgaaaccctgtctctactaaaaatacaaaaaattagccgggcatggtagcgggcgcctgtagtcccagctactcgggaggctgaggcaggagaatggcatgaacccgggaggcggggcttatagtgagccgagaccacgccgctgcattccagcctgggcgacagagcgagactccgtctcaaaaaaataaaataaaataaaaataaaaataaaaataaaaatatttcttttgcacttaaaagaaatcagtatctaaatgagatctaaacattgtgatttattttattttatttttgagacagagcacgttttgtgcccaggttggagtgtgcagtggtgcaatcttggctcactgcaatctctgtcttggctcactgcaacctctgcttcccaggttcaagcaattcttgtgcctcaaccacctgagtaggtgggattacaggtatacgccatgacacctggctaagtttttgtattttgactagagacagggtttcactatgttgctcaggctggtctcagagtcctggcctcagcaatctgcccatctcagcctcccaaagtggtgggattacaggcataagccaccacacccagccttgattttatcttttatagctcttttaacccaaagattccccttctgtttcttttttttcttaaaaatcaatttgagatataattttttccaggaatgcaaggttggttcaacacctgaaagccaatcaatgtaacacaccacatttataaaataaaggagaaaatcatatgatcatttcaataggtgtagaaatagcatttgacaaaatttagtacctatttatgtaaaaatctttcaataaataaggaagaaaagtgaacttcttctgaccaaaaaaaaaaaaaaaaaaactatgaaaaacctacagctaacattgtacttaacggtgaaagactgaatgaatcctctgccctaagatcatgaacagggaaaggataactactcttaccaattctattcaacattctactggggatactgaccattgcaataaggcaagcaaaaaaggtacaaaggtaataaaggggaaagtaaaactgtttctattcatagacaacattgctgtctacctagaaaatcctaaggtatttacaaaaatctactagagtcaataagtgaatttaaaaaagttgcagaatataaacctaatttacaaaagttgattttatatgccaggaacaattggaaaataaaaatatcatgtatgataacatcaaaaaattaaaattcttagaagtaaatttgatggaagataggcaaaacttatacacataaaacattgctcagacatctaaaccaggatggatctcttggtacctccactgaaattgaagacttaccctgatttgatgattacacattgtatacacggatcaaaacatcacatgtacccccaaaatatgtataactaagatatatcagtgaaaaataaaaaaaaaaaaagaaagaaaagaaactgaggacttttataccacctatcaaagatgtctcaacctaccaggtcttcctctccactgtatggaagacttaggcctttgcctgggcacaggcctccaccaggccagtcatccaaggtgtccaataaattagtcatctcagagctgggccctggagtacccatacctgtgaccccaagaaactatctcttaaacaaacaaacaaacagaacctctctggctgttggggaggaaatgttggaggggcaactagggtaagtggaggagccagcaaagagacttaagtaagaaattataatggtctcagtaagagaagatggtggccctgtatggaggaagtggaagtggagagaaaggggcagacttgatatatttagaagatatgaatgttgttgggcacggtggctcacacctgtaatcccagcattttgggaggcggaggtgggttgatcacctgaggtcaggagttcaagaccagcctggccaacatggtgaaaacccgtctctacttaaaatacaaaaattagcctggtgtggtggcgggcctgtagtcccagctattcaggaggctgaggcaggagtattgcttgaaccggggaggcagaggctgcagtgatggtgccactgtactccagcctgggtgacagagcaagactccaaattaaaaaaaaaaaaaaaaaaaggaaggtatgagtgtctcagatcccagtgcctttgtttctccacctgctcaggcctaggtgctgctttgtttttaggaatgccaccaagatcacttacctagaaggtgcaaaggctcctggaggacccctgacctaggtgtgggcagggggtaagatgaaagtcaaaggccatggtgccccagtctcaggtgggggaatccctttgggccacgccccactttggccctcagcactgctctgcagggtaagggccagggcagggttgaaggtccccctggccgatggaggggtccaggcagaatggggctcattcagaagctggccagtcctccctcaccttggtctctgcctctgggcaaccactcaccctgctgttggtggcaggacggtgggggtggggggcggggtgctgctggcagtttgggcccctgttttcttctcaggagcgctgtgacctcactgtccctcatgtcactggtgcatgtgagttaggaagggtctgtcccctaggctggaaccatttctgcggcaaggagtaaaggtcccagcagcctgtgaccctgggactgtgacctcagttcagctcaggctggagctaaagcagagggtttgagccagagcttcagacactggattctagctccgctctgccactcacatgctgtgtggccttgggaaagatacaccgtcattctgtgcagcaggtttctgcccataccattgagataacaatcacaggtacttcatacagggtagtcgtgaaggtgaaaacagaatgcttgctctttccagggcgaccctaccaatgagaaaacaggctgcagtggggagtgaccgccccaaggacacacaactgctgcaagggtgtcattgtgtaggtgttcctcacttgcctcctgctagtgtgggaggcccagagactccacgagacccccagctgctcctgtgagagggctgaggggggccagctgtgataccgcctcccatctagaaggggcctcaagccacccatgtacacccagccccacgtggctcaccaggggcccctttgccatcaagggccacatcccaggtttaagtgtcagagaactaaggggcttaagagagaatcgagctgtggctttgtttgtgaattggtttgatccttttttccttctagaaggactcacagctactgttgcttgccatgggcttgagggggtggtgggggctgactggcagaggggctgagagtggatggtgattaaaaggagcactgactccagggtagcggctgggcaaggcttggggctcccacctcccccaggttcagagccggctgaggaccgggagtcctcccttctggggtcagtgctcactatggagcaactgccttggatggggtcccaggacttgctcttttactggggctgtggttgcagtgatcagggctttggagccggcagaccaagctgggaaactcctgaggtagagaagctgttgaaggcgggcctggggtcacaactcccagctgctttttacaagcaagagacttctctctgaacctcaaccttccctcctgtctagtgggttcgcagccagacagtcttttactcactgcttactgggtgccctctggagtctgggcaggtgccaggctctgagaagacaggccagcaatcagccctggcctaagggatgaaagccgggccttcccgcgccggctcacctcggttttctcatccttactcggctaccagaggctatggttggggagggagggggctctgggggctgcagaaggcccaggctgccggcaccggatagaagtgagcacgaagctccctgcgccagtggaacttttatcccggctcccaccgcgaagcgtttaaattgcttccccagggccaggaggcaagtctctcgaaggacggctgcggccaccctccgcccctgagttacatgggtcgcagccactgccgccctccttggcgcctccagcccgcgggccagggccaggaaccgcgagccgcctgcgcccccgccggcgcgcccctgggagggtgagccggcgcckggcccaggcccggacctggtgggaggcggggggaggtggggacgaggcctggggaggcgggccccgcccatctgcaggtggctgtgaacgctgagcggctccaggcgggggccgggcccgggggcggggtctgtggcgcgcgtccccgccacgtgtccccggtcaccggccctgcccccgggccctgtgcttataacctgggatgggcacccctgccagtcctgctctgccgcctgccaccgctgcccgagcccggtaaggagccctcggcccctctcgctgcccactccctagccgagagcacccgcttcccgggcccagaggaggaggcgtagaagacgcccgccccggggcccgcggaggcagagggcggaccccgatcgccactcgccggggactgggaccgaggcaggagggaaggggctcccgatgctcaaacgcctggcaccggattccaggtttctggagcgtgggggacgcggcgggggcgcgagtccccgggtccgaagagcggctcgggttatttgttccctgcgcagccgggtcctttctggactccttgtcggatccggcttcctctgtgtcgtgaagcccccacatggagacctggggagtccggagcgtgtgggggggctcccgattctctctccctctctcggactcgccgtctgtctccacctctatttctctgcgtaaaaccaggagtccagcccctctggggcttggacgtatcgctttccccgcagcctcagtttaccctggacagatgggcatggtggccctggctcccttccctgcagggggcggcagccacctggccctccccggtggggctggcggcctcgcggcggggtttcctgctggcctgggctgggctctgtgggaggggcagtgccaggaatattttctattcgggctgctgttgcctttggcccctgggcggctgcgccctccagggaggcagggtcattgtgaaagagaggaaactcctctcccaggcggccagggctgttcctgaggagggctggcctggcctcagtattcttctctgagaagtggagagtccactcccgagcagccgagtcaggctgcaggtctcagggcaggaacagacctgttctctccccaggggtagatcaagacctaggggacttgggctttgatcctcccgctcccagcaagcacaaacccagtgatggggagagctggtgaggccttggctcagcctccagattcccaagcttccttttcattttcttttctttctaaaaatttatcagagatgtggactcgtcatgttgcccaggctggcctcgagctcctgggctcaagcgaccctcctccctcgggcctcctaaactgctaggattacaggctcgagccacccaaagygcctggcccccaagcttcagtctgttagagctggctggggctgagggctcaggaaacatttgcagatactgtgcggctgctaagggctctgtagactgttgggtgctgggcctgggtccaattgcacaataactgtgcctggggttaggttctgatgagagggagggagaagcagccacacggactgggaagcttggctaggagcaggaactggaggagtctccattccaaactccctctccctcccagaccccttaggcccaaggcctagggcggggaagtttgggggtgggggcgggaccctgtcctggcggggccatctgtgcaccatgctgagaagtaattctggttctgctctgtgggggtggatcaagtgaatgaatagtgactcctgcctgctgagcgcctggccggtgcgggggcagacacgtcgtgagagggaaggggaggccccactctcagcacagtctccattcctgagtgcttgggaagcaggcccagggccgcaggagccttggggtggagccaggcccaaaacagcctgctgcacaagcgcttccccctcccaacccgggcccatctcatctttggcctgctgggaggccagccaggtcaaccagatgcctcatctgagcactgactacacagtccctgaagtcagtggcttgcctgtgggcaccaggcacccatgtggaaagaggtaacttcgctggaattcagagtctaaggctctgatttctgatgtagctttgggcaaagttgatcttccagggcgtggctccctccccagacttggggtcgaccaggcacccataggcactttgatatgagtggaacgaatgaatgaatgtgcccttcgtccatcaccaaagacaaaccgagctcagctgagttagaatgtcagcgaggggttgcaggggaatcttccacggggcagtaggcctgagctatagcacacaggctctccagagaaatagtgggcaggttggccatgactcactggggggctggttttctggaaggtgtgtagagtgaaggggagatctgaggtctcctaggagccagggagtggaaggcctagtgcagggaagagcaagtggcctgcagtcaggctgggtttgaagccgctagcttgtgacctcggctggccgcttagcctctgcctcctcctttgtaaataggtggtaatggcagtctccaccttgagaggatgcacctgtgactgtgaacatagtagccgctcttgttgtcattccagctctgacgttttcaagtagcacgagttttccttagtgtcaagtgagcgcccaggctggcctgtttgctggaagctggacagatggctgtggctggggccacagagaatgccatcccaatgaaagccaggtggctctggtaccttgacgcgaggccaccttccctcctcccaggtgtctcttccggggaaggagggctggagggcagtgggcatttgccagggagctggagaaacctgccgtggccctttctgggggatgtggtgggggtggagctgggactaggggaggctgaattcagccaggatctgcctgccaggcgcagctcccaggaagaaagcccaatgtctgggagggtcagaacccagagggctgtcaggttgtacagatgaggaaattgaggcttagcaagccaggaacttggctgaggtcagccatagcagcggtgcacagagcttagtgggcacatacatgcttggtgcccagctctgggctccttcccccagcatctcacccaatccttacagtcgccctgkggggagcaggctgtttgcacccctattttgcagctgagcagttatgctagagagctgaagccactcaaacccatgtctggtggacttgacctctgtcctgtgcctggagtgagcgctcactggattgcagctgtggttccttctctccctgtcacttcctcccccgacatcaaaccctcagtttcatttagtttttgcctcgggctgcaaatgcagcttagggacctgcggaggctgagggaggggggtgccccacccgctgctgggagggcaggagcaacgctgctgtctgattgcatcattttcccaagcccatctgcccagctcatttctctgcatgcatacactggccccaacacccacacacgtgtgcatgcacacaggcacacatgtgcaagcccaaacacatcacacacatgcatgcacacacattgtgtactctcaggtacgcacccctgggtgcacacaggtgtgtgcgcgcrcacacacacacacacacacacactgtctcaggtacacacgccaggtccatgcattgcttcacactgcccagccccagaggctgaaggcctcagagcccacacctgcccagctacaacctggcaggcaggaggggctcactggtttcttttggtttatttaagacagagtttcactctgtcacccaggctggagtgtggtggcacgatcttggctcactgcaacctttacctcccaggttcaagcgattctcgtgcctcagcctcccaagtagctgggactacaggtgtgtgccgccacactcagctaatttttgtatttttagtagagacggggttttgccacgttggccaggctggtctggaactcctgacctcaagtgatccacccacctcggccgtccaaagtgctgggattacaggcatgaaccactgtgctcggccatgagagcatgtgtaggactccacagcttcagggcaccccagccctctttttgcggtgaggagctgacctccagagagtggaactagtagcattgttctaagtgcctgccacaggcatctgggagatggtccctgtttccatggagctcgtagtgggggagagggcagttagaatacagcatgatggccggatgtagtggcccatgcctggaatcccagcactttgagaggctgaggcaggcagatcgcttaagtccaggagttcgagtccagcctgggcaatgtagtgaaaccccatctctacaaaaaatacaaaaattaggcaggtgtggtggcatgtgcctgtagtcccagctacttgggggtggtggcactgagctgggatgggaggatcccttgagcccaagaggtggaggctgtggtgagctgagattgcatcactgcactccagcctaggtgacagaatgagaccctgtctgaaaaaaaaaaaaaaaaaaaaaggatacagctctgatgggcaggaggcatggcgggtcactgaggcgatgcaggtgatccagctgtttctgtggagctgcccctccgtgtttctgtggagctgcctctcttggctccaggtgcctctgggaggaggcaggagcaggggtgactctcagagctgggtgaatcttgggccagcatcatcagatcacacttgcccaggacttcccttccttgagtctccagtggtggtcttgtacctatgagcagggggttaaggagccgagctgatctgagttggagtcctggctctgctgcctaccagtcaaacgagatgcagggcaagttcctcagcccaagcctcagttttcctgactctaaaatgaagagaaccccagatggaagggcttagcctaagacggacatgtctattcccttgattgtggtgttgatgtcacgggcgcatccgcacgccgaaacttgctaaattggacacaaaaaaatatgcgattatttttgtagttgatgaatgtgctgattgggtattctcgtgtgtgtgtgaggtgccaccctcaaactttgttatgatgttggcacattacccatctgatatttaaaaaatgcaatttatgatatgtcaagtagacctcaatagagctgttttaaaacatacaacagaatttcccgcaacccaaccacaccacccgcgccatcacacgcaaacaggggtaggcttccacayatttcctgaatgccttctggagcagggggcaggaggcaggaggcaggacaggtggctctggggctcctggacctcctctgctcagtgaggctgctcacaggagattgggcggctggaaagtaaggtttagggcctctgggatggcccaggctacctgcaggcagctgagtagctctgcttttgcagagtggttcactgcactgtgaaaacagattccagacgccgggaactcacgcctccaatcccaggtactgcycaccttaagtcctccctgcctgccttcctccctccttccctccatcctgcatggccaattgcctggctgcagttgccatggataccacctgctggctccagggttagggctggctgagtcaccagcaactcaggggcagggggttgaatgcccagtagggacgttgtgggcaccgaccagaaccatcttctctgccccagctgcatggtccatgaggtgtttccccttctaagtccaaagggcagcacaggcctgtgagycccggctgactggcaggtgggaccgtgcagcatgcacgggactgaattctcatgtgacggagctccaaagtccacctggctacacggccaggctctgcagcagaggacgggaggcctgggaaaggcacttcctctccccgagcttccaggcacacagagagtgctcaggatagcgatgcctgcatcactgcaatggtgatggccgggtgacccttctgggctccrcttccccagtagtgtctaataaagaccctgggtgactctgaccttgtgacgttggtcagactccagtggaaacgttcccaggcagaacaaacatgccctgtacatttgggaaatgcgggatgctggggccaggtgtccacggaggctggaaccaggaggcctgggcccacatctgcccctgctgcttgttgatccgatgaccctgggcaggtgacctcgtctccctaaccctggtttcctgttcagcaaattggacacagtgaagacgcccaagcccagggccacaggaggcatgtgggggaggggggtgcagggcgagcccaagggcagcccaggattcagggagagccctcggggaagaagcatggctgcaaagatcaggagacaggaggccttggcgccttcgggaggcttcattgtgacggagggtggggcaggatgggagaccgcaggcacttcccggctgcagagggcctggctgcagagagccctcgtgcccatctgtccccccgggaagggccgctggttgcagaggtcttaggcctctgcctgtctatcgccttccctccctgggcctcagtttctctacctccacactgggggaagttggtctctgagcccctccaaactgggcattggcagagttgaattcagaggcgctcacatttggagacacgatgtctaaaattccagccagtgaaggttccatggggttgcaggtaggagagggactggggctgggcccctgccccacagcatccttctccacctgcaggtgggcggcggcactgcgtgctggggaagcacagattcttgtgccctctgtgaccttgagcctgccactgacctctctgagccctgctggctgcctccccaataggaatgacaactcctacttcatgaggttgtagtgggggctcaggggcacagggagatcccgctgaggctcccagggccctgcctggtgcttggcaaggagcagttctgatgggggatgtgtcagctgccagaggctcagagccaaggcccctcccacatctcctgcctgcgtgcattcctcacatcctggccttgggccaaactgctcagcctcagccgccttccctcgatgctggaggatcaggtccaagagatgcctctccccgaccagcctaggactgcagtcagcattcccaggccccagtgtggtctgtggggctgtgtgcagagtgtgcgaggtcagggtycccgggggtggcaggcactgaaggtgaacatcctgttcccgaccttcagtggcagcttgcccaggagacaaggctgtccaaggccaaggtcggggctgggctgtctgcaggggctggcggggggcactggctgtctcagggtcactcaggttgttcctcgactcccgccagacgctatgtccagcaaaggctccgtggttctggcctacagtggcrgcctggacacctygtgcatcctcgtgtggctgaaggaacaaggctatgacgtcattgcctatctggtgagggagcgacctgggtgtctgtcttcctgcgtgtcctgcaacctgtcctgtctgccccctgccagcctctgtctgggttgtcagcctgtctgctcaccgtcactcattcaarcctggcctcttctctcgaagcctgtcttgaactggaactaggaaaatagcttctcgttgtactgcctcactttctccatctgcaaattggccatccttgagatgccttccagagccaggtgatggaggcgcggggagggcacagaagtgaacttggcagtgctgctggcttagcctgcttgcagagaggcatgggctgggacctgctgccagccctgggaaggcacacagtcttcccatctccagagtatgctgtcagcctgcagtaattcagcaaagattgtggaatcctgagctggaaggaccctgggggatcacctggttctgggatgggaaataggtcacaggtgatgggttatgtgtgaagccacttcctcatccagggcccataggagtcatccctctcaaactagctcctcttcgactgaacctggccacagctctgagtccttctctgtgtggctgtgctgttcaggactcttaggtgcaaattttagaaactsaactcaaaccaacttacgcaaaaaggaaagggaaaagacaattcttggctcacacaactgagaastccaggggtaggatggcttcaggcagggctggatccaggtgcttctaagatctatctccaactctacttggcttcattcttggcctctccacagggcaggcaaggctcatggtcaccctcatagcccacctttcccaaaaaggagggcttacccccagtagggcccatggggacccaccacgcattagtccctatggctgcatcatggggtgcgaggcttgggccatgagcctactccttcagtgggcgggatttcttcctctccatccctgtggaatggggtccacccaggaaagaaggttctgtttccagaggaagtgagcctgggtctctggacagacaaaacttagctcttgccaaaagtggcttgtttgccggcatattggcatgtctaactgcgcccaatgcccttgtcattcaggttggggaaagtgaggcccaggggaagaaatactttgctcacagtcacctggtgggtgagagcacagctttgaggggctgcaaagagcccagggtgtatccatctcactgtaggtagcacagcggggcaatcagagctggagctgrgcgtatagacccctgggctaccacctgggggatttaaaagctgaatgtgattcagataagcacctgcagctgggctttggcaagattccagggtctggtgagccgaatgaagggagtgagggctgaggccaggatctgggcagcaggccagagtccaggcagcaggaaacatggcagtgtctagacaggggctgtcagaccccgaggtcagggcactggccacagggacggagctggaagttcctgagcacgggcttctctgcctcccgcctctcagctgcctcaggatggccaaggcatggcctttgactagggaggagagctggaggctaggaaggccctgacaagctaatctttgcactggctgagaaagagttttctggaaaagacagatgagtttcaggagaaccctagaccttccagcaatgacagcagatggttgtctcccagcagcctgtgtggccagggccaggctcagccaatgctccaacccatggaagccaccagccatcaccacgctacaatccagctcccaatctcacctcctggaagaatctcacctctccaggccttgggctttgtcctttttccttcttactgtgacttggccatggaatggaagctgtctctgtagcagggggtgggaggctgctgcatgcggatggtgtgaactcagggctccccccaggggctgacggagcctctccgcttctgcttctcaggccaacattggccagaaggaagacttcgaggaagccaggaagaaggcactgaagcttggggccaaaaaggtaccaggcgggaggcagggrtttgggctgggagtggggcggtgatgtggagggcagtggtggatgctcctgccccagggatcccatcccttccagtgtgtcttcttgcttctaagagtatgagatcatcctgctctcaggtgtgtgaaccctcttgtttttctgcctcccccacgccctcttccacccacccaccttcccatccaggtggagtgtctcttccccacccacataccttcccttctcttttatctctctgtccatctatgcacccactcaccctcttttatctctgtttatctactcgtccacatatccatccatcattcatccctccattagctatccatcgatccatccatccatccattcagccatccatccatccatcacccacccatccattcacccatcatccatccatccatccatccatcacccacccatccattcacccatcatccatccatccatccattcatccattcatccatcatccatccacccatccatccatcacccatccactcatccacccatccattatccatccatccattcatccatccatccatcatccatctatccatctatccatccatcctccgtccattcatccatcatccatccatccattcacccatcatccatccatccatcatccatccattcatccatcatccatccatccatccattcacccatcatccattcatccagccatcatccrtctatccatccatcatccatttattcatccatcatccatccatccatccatcattcttcatccttccatgcatcatccattcatccatccatcatctacccatgcatccatccatcatccatccgtctattcatccatccattcatccatccatcatctatccatccatcccattatccattcacccatccatcccttcattatccatccatccatccacatatccatctgtcattaatccctccactgtctatccatccattcatccagacagccagccattcatctatccatcccccatccatccatccatscttcatccattcaccgtttttctatccatccattcatccatccatccatctgtcatccatcatccatccttctgtccatcatccccctacctgtccttccctcttttatctctctgtctacccattcttccattcattcaacagaatcagagaactccaattgagtctggtgccttgattgtgaatctaggcatgtggcaggcagacccctgtcccatacagggcatttatgatgaacagtgtcatcaggacccctgctcacatgtgctcactccccatggagaagcccttgccacttgtgccccttcatttgggagagtgagcaggggacatagcagggatgatgtgcaaggccaccagcccacctgcagggtcagagctgatcccctctgtggggtgcttctgcagggttgccagggtarttagcatgttaaaatgaacacgggagggagtggatgccccagtcccaagtcacctactggccacaggcctggaactagaatgtccctccttggttctgtgcctcccgagtgctggagagcagaggggttgtctgagcagtagtccaggaaggggagaaagagccctgagtgttgaagattcgagtgcgctttcagcagcgcaggagcaggctttgtgcacggcttcagcttttgtcctttattctagatgagcagttctcaaamcttgtggtcttgggaatcctctacactctaatttacgtggcgtttttaatgtttattttcttgcatataacattaggatgggccaggcacagtggctcacgcctgtaatcccagcactttggcaggctgaggcaggcagatcacctgaggtcaggagttcaagaccagcctggccaacatggtgaaaccctgtctctactaaaaatacaaaaattagctgggcgcgatggtgggtgcctgtaatcccagatgctcgggaggctgaggcaggagagtcgcttgaacccaggaggcggaggttgcagtaagctgaaatcacaccattgcactccatcctgggcaacaacagcaaaactctgtaaaaaaaaccaaccaaccaaccaaacaaacacaaaaacacatttatcctaatgttttttatatatccttagtcccaattgctttcttttctatgcctttttatttcattttttaaaaggatttttttcaaaataattatagacacaggaagttgcaaaagcagtaccaagaatttctcgactcttaaaaattattgaaggccttggctgggtgcggtggctcacgcttgtaatcctagcactttgggaggctgaagtgggcagatctcttgaggtcaggagtttgagaccagcctggccaaccagcctagtttctttagtagagaaaccccacatgcctgtagtcccagccactcgggaggctgaggcaggagaatcacttgaaccyggaaggcagaggttacagtgagccaagattgcacctctgcactccagtctggatgacagagagtccatctcaaaaaaawaaaaattactgaaggccttagagagcttttgtggattacatctgttgatatttatcacattagaaataaaagctgaaatgttttaaatgaacagttcatgttaacataagtaacattacacttatgaaaaataactattttctcaaacaaaaaattttagttaagaatcttattggcttccatttttgcaaatctctgtaatgtctggcttgacagaaaacagatggactcttgtagcrgttttctgcattcacttgttttttcgtttgtttgtttgtttttcttttttagcctcccagggcttcctcgctatgtgatgccttgttttattgaagtttatgaagaaaactgggcaacacagtgagatcccatctctacaaaaaataaaaaacttagccgggcgtggtagcacatgcccgtagtcccagctactcaagaggctgaggtgggaggattgcttgaacccaggaggytgaggctgcagtgagctaggatcacaccactgcactccagtctggatgacagagaaagaccctgtctcaaaaaaacaaaaaaaaagttttcactcagtgtctccctgaaaagtcattgggaacccctgggggtctacatttcaagaaccattcctctggatcggggtttctcagtcttggccttgttcccgtgtggctggccgtcctgtgcacgggaggattttagcagtatccccatagcctttacccactagatgccagaattccaccccccacctggtagttgtggcaaccaaaaatatctccagatacttccaaatgcctcccctactcccacccccaacagggacaaaaccgtctctggttgggaactactgctgtgagatcttaggtgacaactaagtttcatcttgttggggctgatttagaagccacatccagtttcacagaacggtgcatcaggattgattagcaggctggccgcggtggcttgtgcctgtaatcccagcactttgggaggccgaggcagctggatcacctgaggtcaggggttcaagaccaacctggccaacatggtgaaaccccgtctctaccaaaaatacaaaaattagcaagccatggtggcatgcgcctgtaatcccagctactcaagaggctgaggcaggggagttgcttgaacctgggagacggaggttgcagtgagttgagactgagccactgcactccaacctgggcaacagagcaagacttcgactcaaaaaaaaaaaaaaaaagagagctattgattagcaatgtctgccatgagtgcaggagggagagtaacagtgcagtgtgctgggattgatgaatgatgtctactacagatgcagaagaagaagcaccaggtacagcgggggtggccccgtataggtctcagctagctgaggcccctggggctctgtatgccagatggcccctgtccttgcctacttcttccttctgggctcctcttcccgtaggtgttcattgaggatgtcagcagggagtttgtggaggagttcatctggccggccatccagtccagcgcactgtatgaggacygctacctcctgggcacctctcttgccaggccctgcatcgcccgcaaacaagtggaaatcgcccagckggagggggccaagtatgtgtcccacggygccacaggaaaggtgaggcacctgggaagggccgggcagagggagatggaggcggaggggtgtgggaaggagatgagcacccctcgagcggtttcctggtgtgcctccggggcagacttggtgcaaggcagctacatggctttgtttagaccccaatgagaggggtaacagctcgcccctgcgctctgtgcactgtggcacctgaaygcccattctgagtcctcacctccaccttctgctgtgggagcgatgtcaccccatttggcagacttgctgctgaggcctggggacattgtccaaggtcgcattggccaaggtcactgcgtgagtcccccaggggacacgcaggaaagtgttgaaaaccctgagttggcagagtagggttcaaaggcagctctgctgctggcttgccgtgtgtcctcagccagggcccttctccccttcctgaacctcagtttcttcatttgcaagatggggctcatgccatgtcttagtttcccagggcgagggtaacaaaatgtctcaaactggtggcttagaacacagaactgttctgcctcatggttctggaggcctgaggtccatagtgagggcatgggcagggccacgcagcctctgaaggtgccaggaagcctccggctcaggcctctctccagcttccagtggcctctggtgtcccttagcgtgtggctgcgtcactcctgtccttccgtcctccatcttcccaagctgtcttcttcctgtatctctgcattgtcttccctctgcttgtctgtttaccttccccttgctacaggaacccgtcttggattagggcccttcaatgacctcatcttaacttggttactttttgtgtgtgtgtgtgggggagagggacaaagtctcactctgacgcccaggctggagtgcagtggctcgatcttggctcactgcaacctctgcctcccagattgaagcaattctcctgcctcagcctcctgagtagctgggattacaggtgtgtaccccaccacacccggctaattttttgtatttttagtagagacggggtttcgccatgttgggcaggctggtcttgaactcctgacctcaaatgatccaccagccttggcctcccaaagcactgggattacaggcgtgggccaccatgcccagccttaacttggttatttctgttaagaccacatgaggccacattcggagggactggggttaggacttgaacccattattttgtggaaacacaaatcaacccatcccgtaccccttccctccgggccgtgtgtcccagtgcagactgcggggtccccgtggggtgcaagacaggaagccccctgcctgctgctcttcggaaggcagtccttgagaaaccagattcctgacaatgttggcaactgtcagccgatgtttttataaagacccaagtcatgagctctcagtcagcggacagyatgccaagagcctggtacaggaattgactgtttaccaaccccacagtcagaaggctcggaaactccccagtgacggggagctcactacctcgcctgcccgggctggtcagggtgctgatggtgggaagtcctggctcactgtgggaggtcctggctcactgtggtgcagggacacacacagctaagatgatgatggaggagacgcggttgatttgagggtggcctgggagacagccacccaccaggatggcacctgtcatgtctttgaaagtccaagtgttcatttcttcaccggagcactggttcagcaagcttgcactgggtatctgctgggagttgggtgcttgctggcattggcacagtgctaacttcttgggctcattgcgtaccttcagagagcccatttcctggcaagagaagagaaaatggatgtgtgatgaggaatgggagtggggccaggggtctgtgccagggaactgygggagcagcaggcaggggctgaggatgagtctagaggagtgaataatggcatggaagagtgtgagaggcagagggaacagcctgtggaaaggcttagagccaagaggccctgaaggacagtctgtctggggctgtggagcaggagctattgctgtgrgggaggcaatagggccaggactgggctgaggccatgctgggaggtttggcttcatcctgagggcaactgattagtgggtggaaggaggtctcaggttggatggaggtggccagtgactrccccagcgagatgctggggaagagacaggggagagcttctcacagactgcggccttggtttttactgtcactccagctgtggatgatgggatggtaggaaaccaggcaaggaggtttgggcgggcctgagctgttgggcaggaccgtgtgtatgctgccatctgtgcaaaggtggtggcagaggaggagaacccagaggatcaggactgggcgacacagcgagactctgtcccaaacaaaaaaaaaagctcccgacccatctgccttaatggaaagagctggatcgtgagcttcctatcccagaaggcatacaagccgagggcaggggatcagaattctgggaggggtcctgccctcaggtctttccaacggtaccattaaggttcagtagggcggcattcaggtctggtggagtgcatgggtgggtgggtgagtatgggtgggtcggctmtggctcaggcagttcccgggtccatgcggagacccccaccccggaccagcccacatttagcctgcaacagcctcccgcagccgtgtgcgcccctcctccatgtggccaccagagggcgccagaggcttgggtttgaggccttgggggccracaaaggcgggaggaggtggcggcaccaccggggtcctctgttccccatcctggacctgcagggcgtggttctgaggagaacgcccccgcaagctagtgctatggccgctcgggacttgggggcgtccctgcattcacactcagaagacccaacagggacggactccggggatgccrgggagtaggtgctacctggcacagccacctctttcctggggttgacaggcaaggcgtacttctgcgcctcagtgtccctttatgacagtacccaggaaacccccaacagcctctggagacaatttccgagaactgggggtrtgagtggagaaccaggaaggctgggagcgaggggaatccaaggccttggaggtgctggtccagccttcaggcatttaccccctgagtaaccacccagcaccaccatcccatgagtatccacccagcactgccccgggcgccatcacgggggacgggccargtggaggctttcgggtctttgrgctcagggaaggtgacagtgaaatgttggggggacmacggattggcctgggatgtgagggggaagggcatcctgtttgctggaaccgcctgagcccagccctgaaggcagaggcggaggcagcctcccttcccagcaccccgtccagacagcacctggtgcagaaattgagccgcactctcccctcccatgccctgctgccagccccacccctgcccacccagagagctgcaccgaagctggggtggcccttgcggggctcctctctccccctagttttggaagaggggcctggaaatatgattctgagactctrgccggggagcgagagttttgtaaatggcaccatctgtatgggtgccccagggcagatgggagaccccaggccccccagtcccagtgggaccgtgtttacatgcatgtttacacacgtgtgcacaaatatcagcatgcggacactcgtgtgtgagacactacatcctccttctccccggaaagctgccaggagctgccctggtgctggggtcttggggttcagagggggaaggattagactggcctccttggctcttgcctgagacgagggcagagtttgaaccaaggaagcgtttgtttggcctcttcgagggtctctggctcctgaacagatgggtgtccgcatggcagcatctggatgggcagacagcagcccagccgtgcctggctggtgaggcacaagccgtctttgtgttggggaaacatgaagctgtgggggaaaatagctgggccatgcaacgtcggaccatgccttaccatctaaaatgaggctgtcttttagttgctccaggaacggggccggctgggggtcagcaggcaaatgtggccgcccccacctcagtgtcctcatccgtaagatgggactaatagaacctgcctcctggggctgctcaaaggattcagtgagttaattatgcatggagctcagctgggaagcctgagtgtgaaccgttaggatgagcgagtttgctgtgtggccctgggcaagtggctgcacctctctgagcttcactttcctcacccataaaatatggctaaaaatccccctggccctgggggcctctctgagtgacagcacatagtaggygctcactaaaggggctgcatggagggtgagtgaggccagcccaaggcctgtgccgcacacacagctcccagctctgcagagaggctgaaccctggattctgtgccacctgacgagagtctggaaaatagcatgtaattcccaccgctgcctggctgcgcccatgcagttttcacagtaggcaaaaggtccctctgtcatttccacagcgcttaagtctccctctgggctgccgagcccacggggaagcaggagacgtgcgcggccattttctctctggggacagagctgggctggcggatgcctgcgctgaccccggcctcctcctcctcggcatcagtgtggacggtggtcccggctatgtcgggggtaacgttcacagctcagtggggtgttgaggtgtctccatttgcccacagaggatgcaggcgaggcaacctgcccgagggggtggctgtggtgctggggacctgggcttgggtcccgggcctgccctggctgtgtgtccttggactggttcctttcccttcctgggcctcagtttccctctctgtgcagagaagagctgaggagcaaaaggccctcagtggtcacctagttccacctcctccctgacaccagccattgaagagatgcggaaactgaggctcagagaggtgacagggttcccaaatgtatgggtatgggggagtccaagcaccctggtgccccagccctgaagtgagcttgatttggggcagggcagggtcagcaatgtgggggccttgaggaagagactatagtgcgagctctggggctgcaggagcagggcctggccccccaggtcttgccagtggctgggcctccagctccagggggtcagatgtgtcctgcacccacccacgtgacatgtgtgccctctcctatactctgccatgtccccagacgtgcacatctccctcctgccacatgcccacacatacacgacctacactgcatgacctcacatgtgtacacgctctgcccagctctgtctccgccacgggctgtccttgtcctcacgtcctcccccagactccagaacccccatcctgtggctcctgacagccctctgttctgcattgcaggggaacgatcaggtccggtttgagctcagctgctactcactggccccccagataaaggtaggatgtggctcctccccttagcagggagcactagcatctgcagcacctgatggggaggagggcacagggttctgggagattccacakgacaggcacagaatctcctccgtggcaggggtgcccatcgggtggacagcctgctggggaggctcccttcgctggggccagctccaggggacacactttcttccccgccattcattcttcccggagaggctgtccaggtgctggggcacgggatagaaagtccctgccactcttcagccacatccctggcatcccaggtgtgggcaggcatggctctggcaccccaggtgcgggcagggatggctctggcaccccaggtgcgggtggggatggctctgaaacgtggttgctggtgtctgggatgctcagagccctccgagccccagtcagagcccccagctatgcctggctcctccccaggccacctgtgcctggtccccagcatctcttgagcctttcctggggtgggaatcaccaggatctyagggcctcaaccgccctggcccgtggcatgtcacccaggcaggagggcacctgtgggtattgcccagactgctactaccatccccacccctccagcttgaccttggacctggcctgcgtccatgcatgaatgatggacacgttccttccttcactcgctagctcatccttcatccagtgtctactgagcacccactcagctccaggggtgccgagtgcagggcccagggcagggccgagcagtgggagtttgaggcacactgccgctgcaagctgcccaatttttctagtagccatatatataatatataaatatttttatataatatgtattacatataaatacatatgttttatatatatatatatatatatwttttttttttctttttctggagactcgctctgtcacccaggctggagtgcagtggcacaatctcactgcaacctctgcctcccaagttcaagcaattctccctgactcagctcctgaataactgggactataggcatgcgccaccacacctggggtttcagcattttggccaggctggtcttgaactcctgacctcgtgatctgcccgccttgggctcccaaagtgctgggattacaggcgtgagccactgcacccrgctgtagtagccatattaaaaaatagaaaaatgaaacaagtgacatgattttaataacatgttttaccgaaaccgatatatccaaaatrttatcattcctcctataatcaatgtaaaaaaataattattaatgtttacattcttttttcttctgtgttgagtctgcaagacccagaatgtgctgcatgcaggcatgtctcgctagctggctggatttcaggtgctctgaatggccacccgtggcttgtggccacctgtgggcagcacaggccgggactgagctcttttgaggccgctttgggctcaagctctggaagagttgccccctcctaagcccccaaggggctcacaggagtttccattttgttctttctaagaggaatctctttccccgtccctttaaccagctggtagctcttgggatgcgtggcctggaggtgagccgtaatgagctctaatgatctgttttgaccccagacaccaggcagctcagtggctgggacagtagctgcttgttgacttgctgccagcgaggccgcaggacggggccctccctcggttcccacagcagcttgtggggccagggtgtccagtttcgaggtctttgtctgcagaggccaagcccaggcactgagatgggattggggcaggggccaagctgctccaggagctgggagtaggrctgtggtcttcccatggctgctctgaggggctgaggaggtggcgggccccttccattgccctgcaccactgtcagctccacggcccagcagccaaatgacatctccacccccacacacacatgcccccgagtcctgctcagaggcaggggcctggtgagctccagggctgagtcgggggctctttttaccagctcaggccgaggggctcaaggggaatgagcttggtccctcagccaggctcagagtcttcccccacttctttcccttccacacccagagaagtgggtggggggcagcctatgcctctctgggcccccgaccacacgtggggccaggccagcagcggcagctctgtggactctccctgggtcacggcagtggccctgtggctgaaggtgctggcaaggaccatgaaccccgtctagttcaaactctcaggtctcatctggggagactgaggcccarggaacagggacccccttctcaccccaacacaccaccattctgccatggagtgcaggctccgtccagccagccccggtgagggagtctgtgtccttcccctccttcatggggctccctctcaccctcacaacagcatcctctctggggacatgctggagacccccatgggcccctcccaggagaggccagctctgcagcttacaggccaggggaagcccacagctcggccctcccggctctgaycccttgtcctatgtccaggtcattgctccctggaggatgcctgaattctacaaccggttcaagggccgcaatgacctgatggagtacgcaaaggtatggccgagtctccccaccacccccaacctttccctatagcccccttcccgggcacgtccctgctgggggctgtctgagccmgtggcctaggccgggactgaccccatgtgatgggggattgaacttccaccccagctgcctacacacgtggcctctgtcccctgggctgaccccacagaggtgtggtcatctgccagcccgttgccagggcggagccgctctgaggccatttcccagtcccccgagccagaggacacagggctcactctctctcctgctccctgggaggcggagaccagagccctgcttgccacctccgcagtgtgtgtgtcttggtgtgtgtcacttggggggatggctgggggatgtgatggccggccggggggatgtgatcgggagctgttctcccaattccctggatactaattgcccctagcgctttcccygggaacaggtaggcgctccaagggacagtcgcagacaaagccttttatggcaccagccctttttgaagtacaagttgcaataaaacatattagaagttttgcatcaagatccttagccgctccccagggcacctttctttttagcgactcgatggcagcccttgacaaacagcctcaatcaatcaggccggggaaaagcaactcagcgcacacaccagaaaattgctcaggtttttaaatagcagtcgccaaggctggctgtgagctctcgctgcagccaaggtgccgcgtggtaggggaggcggcagggacgcagccctgcccccgccgccagcaacccattaagacctggagtgctgggagggaagaccttctccaccatctgttgttttattattaagaggggagtttacaagagcaagcccatatgttgccaaacaaattgtcaaatagcagagctattaagggagccgggttggtgaggtttctcccctggtctccttgatgatatagaatatgaagcgtgtttcatctttaagaataatgaattggagcccccacccagctctaccctcacgcctcgagtcctggatagagaggggcagggccgacccatacgttgccctttctttccgttaagtccccagacaaaagcagcttctggtttttctagcatagatgagtctcaggagcacactgctgtccttccttctcaggttttgaggagaaggtgctgagctcagcttccatcccaaataaccttttgagccggaaaagtttgccagggaaagatgagcatggccccctcggccacctaccctctcctggagatgggtttcatcagaaatgactgtggggaatctgagcacgttctagaaggaggcagaggcagtgtttctgcacccaggaaatgtcagaatgactgagcagtgatgaggcctcctccaaaattctgagccaggcaggatctgagatggatgacacaaaaatcaatggggctttcaaaaatctctgctttcaagaygcttcggtagccaaggcaaaaaggcgccagaggactcataaaaaacatgcatttgcttcgctggccatcctctcccaacccatcrtccaacggaaaaacactcagaaccaccccatccttgtcactgtcaccataatttaaaaaaaaattttttttagagacagtgtctcactctgtcacccaggttggagtgcagtggcacaatcctagctcattgcagcctcaacctcctgggctcatctgaccctcctacctcagcctcctgagtagctggaactacaaacrtgccctagtacatctggctaatttttgtttttyatatatktatttatttatttttttacagacagggtctcaccatgttgcccaggctggtcttgaactcctgaactcaagtaatccaccctccttggcctccccaaagtattgggattgcaggtgtgagccaccacacccagctttggctaatttttaaatttttttttgtagagacagggtcttgctatactgcccagcctggctataattattatttttaaagccagactacaaggtgggagctagaaacaggatggtctcacgttgtctacatgttggagatcgttttgttttttctcctcaattacaatgagagtgtgaggggaggcacctcgggaccgagagaggctgggaaacacaaatctctttggtcttgggagggtcattgtcattggcccctgttgctttcctccccgccctttagcctctccttgctcctggacggaggtccgctgagaagggaggcaaaggttctttcacgccaccgcccaaaaacagaggctccacggagcctggccggctgctcttcttagcacccagctgctgagctgagtgaggagcgaggacggagcccagcaggccaccaggacatctctgctggagagtccagtcttgccttgcacagggtccgggtacccatgcctggccaagggcacagggcgagtgtgtgggctgaagagtcttcaaattctagagtagatcgtgggctgtgttttgtttttttaaatttcagttttcacgtgtaatatggtaactgttgatgagataatctacacaaactaaggctcttaggggcccttagtgattttttctttctcttcttttttttttcttttttgagatagagtctcactctgtcacccaagctggggtgcaatggcactatctcagctcactgcagcctctgcctcccaagttcaagtgatgctcctacctcagtctcccaagtagctgggactacaggcgcctgccaccatgccaggctaatttttgttatctttagtagagataaggttttaccatgttggccagactggtcttgaactcctgacctcaagtgagccactgcacctggccttgtaggctgttttaaaatgagtctcctggctttctagaaaaccccgaaaccagagcatttagcctcattttaatgttaaggtggtgatggggaaacagctgctccctgcaggaggcctctagaatctcaccatcttgggaatgagcctgagtggggtcgatcccatcaggagagagatgggagggtgacccggtgggggctgcctgtggttcccacagggatccagtggggctgaggggctgaaggggctcagaggcagagcatccagtctcgctggctctgaggggctgggtggggccccttcagtgcaccctgtgccctataagcttggggccaggagagcagtgccaggtgtccgagtgcaggaggaggctggagtgcacgagctggattccagtcgggcgtcatcaagggtggtgcgggtccccagggygacaagcctcatcttcttcctcctcttaaggctgagtcaggtgggccttccatgcgtgacctgcagccctcttagcctgggcctcctgggcagaggtgggtgtcctcctgtaacaacagactgggccatttaggaagcgaaacagagccagagccgagtgccttggagacgggatctgctgggtgttccccttctagggtctgcagagtgatgtgtgtggctgttgcgccaggcccagggaggggtgcccccagaaggtgtgggccatgagctaaaagctctccctgcatcctacctgtcctggggtccacaggaagcactgcctgggctctggtgccaggtgccccggtccacagtgcgagcgggttcacacaagccccagctcgtagggtggtggcggggctggttggctggtgccgggagacctggctgggcatggcacctgcgtgcttgctcagtgcttcaggggtccttgagatgtagactcaaagtcttctggaaggaacctccaaggtcagcattgcagacacacggtcctgcagtttctctggggcatgtccagcaatagggtccccccagggaggtgaccgtgaccaacactaggaggtagccagggtcttgtctgaatgggggccagagtttggggctctctgaaaaagcagggcccctgggacggacctcacgcgtccttccagcygccttacctccacctgtgctgtctctttcctgcagcaacaygggattcccatcccggtcactcccaagaacccgtggagcatggatgagaacctcatgcacatyaggtaaatcccaccctccacccatccttggtcctcccgggctcattccaaaggacrgccacgcgctgccccaggacgtcctggtgacccycacaccagtggtccctgccctcggggagctgagaggcctcaggcaggacagaggtcgaagcgcccggctcatgcactgccctcattgcagttctgctgagtgttgttggggagatagatcatggggacccggcctcatcaggagtatcaaggagggcttcttagaggaggtggcattcaaggatggagaagaggcccagatgtggcacaggggaagagtgtttaaggcagaggcagaggcccccccaaccacgtgcagagccccggggcagtccccagaagacaggtaaaggccccagctctttcttacaacctgcagctccacgggtgactatggtgggcccagaatgtttcaggcaggttggcagcagatgctctggcagagagtaaaaggcagaccaggctcatgggcacaatggggtgtgtgtgttgggggatggggacatgccatgtccctccccagctgaccctgtctttcctttcccctccgcagctacgaggctggaatcctggagaaccccaaggtaatcccccaaaccccrtctcctcccagctggccacctttggtggtagcagctccatgccgatgctgtctgatgtatttrtagcctaatttgaaatttcacgggggccagccgtggggctggggccgagccctgcctgtgttccccgacccccgcactggcccccctctgcccaccrtctcctcgctgcatttgaagacctccccccgcccttcctcttctaattgcctctgggatgaacaggggaaggaaatatctcagggcagcatagagagagagtgtgattgtgagacaataaagaagtaattaggcagatgagacacttgggggagggcccagcctgtgcccaccagctcccaggctgtgctgctggagttttggttgtggggggyggggggaggcatggctgagagccctaggccccatttgtctggatccgtgttgcacacccgccaccaccggccaccctgatccggtcccaagcttcccgggcgggctggactgggccctcagctctgtttgaagtttcgggtttctctcccgggggtagggggcttctttgtgtctacccctgcccactgtgggaggtgggggaggcagggccaaatctatcatgggaagagaaaaatctctttgtccctgagggaatgtgtcttagttcccgggcccagccccacaccccggggaggctggtttggaggcgggaaaagtgtgctttttgaggggatgcagctgggcctgggggaatcaagaagaccagctggaggggagggtgcccggggaggtttggtgaaattggggagcgccagagccccgcccaggatcccccagggcccgggcgtctgtcactctcacgcccgcgtgccgccccctggtcggtgttggctgtaatatcacatggcagccaccatgtctggggagcgggccgggggtggcattgtcctggctcagttcctaggacactggctgggagcatcctcactttatggttgaggaaactgaggcccgggcaccggctgctcagggcgagggaacgggccctggggctggtgccctccagctctgtggctcccctactgcccacggcccctccctgtccaaacctgtcactcaggagagctgccacccttgccccctgggggctgatggcccctgtgtgtggctgctgcctgctggtcacaggtttttctagttcatgctctgctgaccccacaacactcaggccagccaccctaattagccagtcagtcagctccaagggaggcagggaggccgagcctgcagrgtggcttccaggcagggcatcctctcaggcccgtgggccccaagcatgctgggcaaccactcccggccattctccaagcagcctatggcctctgcaagcagcctatgggggcagagaggaggcccccccagaatagaggacctcaggattgagaaagcagagcaaggccagagggaaatcaccccctcggaccgtgcaggagggcatccggggcctggagcaggttactgagctacggtgggcaggtcctgcgccctcccaggcctcctgtctcatgagggcattgggtggagaagtcagtactaaagagaatctggattaaggatcctgctacctcacccacacttgggtcccagagacaggaaacccgagtctaaatcccaacttttcttcttattgctgtgcaacctcgagcaagttacccaacctctctgagcctccagtactccttgcccaaagtgggaaaacacagcacctccctcctagggcatctaaagcgcttggcctgtctcagggcaagccctcagtcatgcagctgggggtcccatgctacctcttcatgggaggaagggtccaaggtcctctcagggacccctctcaagaaaggctgggctgggctaagctgggtgtgagtcaggggaaacatcgttcctgctgagaggcccggggcacccagagtcccacccaggcacccagagtccagtcactctggaaagaagtttgccccagccatgcagactccccaagggctttgtgctgagggtggggctcaacgtcaggacgcacccttgcatccctggacctggcagccctgtccccctcgggatgagctcaggggaacagagcctggggaacccgtgcccctccccctctccaaaagaagccaggagacctgcggaagggagggcttgaaggcagatggctgagccattttctgcctccgtgagggctgattgaagggcaatgaggcagctaatgcgaagaaagatagaaatttacttgctttaacttcatacggtccacagtgaaagagttcattcagtcrccggcccgccatagctgatggatgaataaaccatttgcggcatcgatcatgcctctacatcatggtttagttcatgggccatttgcttccaatttctccttctcggggcctgtttcatgctttctttcgccytstccccctagcccccaccccgactctctctctctctttttcttcactctcttccctcccccgcacccccccccccrcagatgacattggaagtgagccctcccgctgggagggataaatagatggcattgatacttggcaacaaactatttgtcattagaactgggcttttaggaaggagagtaaaaagaaggcaggcgctcgagccmccgcggaatgcaaagcaaatgtcattttatttctatttagttattttatttaatcggcgctgtcaggtgcctgcccgacagctgcctctgacttccgctgcggtctgcagaaactcgtcctccagtcttcccatcccctctccttccaaatgcacacactgtcagcctccacttcggtctggggctccctcaggaagtgtggcgggagagaaagtgacaagcaacgcattgaaaacagttgacagtcgggcccakcgcaggtggaggtgggagagagctgggcttgggtgggagtggggccctcgtaccggcaccctggttggaggcttgggggagtcccaggcagctggagatggggctgtggagttgtgtggtcaccccaagatccagtccagttcactttacctttttgctgaggatgagccttgggacccgtctgtgcccagggaatgctgcagttggcagggtgggccagccctgatgcctrcctgtggctgtgatgctggctggctctggccacaggcctcaccctgtttctcagcccaggttactacagcagctgggaaccagcataaggtggcggaaagagtccctgtgtttagcttccaaagcatggtttggagaagccacctctcagccttggctttccctgtggtccatagaggcatcaggctgggggtccctcagggcccctcctacctcctggagtctgtcttcagggaargttctgggttcttgttcctgccccacaaatgggcactgatgcagggatacagctggccctgagtcacatcgtaccttggaggtgggggtggaggatccaccacagtccctgtcttagaaggatcaattgtcctggtttgcccaggactaagaggtttcttgggacaaaggactttcagtgctaaaaccaggagaaatcagggcacttggtcactctaacacagagccacaggcaaatgaccacaggtgagcttccaaggcacttatgtagccccatcccatgcagaatraggaggaggctgggccgagcatgtacccccagagtgaatttcagctgccctttccacctgcagagcatgttcccgtttgtaccaggccttccctgacattttcctgtgtgttttcatgtccaattaaaaaatatatatatactacttaaattgtaagatggccaagggcaggtatcattttccccattttacagatgaggaaactgaggctggaggaagtgaagcttccccaaggccccccagcctgagctcttgatcctggcacggggtaatgcccatcactctaaaatacaatgtgtatttggcgaggacctcgcggggctcctgtcctgagtgccagggaacaagtcccacgtggtctctgcctgcacagaactcacagttgtagctccagtccctcccgctcagcctcaatttcttcatctgttgatggggtaagagcgcttgaccttcttaccaaatggggctgctgagaactcagactgcagatgggaagcratacgtgaatgtgtgcaaggtgttttttttttttttttttttggtgggggggtgggggacggaatcttgctctctcacccaggctggagtgcagtggtgcaatctcggctcactgcaacctccgcctcccaggttcaagcaattctcctgcctcagcctcctgagtagctgggactacaggcgcatgccgccatacccggataatttcttttgtattttagtagagatggggtttcaccgcgttgcccaggctggtgtcgaactcctgagctcaggcagtccacccacctcagcctcccaaagtgctaggattacaggtgtgagccactgtgcccagccgtctgcaaggtttttaaagcaaagatgagacagcagttcctggatgtcagcaggtgaacaaggaccccaggcacaggatgcccacaggagggacctgagcagtcaggcccaagaggccccagtccccacagtggcaaatgtccaagccacggcctgggggagctggggcctccgaaggtgggagggaatttcgagagtttcaggcaacacgcagcccctccaccactgcatcagacgagaggcccattttccaacacgcccaagaaaaaatatacataaaggttgatgtgttttcaaatgggtttttgctttgctcttctcttttctccctgtgagtattaaccttggggaccctggggacggctcggcttgccagagcacctgctggggtcacaggcagtcattagctttgcggtcagtgcagaataaaccccaatcccgagccggcgagagcgtgcgtgccgctcctgggaagccctcggaacgccgccttgctcctccaaagtcacactttttcctgcctgacttgttcctctccagctattctacctccagctgtgggggcgtcgaagaaaaagatgagatcaagttgaggggaaaaattgtctgatttctccagccctttgtttcccaggcctctggcaagcgaggctggtgctaggctgagggctggggaccgggggatctgccggaccccaccagctggtggggaaatggacagaggagaggggtgcagatccccgcgggaggtgggctgtagggtgtccagggactggtatgtcatctgcccaccactttctgtcttttttcagaaccaagcgcctccaggtctctacrcgaagacccaggacccagccaaagcccccaacacccctgacattctcgagatygagttcaaaaaaggtaygtgcccacctgttgggactcgaagggggttgacttttggggccctggctcctttcccctccctgcctgggaacctaggccctctttacccccgccctgcrttcctggaagctagagttcaggcaggggcttcaaggtaacgcacagcccacctccctggacagtacaacccatggaccatggatgcctctaggcttgggaggaacatgccctcggctacccatcactcgggttcatgggcaccaggtctggaatgagagcgctctagtccctgaacagccactcaactttcctgggcctcagtttcctcagctgtatctgaggatgaaagagtgcctgctgttttcctggggtagaatgaggcctgcaagggagcgtccagccctgggccctgaccccggaaggtgctcagtaaacggtgagtgttggcgagctggcctcatggacccctgggaccccacatggaaagccttcgccagtcttcattgagccgctctgggcctcaccctgctgaccccacgttcaaagctgcggccactcttgctcccctcggcagtggaggctgtcctgatcgctccctccttctcactgctgtcaacaagaagcgtttgctgacctggcctgagtgcctgggtgcctgagcttgggagagggcatctcttggcctggaggaaggatggagaagcgaggcatgcccgcctgggctcagagggagggctcagagggcgggctcagagggcctgaaggggtaccttttcaggaggctggagtgatcagggaggcttcctggaggaggtggtgctgggcacaggggcacccaaggaccaggcggggrgctggcccattcgtccacaaagtggctgcccacactggagctgggatgagagggagagaggctcgtggagaggcctggccyggctctggcgctcggctcttaccccggctaccacagaaaggaggatagggtggggaagcctcaggccggtggggaggcagagctgcagatccccctctcccccttgctggtgtgaccttgacagccagcttcaccatgctgggccttgggtgcactcatcaaaaaacggaccacaggcatgatgctcacaggtgcccggcatggtatgtggaatggggtgtcggaggctaagtgctttaataatctgcctcttctgggcctttcccaagagcttggccaagccagcgactgtcttccttgctccccttcatctgtcccaacctactggggggccaaagaggaccccaaaggcagccgggcccccaggcctgtttgcaggcacagagcctccctttaggatcatctctgagaagatggtgggagtggccccagcagcacctcctggctccctgcacagggctcccaggagcctggagagccgtgagggtgggaggcgggtggcaggctgcggagggtcctgggcaccaggctctggcagccctgcccgaggaccagggcagctccgcaggctgagctggagaagaaacgtgacctattgtcatgatttggggactgtctggaagaagaaaaaaagaccggaggaaccctcccctggctagtgcccattcactctctagttaatttatttgaagttttaatctaattattaactattttaaaggctaagaggctttctccagcagcagcaccaacaatgtcacctcttctcccgggcaggccccatctaaggccccagcgaaggccgataataggaccggggagggagagaaagggagagaggagaggcggggggtggtgagaggggcttaaggttcattattgggcagacttacatttaatagcaatttacaaccaagttataaaacccctggaaatgggggttaagaatggcgaggctgacagcgccttgagtgaagcccctccaagcggcgcctggctaataaagcctcgaaagccgctattgaggcctgattggcacccgatggctcgctccatggtaatgagccgggcagatgggtgggggattagccgccaactttgaacagcttttctttgtcactgtttcagctctcttgttagccccaatacatttattgctcatttcacaccgctcgagaaagtgccccttgctattcaaagtcaaccccgaacccacccactgcccccmcccaaccccttccctcctgccaccccggacccagctcctcggattcagggacgctgccgacacctcgcctgctggagcgggcaccgtgtcacccccatcaatcagatggctgcgtgtgggtctggggtacagggtcggggcrcggggtccgcctgacagacgtggcagggggctgtgtgtgtgtgtgtgtgtgtgtgagcgagtatgtgtgtgcttgagcccagccacacctcggccaggcggcccccgggtgactggtgggacagaaggtgctcccggcgtaagacaatggtggagcgtgaaattcaattagttcagggcctggttccaatttcacagcccctaaatgcaaaaggggcaaagagaatgggagggtgggggagagcgtttttattgcattttctctttcattctggggggctttytcgccccttctctccctgcagcaggcctcaacctgcacagggcttttgaaggagtcatttggagtccatatctgtcacatccatttaaggcgtttcgggaggagggagagggtggggtggcgggtrcagactcctccgctgagccgggcccagaggcccactgccctctcttcccaccctaggggtccctgtgaaggtgaccaacgtcaaggatggcaccacccaccagacctccttggagctcttcatgtacctgaacgaagtcgcgtgagtgtctgcagccctgtccggcctcttgggaaccgccgtctcgggcgagcacgagcctggaccgttgcagctaatggttgtggctgaggctcaggggtgcggagcacaggccatgtcccttccccatagccacagagtttcccggaccagggggacccatttggcaggagaggctccgtgktccttagccttggaagataacaaccccaggaggtctcctgcctccaagggatcattaggccggggctctcaggcccttggctggatgggaggccaggatagaaggaaagggagcagtagttagctgtggcgctaggcagggccccaggacacagggaacggaaggaacaatgtgaactcacacctgggcaatccctgctctctctgggcctcagtttccccacctgtccagtgggcacctggactaggtgacccggctcagatgtcctcttgagtcttagatcctgaaatgctgcctaatgtgtggcctaagctgtgcccaccctgggacagcccagctgggtgggtgactctgagccttgcggtagcgcccgaacctaatggaccagttcttcccacaggggcaagcatggcgtgggccgtattgacatcgtggagaaccgcttcattggaatgaagtcccgaggtgagtctgctcagcctccctcagggcctgcctcgggrcccagcaaacccagagatccctgagacmctgtcccctttggacgctactacccycatgctccgtgggcgaccttgggcacgtcctttcacsacaccccgtgagacygcagtttccctcctgccaagtggggatcgtgggccctttgcccctgactttcagggtgttatgagaagagctgtccaagggctgggagaggcccaggagggcctggggagtctccgaggagcagggaggccagggccaggcctggaggtcaggctgtcttgtgtctggggtgggcaggccgggtgtggaggcagaccgtgcaggcccgatttmgtggtcattaaggccgcatggaggccgccggccaggcagggcgaaaatcctgccaggggtgggcgctgtggctgcacaggcactgggagccggccagggcctaaggacctgtcccagcatcaggcacggctcactggcccttttctccagggatggggctgtgccacagttggggctgtgccgcagttgaggctgagcttcagtgtgacatgcctgccacctcggctggcctctagcctgcctagcctcgtatccgcctgtggctgggcccaggagcagggcagttggtccccaagcaggtgcctctgtcttctcttagtagccaaagcccatgattccctttgtcagccaatcagcatttcatcttgaccacaaccctcctctccaggactcagtttccccattcatacaccaaggggatctcagctccctgagggtctgccagtgtgtgataaagccatgctgtgttctttcttgggggtcctaagagggaaagagcaaggtttcagcagttgcagcccctgaattgggcacctgaatttttatactggtggtggggtcagggcttccygtttcggtaaatgttcaggtctctttgcttagggttgattkgaaaagataccacaaccaaatatcacctggccacggtatagtcacggccccatgtctctcaggctatttttactaagattctaaaatccaaagagagccgatcaccccatgtgggccagaagaaaagggtggtggtccrgagggcaggatgcctgcttctggtctcaggtttgccctgccttgcccaacaaccttggacttgtcatctatcgctaggcctcagtttccccaagtgtaatgcggtaggcgctgggagttgcatcactctggctctgacctgtctgcgtttccctggaaaggcatggcagcatggaccggggcggggacgggcttgcctcgaaagacatgggagcgcggaaggggaggcrggctcgcctctttcttgtggctttagctccttgcttgctgttattcaggagaaacaacctaattgaagctctggggaggccttgagaacaatgttactaattagctgctcctttttatcckggcttacctttgtctcttacctatattaacatgtgattagatgcccctttgtcgcagcctgcccttgggagccagcgcggtgtgcaccctccagggagagctgggagggaccttgaggagccacagaccagcaccccatttacagatgcggaagccagggctggggaggggtgggatagagggcttgcttcaagtcccaggcactttagtggcaggaccaggactgccatctgggcccagagtggcatggagtggagggctaacagcttagactggagttggacagatctgggttcaaactcatgtatggtggcaggaactggtacactggaagtgctccataaatagccatcagtcccccgggcatgtggaatggggacagaagcagcccccatcctctgggagctgtcagtgtggcggggggtggggtgggttccagtattgcacctgtcttatcataataagggcctgccacaggcatgcccttgccatgcctgtggcaggcatcaccagtcaatgctggcattatcctgttgactccagaggtatctcagggctgcttgcaggcactaccaaatgatcaggattggcatacgtgatgaaagtgtattgccttccctattggaaagataaggactggcctgaagtcactgtgaaatggcatcctgtggggtggggcgagtcaagcagagttgagcaaaaatgaactgaaggaggtggttagtgatgaaracctggaatgcactattctgaatgtggaatggtagctgacagcattccacggaggctggacctttttcccagaatgggggcctcatccccgtagaaggtcaaagccatgagatcaacagtctgttccaatccccgtggctccttaccacccacctggggaaagcttcctggakcccagccttcactctgccctggtactttgtgtgtgctgttggaggctctccccaaaagcacagaatttagtcagtgtcgtacagggaagaaaatcgggattctgacggcaagaacttgctgtgtgatcttaggcaagtttctccctctggaactccaattgtcaaggggccagatgaggaggtcgtatcatctccctctgaatgtcctcactcacctattttcttgctttgggttggggagagaagacaaagttgctaggtaattttagggtggtgtcttgtttttatttctctactccaaatatttcatgtgagaaggaaagaggagagacggtaaattagggcactgtggattcccccatgacaaggtttttattaagtgtacagtaatgagagaagctgttaatcgtcaattatattgagggcagaacagaaagatgctattgtccgtatctcggtgtacaaggggaacatgtcatttgtattgattttacaaagctcgtaattgaaattcgttaagggctgatttttttctctggggggcgggggcgggtagggagttgggcagcgccagtgccctgggtctggggtggcctagtcagcggcgctcagggtcagggacagggggctggggaagccgcggctggagtagctttctccgtattgtggctgttcacatgtcattatcacattatctttttaactctggaggggggctaattaagtgaagtaaatgaaatcagtggggaggagaaggggggcaaggcakgccggagggaagccgagggaggccgggaaggagccagcgcatgtccttgtgctcagcctctttctctgtctcctctctggccccagacttctcccgccgctctcccctctccgctctcctcccagccctgcccgtctcacctctgcctgcccccgccttgctcctcctccttgccttcctttcctcctccctctctccctttcctcctccctctctccctttcctcctccttcccctcttccctcccttgcccttccctctttgcacatcctcctccccattccccactctcccctcctgtctcccttcctccttactcctccactttctggcccagaaggaacaagggctgtcacccacttgcccaacgtgcccacccaccatctggaacattccagatggagaatggagggagacctgtgaagcaaaaaggttttcagccccagaggcccacccaggatggggcccgccaggcaccaggagcatagaggatggctagagtcccaccctgacyggcctcccatcaccatggcaactgcttctcaccttggccctggtacctaagaggggagcccttgggctccagccaacccctatgccccacctcttccaaatcacttcttctactttcccaaaggaccagagcctttagtccaggtgccctcacctccagcccaggccccagctgagctggcggatcccactcaattctgcaaaattgctcattcygcctaacctggcagcctcagggacagaygagaagaatttgggccacagtagctgtttggttcccacctctttctgcttggtccactctccccccagccacccctggccacccctagatccttgcccgtctccccactccccgctgcacctttcttggcagtaattatggtgtgattgaagctgctccacagagaactgctgacacctctgtctttttcctgtaaacacggggagatgaaaatagacacttggagctgctgtgtgtgtcactccaaagatgtccgttgtctcttccacggcaacacagaggctcagctgtcatttcctccttctctctgcgcagtggtttgtatgccgactgtcaaaagccccaaattcatagtcttttagcatcaggtttctgtcactgttttttttttccagaagaaacacacagaaatcatctgtaccccctacccctgtggagaggagarggaagagctttaaacgcacacacacacacacacacacacacacacacgtgcgcgcgcgcgcgtcggcagcaacctaaaaacaagttttttgatccgtcacaattaacactttcgaagaaaaggagcaggaatattaattgcactggtgtgttttgtggctgcagcctttccccttgcccrtgagccctccggaggctgcctgggagggtggcagccaggaagccggtgctgggggctcaggaagaggagggttctgcctggcctctgcccaccagacattctctgctcccggtggcactggcctcattttcctggggacacctgtgatgggccagtagctggaggaccttggacaagtcacagctcttcctcgagccctgaaccccacctgcgccctcccctctctggactgatgggaggcgatgctgtggcctcgaatgttctcgagacaagactgtcagtaagtagggcacacctggaggacgctctgaacacttacctttgaggtaggtcccaaaggaagttggaatgtcagagcagcaggaacttgcagccttcttgttttccagatgggttgcctgggtctaagagagggggctgagaccggccaaagtcacacagcaaagccaagctgggcaccttctgtaaaggccaagctgggcactttctgtaaagcatggttgtaggactcctggtgcccagctccagccctgcaaatgtartttggactgccctacagttggccgagctgaggacagaaaagcagggaggcgggcctgggtgtctaggagttgaaaatgaggagggctcctgctaccggcctacccaggatggcgccaytacgactctgtggccagtgtaaggatgggctttgcaagtttctggaattttccaaaatgtacccaaactaatcactagaaggcctgtttccaacccgatatgtatccagttctagcatgtgccaggatggaggaccagcaggactttgtcagtgtcgtgctcttgggaaattgctttatttctggtaataaggtttctaggctgattgaaaatttgctcctcgaactttatcgttatatctgccattttggagacagagatttcctgtttctgcacacactggtctttctggacacactgctgaaccattcccctttctggtggcttttttggcrctgtcatgtttgtgtgcggtcatcatgttttgttttgtttctctttcagacagggtcttgttctgtcaccgaggctgtagtgcagtggtacgatcatgactcactgcagcctcaacctcctgggctccagcaatcctcccacctagcatacaccaccacacccagctaatttaccatttttttgtagagacggggtctccctatattgcctgggttggtcttgaactcctgggctgaaacgatcctcccaccttggcgtagtagctaggaccacgggcacatgccaccacgcccagctaatttttttaattttttggtagagatggggtctcactatattgcccaggctggtcttggactcagctcaagcaatcctccctccttggcctcccaaagttctgggattacaggtgtgagcccccgcatacctggcctgtgctaagttctatgtccctgttctccaggctgtctataatgacttttctcagtcattcctctgtttctgctgccatcagcctttttaccccttcctggtttgtggctctgagctrctctgcagaaaatgatgacrgacccatttgaactgttttacaagagtcacggtgaggcctgaggaactcccgagggatttgagggcttggatctctgcataaacttggagagaggccrtttcctaatcagaggtcacaactagattcagacggtggacrtgccgaaggctgcagcccccaccaatgaagcgggatgggctctttcacagcacacgatactcatatttgcacctggttgctctgaggggctttcacaagcatgtcacctgacaccagtatatcaggggtttacagatgagagaaccaagcccccagagaggttcccttctgcccaggaacacggagccatggtgagaaccaagcttttcctccacagcaacagcctggacttgggctttttctctcacgctctggttagcagttgatcactttgccaaaggcccttcgaggccacctggagctgagatgggagaccccggggccgggcccattccccctccagttggctgggtggtattaggcaagccacccccctccccagscctcaggttctcatttgtaaaactggtgtgtgggactagatttaaggtgagtccagagtttgcagaggggcctctgttcctcccagcacaacctctgccatctcttctatatgctgggcttctgccgcaggctgtttgaatattaggttggcagctaacagtcgggagaacacggtaccggattgatcctaatgcaagctctgacatttccgtgattctaagacttaaagatcaaagactggaggagttctccaaggaggaaacttctggttagtgcacgagggctcagcagactcagcctccccagatccccggtaggcttcagagtcaaaaccaatatccttcatggtttttttttttttttaatttaaaactgtggtaaaatacatgtaacataaaatgaaccattttaaaatgcgtaagcgtgccgctcaacggcattaggtcctttcscagggctgtgccactgtgactaccgtccacctccagaacattttctttttgcaaagctgagactctggccccatgaaacactccccattttccctaccccggcccctggcagccaccatttctggctgtatgattttgatgactcgagggacctcgcatgagtggaacatacagtgtttgtttttgtgcctggcctttgtcacttagcgtcacggccttatgttgatgctgtggcatgtgtcaggatttccttccttttttttttttagacagagtcttgctttgtcacccaggctggagtgcagtggtgtgaaatcagctcactgcaacctctgcctcccaggctccagtgatcctcctgcctcagcctcccaagtagctggggctacaggcatgtaccaccatgcccggctaaatttttttgttatttttagtagagacggggtttcaccatgttggccaggctggtcttgaactcctgacctgaggtgatccacctgcctcggcctcccaaagtgctagaattattacagtcatgagccactgtgcccggcccccttccttcttaaggctgaataatattccatcgtatggatggactgcattttgcttcttcactcatccctcgatggacacctgggttgcttccgcctcttggctattgtgattaatgctgctatgaacatgagtgtacaaatcctttctgggtttttttcaagcagccactgtagaaagatgttagtaaattcccaggataactgagaacctgcccttttagtgatgtaacgtatggtggaagaaaggaagctctcggggtagaatccatggagatgggggagctatggcccctgctccacccagacagcagctgcagggcaggcttgcccaagggccagctctgaagttgatgcgagaggtcgcactcctggggcaagagggggcctgggctgtgtgctgtgggcggtcctgcctcttggtgccccactgtcctccaatgcagtaggaccttcccccagacccagctcagcccaagaccaggcatttctgtctcactcggagatcatctgttccaagcaggttgttttccaaatggagggactgggcctgaggtcacaagaggggacttgagcaatcccttctcccctgaccttccagggttgggcctccacggccaggtgacttacagggcagcagacagcactggtgagggactcgggggcctacattcagttcccagctccacctagagcaagtcccttctcctcttgagctcagtttccccatctgcacggtgcggtcagcctaggtgattgcccaagccctctgccaccccagtggcctctggagagacctggccgcaggggccccatgggctgaaggtggcatgtgtgtacacatgtgtacatgtatgtgcacagctgtccccctcccctggctccctggtggaagggaagaagggatatttggggctctgggctctaccgtagtcgctttaattacaggctttcaacctcgggccggtgggcacrcatggggagggaggggttgctgctccgaaaccctgtcattttctagcgtctgagggccccttcaaagggggcatctagacattttctccacaagccgcagagtggactgtcgtggccccagcatgaacataatgacagatgcattttgcagcaagctgggagtgaatgggtccggccggcttgtctcctgtcagacgactcattattattattwtttttttttttgtcatttgctgacagtttgggtttcatgcgtttctctcttttttctccttttccccctgcctggaaaaatggctaggtatctacgagaccccagcaggcaccatcctttaccaygctcatttagacatcgaggccttcaccatggacygggaagtgcgcaaaatcaaacaaggcctgggcttgaaatttgctgagctggtgtataccggtgcgtaagactctatggctgccccctctaaccgcctcacaagggatcccaaagtactatcaggctctcgggcctggccctcccctccgtatcagcaccttcctcccctgccgcccactgccatcctcatgtgagaccccaaaaggtgcaggccaaagggggttgagggaaagtgcagggcatgagggagcaaggggatgctagaacctgccttgccatggggtgtgtccagggagatgcaccggcttcccaaggtgtccggcagcttccaccccctacagtttgcatgactgcagcaatgccaggcactgggcactgtgcggcgacatgcatcaccccgcatggtcctcacaactttcccaggaggtctgcagctccttgtacacgaggaaactgaggctcagaaggaaagcataaaaccagaagtggcctagctgggtttgacccccaagtcaggctgtctccaggaagaacctggacctactccatgaacttgagggagaggctccctggaccaggaactcagccccagaccccagtaccgcaggagccagatcttgaccatgaaaccactggggtggccacagggcctgagccctgtcacacacccagcccatgtgtggaaggaccggtgggtgacagcacctgaggcgggggtgtccccgttttgcaggtgaggagcccgggtttccatgccttggaatccaggcctcctgactccaaaatccaaccctcatgtggtgtaacagaggtccccaaactacagtccctgggtcaaatccagcccgtcacctgtttttgttcagctcatgagctaagaatagtttttacatttttattttatttatttatttatttatttatttgggacggactttcgctcttgttgcccaggctggagtgcaatggtgcgatcttggctcactgcaacctccgcctccctggttcaagcgattctcctgcctgagcctgctgagtgactgggattacaggcatgcgccaccatgcctggctagtttttgtatttttagtagagatggggtttcaccatgttggccaggctggtctcgaactcctgatctcaggtgatccgcccgtcttggcctcccaaagtgctaggattacaggcatgagccactctgtctggccagtttttacatttttaaatggttgggaggaaaaaaaattttttaatgctatttcatgacaaattatataaaattcaagtgttgccgggcacggtggctcaygccaggtgaggtggctgtttctgcattgtctgtggctcccctggagcggcaaggggaggttgagccatttgagagagaccataggacccaaagagcctaaaatattgactctctggcccttcccacccacctccataacatacacatagccctgatttggggcgttacattaaacagctgccctgagctgtgggaggacaggctgctgcctgaggccgatcctcacatcttcgggggcctggacgtcaggggacctgtgcaaagttagtattagttaatcgaatagctacctgggytaagctctcctcccctcgcctctccccctccactcccagattttgtttccttttaagcctcctaatcactgtaactcatctcaggatttcgagagggctcgatggttattggctggcgttatttctccctgccattgttccttgcagctttgaagccaagtttctgcccccgttcccagggacagacaggtgcttaaataccattgtctcctgcaggctttccagcccggcgggattgcgaccccgaaaggaggattttagttacaaagtgagagagtcattaagacgtggcggaggagagagcacctggccgggctgctccggggcctccacggaggctgatcccaccgtggccgcggccacggctgccacttatcctgccatcttgctgctaggctctgagctgggcacctgatggggtattatctaatattagctgcgcagaggtgaggaaacggaggcccccaggtgaagacactcacccaggctctcctggctggtgatgggcagctttgagccggggacaggccagctgtagcggccaagttcccagttactccaacagattccaggatgctcgtgatcaaggggcacggcggcacagacaggggaaccctgggtgtagggcacagtttggctcctggctgcggtcacgatgcctctacactggactggctgggttgagtccctgctctgacagccagcgacaagccctctacatcccaaactgaggtacaatgattaggagacttaaaaggaaacaaaatctcagagtggaggcgagggagagtaggggcttcttctgggtagttatcactaatattaactttgccctggtccgctgacatgcagggccccacaaacatcaagatcggcctcgggcagcaggctgacccccacagctcagagggcctgtttgatgcgattttccccatgagggatacagacatggtatagaccagggctttgcytgatcatgttacttaacttccctaggcctcagttttcccatctgaagagtgggaataacagttctacctgtctggtgggtgaggactaaaagtatgagtatttgtaaagcacctggaacaatgtctggcagacgagtgcttattccagtgcgtgaaataactgcgagcgcccggcgtggtttcccagtgtggaggcgcggcacttggagtcttgcctctggctgggttaatggtcttgagcagggctgtctcttccttgagcctcagtttcccctcctgtcaaataaagggcaccaggctgagggcacgccagggtctcttcccagtcccgtctagctcctgggtggaaagcccaccattctgctgtaatgcttggcttcctcaragcccttgtggtctcggcacagatagggagactgaggcacagggaagccctcctgccccagcctcactcctagaggccctaggttctgtgaccactgccactctgcatctgtgtgtctgtgtgtggctggctggctccctctcctctcccaccattcccaaatttcctggtctggctgtgtgagcttcaggcagactgtctccaggagtggcaaccagggttagcctggcaggaccccagcttcaggaccctggcagggcccagaggagcatctcatctagggggtatagctcacttcttctcccctcacctccatttcttcagcaataaaatgggtataatgtgcaactcacacagaattgctccagttagaaaggatcgcatgtgtttggctgggcctagcagcacgggggaggggtccctctccagctcagccctaagccccacccacagtgatctgcaggtctggggggtgcagggtctcccccattgcagcttatgccaggctcactggcccccaacccaggctgggtccgctgggaaaagaaatctgagcagaagaaccctgtggggcagaggtagaaaattctgagataaagcccaggccagttgctcccacagagatctctgtcctatctctggctccatctcctgcctgtcttccggcctggaaacttaatgggctaattatcccagctccgtcagaaagatggccaagcccaggacaccagggcatggggggctgggagaacatcagtggccccctccacgagggtctcggggtgtgttggaaaaagccctgggccagagttaggagtgcttcatcagacctgggctcttccaaagtcttgctgtgtggccttggacaggctctttccctctctgggcctctctccctgtgtacagtgagggctggcacagagcatcatgttcaaactgcaaatgcaaaacgctttgcgctctgtgcattccctcactgcatccacacaacctctggttagcaatgttttctcactgtgcaaatgaggaaaccgaggcacagggaggttaatcacttgtccaggtgtggctgggatgcggactcacagggtgggacactggagagcaaggactcaacctctactctccgtgcttggccctcccccgcctctgcaagccccaggaccccatcccagaagcctgtcccctttcccacggaggacctctgcaggtgcccccaggggcctgggcctcccacaatagccgcagcccctgggctgacccagccctttatcagggcaggagatcatgcgccatctggccctgcagctgcccaggtgggctcaccttccaggctccatttcaggaaactctagccttgccctgtccctccccccgccatggcctgcctgcctgcctgcctgcctgccccttggtcccagcctccatcagcagaggctagagagaggccgggggcagactggggtctgagcgctacccctccctggcctttagggctctcggggagaggggagggagcatgtttctcaggcacctcctgcccccacctacacaccaagggatgttctggccatagagaaagctccaagtttatcataggaagcagagttgttacaacttgggccaacacaagtcaaatggaggctccccacttccggcctgtgtgatcctggagaagtttcttaacttctctgagcctcccttcctcacccagaaaggggagaggctaagagagtttctctcagagtgctgtctatgaggattcagggagctagcccagatcaaagcctgagcgcagtgctgcttatctatgcagaaatattctatctgcccaggaaaacagcagcaggtgcagaaaacagctcactgattccaaggggtgggctctggccaggactccagttcacagtagcccctaaggctggtgctgctcagtgctaggggctccacatgaaatattactgtgacatccccactcaacagatggggaaacagaggcacagagaggggaaggctatgcatggccatggtctgaaccaccacccagctgcctgcactggacacccatatcaccaagccccaggcagcatgtgcctctgagtcctgtctgaggtcttctgcctcccccggagattagagcctccattgggccagggatggggtccctttaccactgtgtccccagttgctggcctgtggcacttcctgaatgcctatggcatgaagcagtgggtcacttccctcctcctgacccttagggaaatgacctaggtggtcacctccttacccacaggccctttgcaaggttagagggcagggctatgaaagcatggtcctcaactcagccactggcaagcgcacattgtgccagtctcgcgggaggcagtcatggtctgcatggcggggtaaaccatggggcacccttcctgtgccccaggtctccctgtgtcctcgcggtgcaggaggcctccctagtggtatcctgttttcctccctgtaggtttctggcacagccctgagtgtgaatttgtccgccactgcatcgccaagtcccaggagcgagtggaagggaaagtgcaggtgtccgtcctcaagggccaggtgtacatcctcggccgggagtccccactgtctctctacaatgaggagctggtgaggtaggtgccccacacctcattctgacccccacttgggcacagagcctatcttttgactggatcctcaagacatctgtgcctgagcacatgtcaggcaccatgcagagcacagagtgatggtcacagaggatatagacaccactatgctcccgtggaacttacaggctagctgggagaaaggcatggatcaaaccattaccagaatgtagaattagacaaggtggcagcgggctgtgaggaatgcaggatagtctggctgggtataataactgggattggctaggaggggtggtgcatgcctgtaatttcagctactcaggaggccgaggtgggaagattgcttgagcccaggagttcaagaccagcctaggcaacatagaaagaccttgtctcaaaaaaatatatatacacacacacatacatatatatatatatayacacatacatatacacacacacacacacacacacacacacatatatatataaaataattggggttgtgaagaagctcctttgctattcaaacaatagcagaaggagttaacaggtgaatggggggaggggtggaagggcaaaagtggccagggggaaggagctgaagctagatcttaaagggaagggcaagatcagatctgtgcatttagagggtcctcctggctgctctggagaacggatttgagtaggtgggaggtggaagggcacctgtggaaatgcggtagcttggaccatgctgatgattcctggactagatagcagcaggcgaatgtgacacatatctaggaggagggattgaaatgacttggatgtggagggagatggagggtccagaatcaccctggtgtctggggtcgtgagcagctgggtgcagtccctgggttgaggaaatgctcttgaggaaggatcatgcatttggatttaggtgtcatgagtatgggtttcttttgagatagctgggaaaaactaactggaaggccgccggacacttgggtctagagttgaggagaacccaggctgaagaccctggagcatcataggcattttgatgttctctgaagcgctgggccaagagagactgcctaggggaaagygtggagtgagacaagaagggaactagccaggcaagatggtgcacacctgtaatcccaactctttgggaggccaaggcaggaggatcgcttgaggccaggagttcaagaccagcctgggcaacatagtgagacctcatctctactaaaaataaaaaaattagctaagcgtggtggcatgtgctcgtggtcccaactacttgggaggctgaggtgggagcgtctcttgagtctgtgagatcaagggcgcattgagccatgatcatgccactgcactccagcctgggcaacacagcaaaaccctgtctcaaaaaataaatacataaagtattagccaggtgtggtggcatgcacctgtagtcccagctactcaggaggctgaggcaggaggatcacttgagcccaggagctggaggctgcagtgagccaggattgcaccgctgcactctaaccttagtaacaaagctaggcactgtctctttaaaaaaaaaaaaaaaaaaaaaaaaggaaacacaactggaaccatgagatttctcattgatggaccaggcagaaggtggccaaggaggagcccctggaggggcaggagggccctggtgagccagggcaaaggtggcaggtaacgattggccactcctgtgtccgccccgtggatgagagtgacctgcaccaagggacgaggtgtcacctccagaggtcacctggccaaactagagatggggcaggcccctgtgggacagacagcccccactagacgtgggtcccctaaggcccagcttagctcaggctaaggccagcccctccctcctggaggctggttgggaattaaagtacgagtcttgtttggcagtcaatattatttttttctttcccttctccttgccrtgttgagtttctccccgcttcaatctttctaaacactttataagccataaatacaactgagtcagtttagatcagttggggtaaatgtcaaattatcttctctctttctctctctggctctttcttccctccccctccaaatcaacagcctctaataatctgtccaacccttcattaagccttacagtctcactcagggagattaaatgaataaagtaaaaagggaaaggggaaaaaagagagaaaagcaggagcatttattctcactgtgtctccgaccatttcccttttctttttgatttctacatcgctgacttgaaagcccttgagtgacagcgtcacagggaccagcgaggaagccgtgagaggtagcagagctggaaatgccgyggctcagtaggtagaaagtaacgtaattatagagcaggtcagagccactcgaatgagcaaaaataaaagcacagaggttttctgtagaccgtcaggggaggtaaaaaaaaaaaaagaaaaaaatcattgtaaactctttttccacctccccgctcacttcaaaccacaattttaaaaagaggttttttagttcctgagaaacccctcttggaactcccagcagcctcgtgggacaagtttgtccctggatgtgggccctctttgcaggggctgccagggcagctgggaagttcccaccttggggaacgggatggggagagtttgttgtgacttgtgagagatggaggtgaagggacagatggacacagaggtggggggattctgtgtcctacgttctccctgggctgagtataggggccagtggggctgaggctcggtttctaaaacaargtctgttgaagggatctgaggaggttggtggtctagtttggtctagctcttcctaagcactgactgcacagaaaggggtggccagcaaaagtctggtatctcctcctcttccagggaatgcaagctcctagtggcttcagtgcctgagccctggaggggccgtggaggtgtrgaggagggaggaagggacatcaaggaggtacaggagcatgggagtgactctgcagagagttccacgcacccaccggcttcaaggcctggtgaaggtcagggcccgggtcctgaacaaatcactggggccaggcagatgcagagacctcatttgttcttgtaaaaagtccactgtctacaaagaaccagtcagagggccagcctcagggtctcaaagcagcagatcctcctgcctcccaacaccgacccccgctacccctacctcgagaaccttgagtcagctttgtcccaaggctggaattctgcagacaagggtctgattcagagcaggacatgacaagggaccccatcctctcagaggctcagaggctggccttgtggagtaggaggcatctgagtccacgtgccctaagtgcttagcacaaccataattaatgaaggcaatgggtgattgattgcttcggtctggcccctccctgtggacaccactcttgctcttccttccttggcacctggcccagcatctggcaggcagcaagggcttaataaatgcctgaacaaatgaatgagtgaatgaatactgttagtactagtgggtgctcaccatgtgccaggcaccagctacattatttcatgtggggccaaatgtgacactgagagctaaccaccatcacgcatttcacaagtgcaaggctgaggctccgagtgcaggaatactggcctgggctctctggtggcgggtggcggaaacaggacgcaaaccccagtcagctggctggagtgactgccatggttaggaaggttgggaggagcagctaagggtggagagccccaaagcagaaggctggtgagtctgagaggtggaaactgtagagaggtaaaatctgctctgctgagtacagcagcagtcaacccagcattttccatgacacactggcagtgggtgcccaggtttcaggatggattaggtaaggtctaactggttggacacatgaggggaaaggtgacttggtgggcccatctcgctgtgaatgctggaggcctccctgcagcttgcgaaatgcccttgtgctattgcaattcacaccccaaggcctcctgagccttcaggtcactgcatgccatccacacagtcccaagggcacagctggcttggacgagttacccatttacagacagagtgctctggttggtggaattcatagggctagttctggggtggctgctcctagcctcctgccacattgtgtagcagggaagaggctgctgtgtgctccactagggctctccaacctttgggtgggtgcctggcccagaacagggttccctgagttgtacagaaattcaatggaaagccgacgtgcagggagggtttggacccacacaggggaaatgccctggcatctgggaggtggggctgcttctggccccagcagtcctcccttcaagcagaggccagggccaggctgagctgacaagcttctactctccttgcagcatgaacgtgcagggtgattatgagccaactgatgccaccgggttcatcaacatcaattccctcaggtgagaagctcagggccctgacgggccttcagagcctccaggtgtaaagggtaggctttgagagcccccaggtgtaaagggtaggctttgatgcgaccttgactgctgccctgccctgccctgccctgccctagacaaaccccactttcctgtccatctgcccatagcatcctcagaagcatgctttgatagccgacagtaacagagggtcctaggcattggggtcctaggttcctgtgtcccaccgggtgcctctgatacttgccctcccctcccgctaagccacagggactccactatgagctcctttgcagggcaggttaaacaaggaaatagcatagaggtggagagaagcctttgttttctgtcaccatacctgagctgtaggtctagctggaagccatcctagccacgtggatctccatggmccaggarggtggtgcacgtcatctgaagtcactcagacctttgatcctctgtgagtcaccagtaagagtgtcagctgtacctgcctcacagatgcagtgaaggttcaatatgagcctgtggaaatcaagcatgcggctcaggcttagaccctggcatgcaggaagagccaggggcagtgccagcagcaagcacactcagcccagggccggtgtgctcaagggcaaacagggtcgtttgtcaccagcagctaacatagactaagctgctctgggacactctcctaggatgtctcatttaattcttacacaaaatttgcaactccccgggaacaggctgagtggttaagtaactttccaagggycacacagctaggaggtggtggagctgagtccggagggcctgtcctgctgtgggttctccatcaccagctcccttctcatggggattggagtctagaagaagatgcaagtcagtctcctcttgctaacaacatgccctgggcacagagccatcattttctcccagagccagtctcttgtccctggaggcacctcatgccccgagagatgttgaagcccgcccatctgcccagggtcctctcccttcccctccgtcacctccacctcccctgcctcctgcgccctctgtttgtattttatgactctataaacccttttaaatggcccagaacaaacagggcttacatagtggcctcttcatttctcctattgccagttaaacgctttgtcttcaacaatgacaaacartgttttccccctaagataaattaattacattatcctgattggagggcaggaggggccagggcgggagagggaatagaaaaaaaggcaacttcacacacatcttaacaaacagctgccccagccaccccagctctgcctgaattaattgaacccagtgtgtgttgttattgttaatttacatttttctttgttttgaatctggtttacaggctgaaggaatatcatcgtctccagagcaaggtcactgccaaatagacccgtgtacaatgaggagctggggcctcctcaatttgcagatcccccaagtacaggcgctaattgttgtgataatttgtaattgtgacttgttctccccggctggcagcgtagtggggctgccaggccccagctttgttccctggtccccctgaagcctgcaaacgttgtcatcgaarggaagggtggggggcagctgcggtggggagctataaaaatgacaattaaaagagacactagtcttttatttctagtgagtgtgtgtgtgtgtgtgtgtgtgtgtgtgtgtgtgtgtgtgtgtagttaattatggttttcttaggccaacctttgtgttttcggacctaagtgctgccgaaggccgccatttgccagacagcctgttaatctggcagtcgacccctctccagcaaaaactaggaatccagaagtgccgcctgggtccgatcctagccagcatcctgggaatctgtcaccaactgtggtcctgtggcaaatgtcaggaaaccaaataaaattcagggaatgccctttgggggcatcaacgcacagccctttctctggacatcacttttactcacagcccacagggagcttctatagagggtggccatgagtgaccctaggacacttaccacagctgcatggcctaaagcagcctaaatcatgaaggaggagggagaggcctgagcagagaggagaaaagagcaagcccggaacttggcagcatttctcattgtccacaaaccaggccctaaagcagccatgtttgtagtgtggccctggccccccttggtcatatctgattggaccgtggatggacacctgactcgagctggccaatcagaacccgcaggaattgggcctcggcacgtggccgaagtgaggacatgtaacacaggcactcaccgctgggatgctgtggacctggggcacagagcaggtgtagaaggaaaggagagggaagagatgggaagagagggtcatggtattggcgtccatatttctgtactggtgcttcatgaaagctggtggcatctcttggcctggtttccctgacacctgatatcataacgaattcaggactccagctcagtgagagagtttctgctccttgcaaccaaaagcatcttcactgggaagacttgagtgccgcttgctctgtgctttgccctggttctgaactcagaacctgacctcagggatcgcttcgccactccgctgcctgtgtccatgagggtttctcgcaaaagaagttttacctttaaaacttattttcctctgattattaatgtccgtggtaataataaatgactcaatattagctttgtgccaaacacttcgctacacactttattcacattatctcattgaatcttcaaaaccacacttggaggtggacactttcatctccataatgtagaggtagcaacgaagctgcagataaactgacttgccaaaagccactgagctagcaagtgacagaaccaagaaccaaatcccggcctggctgagtccccaaatcttgtgcgtttgtcttgttgttgttgttaagatggagtctcgctctgtcactcgggctggaatgcagtagcgcaatctcggctcactgcaacttccgcctcccaggttcaagcgattctcctgcctcagccttctgagtagctgggattacagacgcccaccaccacgcctggttaatttttgtatttttggtagagacggagtttcatcatgttggtcaggctggtctcgaactcctgatgtcaggtgattcacccacctccggcctcccagagtgctgggattacaggcgtgagccactgcacctggccattatgtctttaaccatagtgataagctgcatctttaagaaaagaaataactagccaggcacggaggctctcccctttaatcccaaaactttgggaggccgaggcgggtggatcacaaggctacgagttcaagaccagccagtttgagaccagcctggcctcggcctcccagagtgctgggattacaggcaggagccacgacgcccagccacatttggtatattatcagtcatatgtctttttcttttctttttttgttttttggctaaacatcctataatgcacatatattttttcctatgcttacaatatttttgcagttatttaggctaaagtataaatgctttatattttatagttataaatgtatactttatactttaaagtataaactttagccgggcacggtggctcatgcctgtaatcccaacactttgggaggccgaggcaggcggatcatgaggtcaggagattgagactgtcctggctaacacggtgaaaccccgtctctactaaaaatacaaaaaattagccggacacggtggtgggcacctgtagtcccagctactcaggaggctgaggcaggagaatggtgtaaacctgggaggcagagcttgcagtgagccaagattgcgccactgcactccagcctgggtgacagagcgagactccgtctcaaaaaataataataataaagtataaactttatatatttatgctttaatgtatatactttgcaccctatttttaaaattttaacatatcataaatgctttcctataacatttaaaaactcaatccttaagcctgggcgcagaggttcatgcctataatcccagcactttgggaggccgaggtgggtggatcgcttgagtgcaggagtttaagaccagcctgaccaacatagcgagaccccatctccataaaataaataaataaataaatttttaaaactccttaaacattttcagcgattacataatattttgttaacattgatactccctaacttaacctttccccatttatatatttagttctctccatattctaaattatttttctgccttttgttgaatttatcttttatattttaaataaatagagatggagtctcactatgttgcccaggctggcctcaaactcctgggctcaagtgattcacctgcctcagcctcccaaagtgctgggattacaggcatgagccaccatgcccagcccttttgttgaatttaatggaatgtttttaagaattggttattagctatacttaattattagttatggcttttttagtgccctctctgagagttattttatatatctttaacttaccacagtctaccttcaattaatagtatgccacctcgagtgtaacataagaactctgcgacagtacgagcctagaacatttcactttatgcttttgttgtcatacatatgctacaaaatcccataatacattgctattatttttgctttagacagtcaaatatcacttttaaaagattaaaaataaaaataaaaaaaagattttaaaagatgaaaaataatggtgggccatgcctataatcctagcactttgggaggccaaggtaggaggattgcttaagcccagggattcaagaccagcctgggcaacatagggagaccccatctttacaaaaaattttaaaattagccaagtgtggtagcacatgctggtggttccagctactcaggagactgaggtgggaggatcgcatgagcctgggaggtagagactgcagtgaggtgtgatcacagcactgtaccctaggctgggcaacatctcaagactctgtctcaaaaaataaaaataaacagctgagattgcaccgctgcactccagcctgggtgacagaatgagactctgcctcaaaaaatcataataataataaataaagattaaaaataagaaaagagtttatcttatatttatccatatatttctttttctgatgcccttcattccattgaatagacaaagtttctatatatatcattttccttctgttgaagaacttttaaaagtatttcttctagtgcagtgattaattctttcagttttttttgtttttgtttttgttttttgagacagaagctcactctgttacccaggctggtgtgcagtggcgtgatttccgctcaccccaacctctgcctcttgggttcaagcgattctcctgcctcggcctcccgagtagctgggattacaggcccccaccaccacgctggcaaatttttgtgttttttagtagagatggagtttcaccatttggccaggctggtatcaaactcctgacctcaaacgacccatccacctcagcctcccaaagtgctgggattataggcatgagccaccccaccaggcccagcttttatttctttgaaaaaattttattaacatttacaagtaggtccttgctccatttcgagttcattactgtgtaggttgtgattcaggatcaaagtttattttttgaaaatactgatgttttgctgttccagcaccgtttcttaaaaagtctttttcctattatattaccttagcatctttgtcaaaaatcaattgattaggccaggcatggtggctcacccctgtaatcccagcactttgggaggccaacgtaggcagatcacctgaggtcaacagttggagaccagcctggccaacatggtgaaaccccatctctgctgaaaatataaaaattagccggccatggtggcgcaagcctgtagtcccagctgcttgggaggctgaggcatgagaatcacttgaacacggaaggcagtggttgcagtgagccaagatcgcaccactgcactccaccctgggcaacagagcgagactccgtctcaagaaaacaacaacaacaacaatcagttgatgggtatgggtctacttctggactctcaattctgcttcattaatgtatgtgtctagccttacgccaaaaactctctgacttgcttattatagcctatagtaaatcttttttttttttctgatttatttatttatttatttatttattgatcattcttgggtgtttctcgcagagggggatttggcagggtcacaggacaatagtggagggaaggtcagcagataaacaagtgaacaaaggtctctggttttcctaggcagaggaccctgcggccttccgcagtgtttgtgtccctgggtacttgagattagggagtggtgatgactcttaacgagcatgctgccttcaagcgtctgtttaacaaagcacatcttgcaccgcccttaatccatttaaccctaagtggacacagcacatgtttcagagagcacagggttgggggtaaggtcaccgatcaacaggatcccaaggcagaagaatttttcttagtacagaacaaaatgaaaagtctcccatgtctacctctttctacacagacacggcaaccatccgatttctcaatcttttccccacgtttcccccctttctattccacaaaattgccattgtcatcatggcccgttctcaatgagctgttgggtacacctcccagacggggtcgtggccgggcagaggggctcctcacttcccagtaggggcggccgggcagaggcgcccctcacctcccggatggggcggctggccgggcggggggctgacccccccccacctccctcccggacggggcggctggccaggcggggggctgacccccccacctccctcccggatggggtggctgccgggcggagacgctcctcacttcccagacggggtggctgccgggcggaggggctcctcacttctcagacggggcggctgctgggcggaggggctcctcacttctcagacagggcggttgccaggcagagggtctcctcacttagacggggcggccgggcagagacgctcctcacttcctagatgggaaggcggccgggaagaggcgctcctcacttcctagatggggtggcggctgggcagagacgctcctcactttccagactgggcagccaggcagaggggctcctcacatcccagacgatgggcggccaggcagagatgctcctcacttcccagacggggtggcggcggggcagaggctgcactctcggcactttgggaggccaaggcaggctgctgggaggtggatgttgtagcgagccgagatcacgccactgcactccagcctgggcaccattgagcactgagtgaaggagactccgtctgcaatcccagcacctcgggaggccgaggctggcggatcactcgcggttaggagctggagaccagcccggccaacacagcgaaaccccgtctccaccaaaaaaatacgaaaaccagtcaggcgtggcggcgcgcgcctgcaattgcaggcactaggcaggctgaggcaggagaatcaggcag

SEQ ID NO: 95507 - DNA, 40610 bp, Homo sapiens
  misc_feature (1)...(40610): n = A,T,C or G
gatcgagccattgcactccagcctgggcaacaagagggaaactccgtctcaaaaaaaaaaaaaagaaaagaatatccagagggcacatgaaatgaagatcaaaagtaaaggaatttagaacttgaagaaaccttaaaagtcttagtccagccataccgtagacagctggccatccagctttggtcttgcccctttctctaacaaacttgtactcatgccatcttacatggaatctggttctaaagtcagtacgttgaagaccaagaatggacaaaaacattgttgaacaatcctttaaaccgttcataaagaacaggacaggctgggtgccagtggctcacgcttgtaatcccagcactttgggaggccaaagagggtggattgcttgagtccaggagttcaagtacagcctggacaacatggcgaaatcatgtctctacaaaaatacaaaaagccaggcgtggtggcacatgcctgtgcttccagctactcgggaggctgagatgggaggatcacctgagcctggggcggttgaaacttcagtgaacccagatggcgccactgcactctggcctgggtgacagagtgagacactgtctcaaaaaaaccaaaaccaaaaatgagtaagacatagtgccatactatgtataagtgcctaatagtggacagtacataaaaaggacataggcagagtataatttttaatcatctcctttttttattcaaaggtatgcatttcccacaaactaaatatatgcaagatacaacctcacttgatttgtttcctgttgtcttttcagctaaggtgtgggcttcctgaggaggatatggactatctttgtatacctgacacagattctggacacacacttgccatgatatgtagataactttagggaaaaggaccagtttggcctactcccagtgctaggcagctttaacacacttggcagtaggccctttatccttctcccttaatgctacttctaagccattacagctccttccctggtcctccaatgctcatatattaacatcctggtcaatctttcacattcctctttttttttttttggagacggagtcttgctttgtcgcccaggctggagtgcaatggcgcaatctcggctcaccgcaacctccgccttccgggttcaagtgattctcctgtctcagcctcccaagtagctggggattacaggcatccaccaccacacccagctaattttttatatttttagtagagaacgaagtttcaccatgttggccaagctagtttcgaactcctgaactcaagtgatccgcccgcctcagcctcccaaagtgccaggattacacacgtgagccaccacgcctggcctttcacattcttctaatcttaaggagctcgaaaagagctagaaaagccagtcttccatggaatcaacctaaatgcacatcaacagtagactggataaagaaaatgtggtacatatacaccatgggaatactacgcagccataaaaaagaatgagatcatgttctctgctacaacatggatgcagttggagaccattatccttagcaaactaatccaagaacagaaaaccaaatactgcatgtttgttcccacttataagtgggagctaaataacgagaacacgtgaacacaaagagggaaataacagacactgggtcctacttgagggtgggaagagagagattggaaaaaatacccatcaagtactatgcttagtacaggggtgacgaaataatctctataccaaacccccatgacatgaggttacctacataataaacctgcgcacgtccccctgaatctaaaataaaagttaaaaggaaaaaaaagtcttcaagttctagatgtcttcagcatccttgtggacagccctaccactgactttcagcccacttcagccacacactcattcatggtcagagttgtggaaggcagaccaaatcaccattcagagttgccccaccagtataagcaaagttccgactctcacgctttttgtcttcctctcccagtattcttttgtagttcctgtttctcggatggcctatcctttgcttggtgcactgaatacgactgtctctcaaagtgatcccatggcttcaaggtaaaattacctaagttttgttaaaaaggcaaattcgtgttttcatctactgagtaaaaatggagcagactggatgtggtggctctcgcctgtaatcccagcactctggggggccaaggtggatcgctcgagcccagtagttcactactagtctgggcaacaaggcaaagacccgtctctacaaaaaagaaaaattagctgggcatggtggctcgtgcctgtagtcccagctactcgggaggctgaggtgggaggatcacctgagcctgggaaggttgagacccgcctgggcaacatggtgaaactctaaaacaattcaaaattagctggattagcctggcgtggtagcacatgccagtagtcccagctacttgggaggctgaggtgggaggatcaccttagcctgggaaggttgagacccgcctgggcaacatggtgaaactctaaaacaattcaaaattagctgggttagcctggcgtggtagcacacgccagtagtcccagctacttgggaggctgaggtgggaggatcgcttgagcccagggaggttgaggctgcagtgagccatgatggtgccactgcactctagcctgggtgacagagtaagaccttgtttcaaaaaaaaaaaaaaaaaaaaaaggagggaggaagaggaagatccagattaatacaggctgaagtttaagaacacaatatgctttcccacaattatctcaaccactgcatgggtttaacagccatggccagatgatgattgttcctgtatgtctactttagctgagatctcattcctgagctttgagtcctatccatctgccagactctccatggccaatccacaggcagcacacatgcccaacactgaactttccacaaaactctgtccttttctagaactcttctagtgttatgttcactaacttagcaaatagtacccttaaccaaacagttgttctatcctgaaacctagatgtcctccttagctccttcctttccctacataggtccnnnnnnnnnnnnnnnnnnnnnnnnnnnnnnnnnnnnnnnnnnnnnnnnnnnnnnnnnnnnnnnnnnnnnnnnnnnnnnnnnnnnnnnnnnnnnnnnnnnnnnnnnnnnnnnnnnnnnnnnnnnnnnnnnnnnnnnnnnnnnnnnnnnnnnnnnnnnnnnnnnnnnnnnnnnnnnnnnnnnnnnnnnnnnnnnnnnnnnnnnnnnnnnnnnnnnnnnnnnnnnnnnnnnnnnnnnnnnnnnnnnnnnnnnnnnnnnnnnnnnnnnnnnnnnnnnnnnnnnnnnnnnnnnnnnnnnnnnnnnnnnnnnnnnnnnnnnnnnnnnnnnnnnnnnnnnnnnnnnnnnnnnnnnnnnnnnnnnnnnnnnnnnnnnnnnnnnnnnnnnnnnnnnnnnnnnnnnnnnnnnnnnnnnnnnnnnnnnnnnnnnnnnnnnnnnnnnnnnnnnnnnnnnnnnnnnnnnnnnnnnnnnnnnnnnnnnnnnnnnnnnnnnnnnnnnnnnnnnnnnnnnnnnnnnnnnnnnnnnnnnnnnnnnnnnnnnnnttatttatttatttatttatttatttatttatttgagatggcagtctggctctgtcgtccaggctagtagtgcagtggcgcgatctcggctcactgcaacctccacttccgtggttccctgctcagcttcctgagcagctgggattaccggcgtgtgccaccacacccaattaccctcatgttaaagtcgctgcttagcaagaggtacaaaactgtcagctctgacccctccaccaccacccaactgaacttttgagtttttcagacacctgctctatcctcctgcctttgaatatgtgtttgcttccgtcctgaaaccccttccggcgcttttttttttttttttttttttttgacagagtctcgctctgttgcccaggctggagtgctgtggcacaatctcagctcactgcagcctccgtctacccggttcaagcgattctcctgcctcaaccttctgagtagctggaattacaggtgcgcgccaccacgcccggctaatttttgtatttttagtagagatgaggtttcaccatgttggtcaggctggtctcgaactcctgacctcaagtaatccgcccgcctccgcctcccacagtgctggattacaagcgtgagccaccacacccagcccctttcggcgctttttgccttctacacgcacttcgggtctcagacgcttttacttattatggttgcccttttcccctacagctccgtcaagggtcttctccaggaacccacagccccatagttcccccattaacctgctcctggtttcccaccaggattaaaccctagagagtgaacggagaccagtttaaggctcacagcgggcgccgcgtgaatgagggaataaacattcgcagaaccagtaagaggtaagagcggaccgactcacaaccccctcacccatgggccggacgcggccagcgagcccagagagacaaggcagaggaaataggaagagaaagagtatctgtgacaaacaagaaaaaaggaacaagagacgtaatagcagcactcacggaggaagggacctgggcccggccagccgccatgatgcgccggagctccgcccccgggaggggcaggtgctcgcttgggggtggggatgggggtgggggggcgctcggtgacgtcaccggtgagcgggtttcctcgccacctccagctccttctcgctgctcaccccctcgcttcctagagactccgcgaggcgcctcggtgcaccatcccaactcccgacacccctgtctcttttctctgatttttttttttttaagacgaagcctggttctgtcgcccaggctggagtgcagtggcgcgatctcggctcactgcaacccccgcctcccaggttcaagggattttccggcctcagcctcctgagtagctaggattacaggcacctgccaccaccacgcccggctaattttttttttttttttttttttttttttttgtatttttagtagagacggggtttcaccatgtggccaggctggtctcaaactcctgacctcaggtgatccacccgcctcagcctcccaaagtgctgggattacaggcgtgaaacacagcccctggccctctctgatttttttgagacgaggtctcgctctatcgcccaggctggagtgcagcggcgccatctcggttcactgcagcctcgacctcccgggctcaagcgatcctcccacctcagcccaccaagtagctgggatcgcaggcttgcaccgccacacccggctaatttttgtatttttctgtagcgacatggtttcgccatgttgcccagactggtctcgaactcctgggctcaagcgatctgcccgcctcgggctcccaaagtgctcggattacaggcgggagccaccgcgcccagcctccgtctccctcctaagtgacatcctgtccggcatcccgcaggccttcagatggatggggtaggagagctcaggaactcaaacacagcccgcctggtggatgacttctaagcatctttcagtctccctgatcttgccaagcagagaagggcttcctcgtaatgccaccaaagcacaactttcacatgcttgctttatggccttaactaactgatgtcattacttaactgtccccgcggggacggggaactgaatgtattttcacaaacgtcagttcaagacagatttgtgggagaaaccacctggggataaacctctccccaccaagaacctagaattcggccgggtggctggggaaaagtgggcggggcgtagtcgccccggcgctggcaggtccagtctctgcccgcggcgcacgcggatgacgtaacaaacgcgcgcgacgattcgaggtgctctgtggccgcgagtgcatcttccacgtgagtatagttaccgcgtgcggacctggatcctcctccaggtgcagcgtttcgtcatctagcccaagcttggtctggcggcttcagtatccccaccgggccgagctgtgtctacttggtgcccgcgtatttgctttagtggaggcgtccattcgtcctatcttgcgtgcgttccgcagaccccaggcatggccgacccccatgtaaatttagccccattgtcccattcatggattcagctaacagaaagactgccggccgcctactttatagcaggcaccatgctggtcatggaatacagccctcatgcacgcaaaccctgtctctgagctcttgaagcttatattttactgggaatgatagacggaaatcaagtggcttaataaacaaaatgccttcaggaagactgtcctgaaagttggggaggggctgaagagtggtgagaatcaagagttcattaagtcattccacaagttttagaatttttttgcgtttcaagccctggtattgttctaagccttggtaattcaatggaaacgaagcagcaacatcccatgcccacgtagagattttttttctagtggggaatatagagcgaaaaataaaaacatccaatagtgataagcgctttacaggaaattaaaatagggccggccatctgatagtaactacttgagtggctagtgaagccttttccacgaaggcgaatcaccagaaatctaaataacaagagctagccatgcatatgtcagggtgaaaaaaatgccttccaggactgagcttggcaagttagagaaataaaaaagaagctaatgtgtggttggtgcattgtgggtgaaaaagagaatggtgtgagatagggttggaaaggtaggccagagagtggccagacttggtaaaccaggatgctgagttggaatttataccatgtgtaatgggaagccataatccactttatgctgatgtgtgacaaatgaattgtggttatgcagtggtcaggaggttaatgcattggtccaggtgagtgatggtggtggcttacttgaactagagtgaggtagtagagatgaagagatgagagatttgagacatgattggaaatagatttcctggtggattggatttagagagtctgagggaaagagaattaaggatgacttctgtgtttttgtcttgagcaacaaattggatgatggtagtgtttactgagtggcaagactaggggaacagcagagtttggtgagtaaagccagggtcccgctgagaggcagtgggaccagaaattggataggtagtttgggatagatggggagggcctttgaatgttaggctaaaagtattaactgtaatagttctgttgcctgatgcacactggaggtcaatacaccaagacaccaggttgcagcagagaaagaggtttaatcatagggctgctgaacaaggagacaggaggaaacctcaaatccatctcccagagtactttggggctagggtttttaaaaaagagtttggaataggattaggatgaagtgtgaaaatcattgattgaagagtgcagggtgaggtcatgaaacagggagatgaagaaactgattctcatgctcacttggttccactgtgggagtcttttttttttttattttttttaatttgaaagatgaggtctgcctggcgcagtcgctcacgcctataatcccagcactttgggaggctgaggtgggtggatcacgagttcaagagattgagaccatcctggcgaacatggtgaaaccccatctctactaaaaatacaaaaattagctggtcatggtggtgtgcacctgtagtctcagctactcgggagaccgaggcaggagaatcgcgtgaacccgcaaggcagaggttgcagtgagccgagatcgtgccactgtactccagcctggcaacagagtgagaccccatctcaaaaaaagaaaaagaaagacggggtcttgctctgtcacccaggctggagtgnnnnnnnnnnnnnnnnnnnnnnnnnnnnnnnnnnnnnnnnnnnnnnnnnnnnnnnnnnnnnnnnnnnnnnnnnnnnnnnnnnnnnnnnnnnnnnnnnnnnnnnnnnnnnnnnnnnnnnnnnnnnnnnnnnnnnnnnnnnnnnnnnnnnnnnnnnnnnnnnnnnnnnnnnnnnnnnnnnnnnnnnnnnnnnnnnnnnnnnnnnnnnnnnnnnnnnnnnnnnnnnnnnnnnnnnnnnnnnnnnnnnnnnnnnnnnnnnnnnnnnnnnnnnnnnnnnnnnnnnnnnnnnnnnnnnnnnnnnnnnnnnnnnnnnnnnnnnnnnnnnnnnnnnnnnnnnnnnnnnnnnnnnnnnnnnnnnnnnnnnnnnnnnnnnnnnnnnnnnnnnnnnnnnnnnnnnnnnnnnnnnnnnnnnnnnnnnnnnnnnnnnnnnnnnnnnnnnnnnnnnnnnnnnnnnnnnnnnnnnnnnnnnnnnnnnnnnnnnnnnnnnnnnnnnnnnnnnnnnnnnnnnnnnnnnnnnnnnnnnnnnnnnnnnnnnnnnnnnnnnnnnnnnnnnnnnnnnnnnnnnnnnnnnnnnnnnnnnnnnnnnnnnnnnnnnnnnnnnnnnnnnnnnnnnnnnnnnnnnnnnnnnnnnnnnnnnnnnnnnnnnnnnnnnnnnnnnnnnnnnnnnnnnnnnnnnnnnnnnnnnnnnnnnnnnnnnnnnnnnnnnnnnnnnnnnnnnnnnnnnnnnnnnnnnnnnnnnnnnnnnnnnnnnnnnnnnnnnnnnnnnnnnnnnnnnnnnnnnnnnnnnnnnnnnnnnnnnnnnnnnnnnnnnnnnnnnnnnntccagcctggggtgacagagtgaatccatctcaaaaaaaaagaaaaagaaaataaataaataaataaataatttatgacatgatatcatcaagcaataaattcttaaacaaaagctttgtgatcagagatccttttttgtttgtttgtttttgtttgttttgagacagagtttcactcttgttgcccaggctggagtgcaatggctcgatctcagctcactgcaacttccgcctcccgggttcgagtgattctcctgcctcagcctctcaattagctgtgattacaggcacgcatcaccacgcccggctaattttgtattttttttagtagagatgaggtttcaccatgttggtcaggctggtctggaactcctgatctcaagttctcactgtgttgcccaggctggagtgcagcggcttgatcactgctcactgcagcctccgcctccccaggctcaagtgatcttcccacctcagcctccctagttgctgggactacaggcacatgccagcacacccagcaaatttttgtatcttttttgagagagatggggtttttgccatgttgcccaggttggtctcgaacgcctgtgctcaatcctcccacctcagcctccaaagggctaagattacaggtgttagccactatgccccgcccaatctggcctcttcttataagggcagattataagaggtttggtgagattagtagctcattcttgagagttccactttcatgacctaattacgtcccagaggccccacctccaaataccataacattgaggattagggtttcaatatatgaattgggagggggagatacacaaacattcaatccatggctgataccatttctctcaggaaatttttcctgacacctgaagtgcaggattggtgtccacagtcccctgaccttcaccacacgggactggaaatgtctgggtacttggcctttctcccccaataaaatataaaccctgtgagagcagacagagtttctgtcttgattcacagcggtgtttctaagaccttgactggggcccagcaaagtgcatgtactccaggaacacgtgtcaggtgtgtgcctgtacacctccctaccacattaataaagaccacattttgcaagattccttaaaatctccaaggttacatttttcaggttaccttgtttctctaaatgtccatattactttcccctaccctatccataacgccgcaattttccttgaaatctgaaatcagttcaacagataggccatagttaatgttatttttattttatttatttattgagacggagttttgctcttgttgcccaggctggagtgcaatggcgcgatctcggctcactgcaacctctgcctcccgggttcaagcagttctcctgcctcagcctccctagtaactgtgattacaggcgcccgccaccacacccagctaattttatatttttagtagagacagggtttcactatgttggccgggctgatctccaactcctgacctcaggcaatccacctgcctcagtctcccaaagtgctggggttacagatgtgagccaccacgcccggcttagttaatgttattttttaggaacctaattcatctctccagcaaaggacacatctctccagcaaaggacacctctctccagcaaaggacacctgcagagatgtccccagtccttcacttctatgttcgtccctctggccatgagggggcagcctctggacacactcggaggaaactgcaagggaaactgccagagctgcagggcgtcgagactgaactgtgctacaacgtgaactggacaggttgggcccaggtattagattcttgggggacatgcctcggtgctgggggcagtgtctcaaggtgtccttgccctgtctccctgcagctgaggccctccccagtgctgaggagacaaagaagctgatgtggctgtttggttgccccttactgctggatgatgttgctcgggagtcctggctccttcctggctccaatgacctgctgctggaggtcgggcccaggtaagtatctcatcctrcccacccctttcttctgctttcctttgcttcctcttgtgatccttgggagatttgcttttcctttgctctttgctacttcctgcctaggaaaccacacatgtgctttccccatttgggtagatccctccaaagacctagcctgctccaaaacatgttctcaaagcaaaataaattagattccaagttaaaatcaaacagttttggccaggcgcggtggctcacgcctgtaatcccagcactttgggaggccgaggtggggcagatcacgagatcaggagattgagaccatcctggctaacacggtgaagcctcgtctctactaaaaatacaaaaaattagcccgggtgtggtggcgggcgcctgtagtcccagctactaggcaggctgaggcaggagaatggtgtgaacccgggaggcagaggttgcagtgaaccgagatcacgccactgcactctagcctgggcaacagagcaagactctgcctcacagaaagaaaaaaaaatcaaatagttttgatgctagaggacagttttggtttggtttgagtgtactttaaaagcaggtttcttgttgcccagcctgaggctgaaagccaatggtgaggggatagcggtgggaggttgtccagacagcagtgggcaggatccaccctcccagctgaggcctgccgggggttctccagtcctaaccatcaggcccattgttcaggctgaacttctccaccccaacatccaccaacatcgtgtcagtgtgccgcgccactgggctggggcctgtggatcgtgtggagaccacccggcgctaccggctctcggtgaggtgatggggaatcaggaggaggagatgagccagagatacaagattagatcctaagctctagagagaagcagggacaggtgctcctggctttaggcctgctctgtatggtcgtacaagttgttcactgcctgaaagtacctggttgaggggtaaatggggcagaaatccagcctatgcttcctttaatttgtgcatcctggcatggattcatacctggaaagggcgtctttttgtaatctgagaaaaagtgccatatggtgtggcagtgggctagccttgcatgactaagagggtaggaaggtggaccatttctctccattcttaaactcttcaccccttgccctctgtgtgtctgcacccctagtttgcccaccccccgtcagctgaggtggaagccattgctctggctaccctgcacgaccggatgacagagcagcacttcccccatcccatccagagtttctcccctgagagcatgccggaacccctcaatggccctatcaatatactgggtgagggccggcttgcgctggagaaggccaaccaggagcttggtgagtagctggggagggagatgtagggtccaggataggccagtaggggtgctgagatctggaatgtggctgcctgagttccatagtcacctcttcctggatttgtctcctaggtctggctttagactcttgggacctagacttctacaccaagcgcttccaggagctacagcggaacccgagcactgtggaggcctttgacttggcgcagtccaataggtgrggagaaatggggttgttcccatacctgagcccatgggtgttgggagagaccacaggggctcaccttcatgttcctcccttggcttaggggcctccctgagtctctgagggcctgggctcccgtcatccatcaaggagtctacattcaaatcttggttttatcttcactttggctctggatagtccaaaatgacagaatacttgaagattatgactttttggaatatattttgatctgtcatctaagtatgaatttggctgtaactctgctgttaaatgctggtgagaagacatggcattaagaaatgaccccgtttccacctgccttcccctccctgcatcgccccctgcagcgagcacagccgacactggttcttcaagggccagctccacgtggatgggcagaagctggtgcactcactgtttgagtccatcatgagcacccaggaatcctcgaaccccaacaacgtcctcaaattctgtgataacagcaggtgctgtgccctagactgggttggcgtcaggrcccggggaggggaggccccaggccctggttgggttagtgtaggtcccagaaaggaagcaaggtccatgacgggtatgtccacagtgcaatccagggaaaggaagtccgattcctacggcctgaggaccccacacggccaagccgcttccagcaacagcaagggctgagacatgttgtcttcacagcagagactcacaactttcccacaggtgagctgggttccctggagaaataggtgagatcacagaatagggtagggcaaaggtcccaggcccctggagtgggcctggggaaaataatcagggaaattggttgtccttattttcagtgggggtggtcagagatgggggtttgtctctgaggcacccagacctstccccactctctctttgcaggagtatgcccctttagtggtgcaaccactggcacagggggccggattcgagatgtccagtgcacaggccgcggggcccacgtggtggctggcactgccggctattgctttggaaatctgcatattccaggttccatctccttcctctctatccaccttcccttccagattccttgtcctggcaggcagcaaacttctatctgttaggtccatagggttatcctgtgtgccttttctcaggaggaagggctctaggatagctggcctttcactaactatggtcataagtgtagacctggggagatgaggtggccagactgcttttgcaggtctacgattttctttaaaaactagccttcattcagccagaaagcatgatattgggttggtcttatgatcagtacctgcccctcaaatctggtttcttagcctgagaaacttggctgggcgyggtggctcacgcctgtaatcccagcactttgggaggctgaggtgggcggatcacaaggtcaggagatcaaaaccatcctggctaacacggtgaaaccccgtctctactaaaaatacaaaaaattagctgggcgtggtggcgggcgcctatagtcccagctactcaggaggctgaggcgagagaatggcgtgaacccgggaggcggagctttcagtgagccaagatcacgccactgcacgctagcctgggtgatagagcgagactccatctcaaaaaaaaaaacagaaagcctgtgtaactctgattgcgagattcagagggaaggctggtgtgggtggtggaaagaagaccagtgcctcactgcaggctctagggcttcctaaagcaggacttcctgaagtggaacattgcaaccatgcaggtggtccttggtggccttgactcttcctgaagratgcaggctgctccggcctgtcttcacagttcattcagttcatccagttctctctccttcsctcccaggttacaatctgccctgggaggatcyaagcttccagtatcctgggaattttgcccggcccctggaggttgccattgaagccagtaatggagcttctgactatggcaacaagtttggggaaccagtgctggctggtgaggctggggtgtggagggatgacaaacacccagaggggcttgtgggtggggtgtgcgacccaggggctgtgctattgggcgagcactgggggaactgagtgacaggtccctctgatgttcacactccaggcttcgcccgctccttgggcctccagctcccagacggccagcggcgtgagtggatcaagcccatcatgtttagtgggggcattgggtccatggaagctgaccacataagcaaggaggccccagagccaggtaagagcctgccacctttctctggatccagccagctttctccccagcacaggatggctacagggagggaacttagggaacacttcagtggttagtttttaatatgttggcttatcttatgtgtcacataatgatggacaactcattctgagaaatgtggctattaggtaatttcattattgtgcccacttcatagactgtacatacacaaacctagatggcatagcctgctacacgatccacacagcctcttactggcaatattatccaggaatttttacactgggaggaattccaccacagggcgatattcaannnnnnnnnnnnnnnnnnnnctgatgaacaaaacagcatgagaataaaataagcacaagagaaaataatgcaatcaagacgtggtgggccaggcagggtggctcgcacctgtaatctcagcactttgggagactgagacaggtggatcacctgagatcaggagttcaagaccagcctgaccaacatgctgaaaccctgttgctactaaaaacacaaaaattagccaggcatctgccgggcatggtggctcatgcctgtaatcccaacactttgggaggctgaggtgggcagatcacgaggtcaggagatcgagaccatcctggctaacacggtgaaaccccgtctctactaaaaaaataaaaaaattagccaggtgtggtggcgggcacctgtagtcccagctactcggaggctgaggcaggagaatgacgtgaacccaggaggtggagcttgcagtgagctgagatcccaccactgcactccagcctgggcgacagatggagactccatctcaaaaaaaaaaaaaaaaaaattacccaggcgtcatggtgcatgcctatagtcccagcctcctgaggcacaagaaccacttgaagctgggaggtggaggttgcagtgagtggagatcgcaccactgcgatcgcaccactgtcaaaaaaaaaaaaaaagacgtggtaaatatgagataatatgaagctactgtcaatgtaacatggcataccgtttttaggtaaacttttttttctcttttttgttaattattattatttttaatctgcattttctttctcaagtcagattttttttctctttttagagacagggtgttactttgtcacccaggctgaagaacagtggttctgtcctagctcactgtggccttgagctcctgggctcaagcagttctcctgcttcagccttccaaagcactgggattacaggtgtgagccatggtgcccagccagaataaacttgctttatataagtagaatgagtacattctaaaataacagtaaaaagtatagttggctgggcacagtggctcacgcctgtaatcccagcgctttgggagnnnnnnnnnnnnnnnnnnnntttgggaggccaaggcagggggattacttgaggccaggagtttgagaccagtctggggaatacagtcagacccctgtctctaaaaaaattaagaaataaaacttagctggatatggtggtgtacacctgtagtcccagctacccaggaggcttaggtgggaagatcgcttgagccaaggagctcaaggctgtagtgagctatgatcataccactgcactccagcatgagtgacagagtgaaaccctgtctccaaaaaagaataaaaataaaaaataaatgtaggctgagtgtggtggctcacgcctgtaatcccagcactttgggaggccatggtgggcagatcacctgaggtcaggagttcaagaccagcctggccaacatggtgaaaccccctctctgccaaaaattcaaatattagctgggtgtggtggcgcgcacctataatcccagctactcgggaggctgaggcaggagaatcacttgaacctgggaggtggaggttgcagtgagccaagtttgcgccactgcactccagtctggacgaaagagtgagactctgtctcaaaaaaaaaaaaatttttttttaagtgtggtaaatacataaaccagtaatagtcatttattgtcattatgaagtattatgtagtatacatacaataatggtttgcagtatacttttgtgtgactggcagtatagtaggtttatttacaatagcatcacccaccagcgtgccacgatgccactaggcaataggaatttttcagcacaattataatcttaagggatcactgttgtatatgtggtctgttgttaagcaaaatgtcattagtcagcccatgaccaaaatggaatcatacaatatgcggccttttgtgtctgccttctttcacttagcttaatgttttcaggggttatccgttgcatcagtactttatttctttttatggctgaataatatcccattatgtagctatgtcgcattttgtttacccattccttagttggtggacattggggttgtttcagctttttagctattatgcataatgctgctatgaacatttatgtacaagtttttttgttttgttttggtttggtttttttgagacggagtctcgctctgtcgcccaagctggagcgtaatggcgctttctcggctcactgcaagccccgcctcccgggttcacgccactctcctgcctcagcctcccgagtagctgggaccacaggtgcccaccaccacgcccggctaattttatgtgtttttagcagagacggggttttgccgtgttagccagggtggtctctatctcccgatctcgtgatccgcctgcctcagcctcccaaagtgctgggattacaggcgtgagccaccgcgcccggcctatgtacaagtttttgtatgaacatatgttataatttctcccaggtatataactaggggtggaattgctgggtcatgtggtaactatgttcagcttttcaaaaaattgccaaactgttttccaaagcagctgtaccattttacattctctctggcagtgtgtgagggttccagtttctccacatgcttgacaacacttgttaatatctgtccttttgattgtaaggcataatagtgggtatgaagcagtatttcattgtggatttggtttgtttttctctaatgactaatgatgttgagcgtgttttctttctttcttttttttttttgtagagacggagtcttgctctgttactcaggctggagtgcaatggcgcaatctcagctcactgcaacctccgcctcccgggttcaagcaattcccctgcctcagcctcccaaatagctgggattacaggcacgtgccaccacacctagctaatttcttttgtattttagtagagatggggtttcaccgtgttgcccaggctggtctcaaactcctgagctcaggtaatccacccgcctcagcctcccaaagtgctaggattacaggcgtgagccaccgcacctggccgagcatgttttcgtatgctagttagctatgcgtatatcttccttagagaaacatctattcagatcctttcctatttcttttttcttttttgagatgggatctcactctgtcacccaggctggagtgcagtggtgcgatctcagctcactgcaacctccatcttccgggctcaggcaatcctcccaccttagcctcctgagtagctgagactacaagctccggccaccatgcctggctaatttttgcattttttgtaaagattggatttcactgtgttagccaggctggtctcgaattcctgagctcaagcgatccgcccgcctcagtctcccaaagtgctgggagtatgggtgagttctcccacagtttctaccctggagcccccaggcttcaggacccttccgcatccagaggttgcagtgagccgagattgcatcactgcactccagcctgggcaaccgagcaagaccccatctcaaaaaaaaaaaaagtttttagtgtataagccttacttctattgttaaatttattcctaattatttttattctttttgatgctactgtaaatagacatagatatttttgcctttttcatttttcgcttagcagtatatcttggaaataatttcatattgatgaaatcatattacttcattacattcctatattctctttttttggtggcttagtctttcattgtatagacttaccatagtttacttaatgaggtctctgttgtcagcctttaggttatttcatgtacttgctaatacaaacgttactgtggtgtttaatcttgtaagtaggtgattttatacctgtgcaaataaatcagcgggatgacttcctcaaagtgtatttacccaatcagagactgtgtgcatttgtcattttggttgttattgccaaatcgtcctccgtagttgatatcagtttactctcctatcaacccagtcaagtggtaaggcttctgggctaggcagggtggctcacgactgtaatcccaacactttgggaggccgaggtgggcggatcacctgaggtcaggagtttgagaccagcctggccaagatggtgaaaccctgtctctactgaaaaaatacaaaaattagccgggcacgatagcaggcgcctgtagtcccagctactcaggaggctgaggcaggaatatcgcttgaacccaggagacggaggttgcagtgagctgagatcacaccactgtacttcagcctgggcaacacagcgagactccatctcaaaaaaaaaaaagctggtcaggcttctccctaacatcagcttcctctgtgttcacgctgccttgctttcgaggcctcttctcgtggcttccccagtgttctgattctgccttcccttcttacaggcatggaagttgtaaaggttggaggtcccgtctacaggattggagttggaggtggagctrcttcatctgtgcaggtgagtgggaattgctaaaggtgcagaatccttgatataaccgggccccaggcataggggagcgtayaggagcttccagtctcgctgagctgagctatgccatatatgcccccaggtgcagggagataacaccagtgacctggactwtggggctgtgcagcgaggagacccggagatggaacagaaratgaaccgtgtgatcagggcttgtgtggaggcccccaagggaaaccccatctgcagccttcatgatcagggcgctggtggcaatggtgaggaaaggagttggaacaagagactgggcctkcctggtatcctgccaggtttcgtttagggagaggtatcaggaatctccaaccaaccacccagctctgggtcccattctccatgctctgtacattctagacaggttcagggttggaagggtggaagcctgctgccgtgggatgattggtggtaagggtgcggcagcagttgacacaggaacacaccaaattacaggcccctttggaggccagggactgccctttgttgcctgaccaccactaggtcactgcttctccttgcaaccctctcaccaggcaatgtcctaaaagagctgagtgacccagctggagccatcatttacaccagccgcttccaggtgggtctcgtcccctgaagtgtgacattttcccacccctgccagccccagcccgcttccacccatctctcttgcaacaacatgagacgtgggagtgcccactggcccttctctttcctccccgccrtggctgtgcagcttggggacccaaccctgaatgccctggaaatctggggggctgagtaccaggaatcaaatgctcttctgctgaggtcccccaaccgggacttcctgactcatgtcagtgcccgtgaacgttgcccggcttgcttcrtgggcaccatcactggagaccggagagtgagttggcccagggagttgggagcaaacactggggcagacatgagccacctgggtatgggctagagggagagctgtcaagggagagagacgagaggaagatgggaggtagtggcaaacaagctgtggggaatgttggatccaaggaggggcagggactcaatatggaaaccaaacaaggagtggaaagcacatttgtgccctgatttctaggaacattccttgctggtgttcatagtctcatcccctctgggtggggtccctgtggtctatagatagtgctggtggacgatcgggagtgtcctgtcagaagaaatggccagggggatgcccccccgacaccccygccaacccctgtggacctggagctcgaatgggtgctgggcaagatgcctcggaaggtatgtggggttgaggggatgggtttttcctgtggtcctctccacaccaccctttaccctacgtgcactttgtcgcctgtgtgcccagcccgccccaggtgttcacactgcctgtcgctgtctgtgttgcaggagttcttcctgcagaggaagccccccatgctgcagcctctggccttgcccccagggctgagcgtgcaccaggctctggagagggttctgaggctgcccgccgtggccagcaagcgctacctcaccaataaggtcctccctgcacccttcctctgccccctgcctccttcctccgctcagcctcttctgccctcccacccttagaaagtgctgtgggggtttttgcctggccctgcaggaagcagcaggggcagggcagccaccctgatggcctggtctccctgctacccaccttctaagtagagctgttgtctgcattgggggaaagacaggcctcccactgccctgagtgccttgggggcatgtgcgggagctcaggctgtccctgtcccttgctctcttgctaaccccacctggttccacaggtggaccgctcygtgggaggcctggtggcccagcagcagtgcgtggggcccctgcaaactcctctggcagatgtagcggttgtggcactgagccatgaggagctcataggggctgccacagccttgggagaacagccagtcaagagcctgctggacccaaaagtcgccgcccggctggccgtggccgaagccctcaccaacctggtgtttgctctggtcactgacctccgggtgagttctcccacagcttctatcctggagcccccgggcttcaggacccttccacatccatctgtagcccttcatttcatgttgcaacctcccagtccgcctgcacccctggcctctccacatttctcttcccctctaatgctgtgcctctgccacccccaggatgtgaagtgtagcgggaactggatgtgggcagccaagctcccaggggagggcgcagctttggcggatgcctgtgaggctatggtggcagtgatggcagccctgggtgtggcagtggatggtggcaaggactccctcagcatggctgctcgggttggcactgagaccgtgcgggctcctggtgaggtgtgggagccccrgggaggggaggaggaactatggagctgggttggcaactcattcctttggactcctccttgctctacagggtcactggtcatctcagcctatgccgtctgcccagacatcacagccactgtgaccccagacctcaagcatcctgaagggagaggtatggacatggccccatcctttgtgatctttgcttgtgtgatctttgyttggctcctgctttgtgagtgctgggcccccatctcaacactgggctgtggtgttttctgggactgattgtctaggtgtctcaccacatgctgggaatagcagtgctgtgascccctcagggatgggtcctyctgagctgttcccctcccctcacccctccccgtctccccaggccatctgctctatgtggctctgagccctgggcagcaccggctcgggggcacagctctggcccagtgcttctcccagcttggggaacaccctccagacctggaccttcctgagaacttggtgcgggccttcagcatcactcaggggctgctgaaaggtgagtgaagacccytggggagatagcgcacagggtgccaggcgtgcagcaggcgttcaccatctgagcagtggggcaaaagggactccaatggacgatgtaccccagatcccctgacattctgacacacactcttgatggactgactccggaaggtggggtggggctgtcaggtttgggtcccgaggttgctgagctttcttctccttcctccagaccgcctcctctgctcaggccacgatgtcagtgacggaggcctcgtcacatgcctgctggagatggcctttgctggaaattgcgggctacaggtggatgtgcctgtccccagggttgatggtaaggaacctggggtctagtctcaggcccgggctgccttctctaccctgcagaccccatttccaatatattaaagagtggagtgccctccagtcccctttccctgagtcttccctgactagcttttctgtgctgtctctctgacagctgaactggatggaactggctgacacccaccatgttcctgactgcacccctctgagacttcccatccctgagatgtccatgatgaaacatcctcagtcctgccgtcctagccctcatcctccctgatccctaccctactctctggctgcatccctcwgaccctcaccctggcccttcctgcatttccctgatcccrccccaactcccttggcccttcttgcatccccctgactccccacattgctctccyagtcctgtctgtgctgttcgctgaggagccaggcctcgtgctggaggtgcaggagccagacctggcccaggtgctgaagcgttaccgggatgctggcctccattgcctggagctgggccacacaggcgaggccgggccccacgccatggtgaggaagtgagggagagagcggtgtgcagtgggcagtcagagtggggtggccgcggtccatccctctcccactgtggagggggccatcctttctcctagcccgtgggagatttgttcctcttcctaggtccgggtgtcagtgaacggggctgtggttctggaggagcctgttggggagctgcgagccctctgggaggagacgagtttccagctggaccggctacaggcagagcctcgctgtgtggcagaggaggaacggggcctgagggagcggatggggcccagctattgcctgccccccacctttcccaaagcctccgtgccccgtgagcctggtgagggagtgtgtgcagaggctccgygtcctgggggcactgagcctggatgcctgggcctgccctcagaaaggtgtctggggagttggggtggggaagtgactttctggcccaaagacacttattctcccccaaggtggtcccagcccccgagtcgccatcttgcgagaggagggcagtaatggagaccgggagatggccgatgccttccacttagctgggtttgaggtgagcagggtagggggcagctggggdtgattgtccagcctcagctgcrtgtcctccccacccacactccccctccccaccttcgcaggtatgggacrtgaccatgcaggacctctgctctggggcaattgggctggacactttccgtggcgtggccttcgtgggcggcttcagctatgcagatgtcctgggctctgccaaaggtcagtgtgcaggcttctgcccactcccttcccccacattcctgaagaggtgcctttagccccatcttcctgggctggggattggcctctcactccaccgagctacgagagagtgggcccattcgttctgggccacatgccaacagaaggctggtagtaaatttttaattttttcattgaaaaaaagtatatatatacacatatgtaattaaaatatatattattaaatatatattatttatatatattatttatatattattaaaatgtatattatttatatattattaaaatatatattatttatatatattatttatatattattaaaatatattatttatayatattatttatatattattaaaatatgtatatttttaawatatatatatatatgtattttttgagacggagtttcacccttgttgcccaggctggagtgcaatggcgcaatcttggctcaccgcaacctccacctcctgggttcaagcgattttcctgcctcatcctcccaagtagctgggattacaggcatgcaaaaatacaaaaattagccaggcgtgctggcgggcgcctgtaatcccagctacttgggaggmtgaggcaggaraatcgcttgaacccaggaggcagaggttgtagtgagccgagatcatgccactgtactccagcctgggtgacagaatgagattccatctcaaaaaaaaaaaaaaaagaaagaaggaaaggaaggaaggagggagggagggaaaaggaagaaagaaaaaagaaaagaaacagagcagttatgccccttcattcccaattcccttttttgaggtcctccatgtctcaccctgacttccctattccctgctagggtgggcagctgctgtgacctttcatcccagggctggggctgagctgaggcgcttccggaagcggccagacaccttcagcctgggcgtgtgtaatggctgtcaactgctggctctgctcggctgggtgggaggcgaccccaatgaggatgctgcaragatgggccctgactcccagccagcccggccaggccttctgctacgccacaacctgtctgggcgctacgagtctcgctgggccagcgtgcgtgtggggcctgggccagccctgatgctgcgagggatggagggcgccgtgctgcccgtgtggagtgcgcacggggaaggtcaggcccaaggaaggctgggggagggcccgagggttgggggcaagggtgggcatgaaggaccttggctctcacttccctcctccttccatcccaggttacgtagcattttcttctccggaactccaagctcagattgaggccaggggcttggctccactgcactgggctgatgatgacgggaaccccacagagcagtaccctctgaatcccaatgggtccccagggggcgtggctggcatctgctcctgtgatggccgccacctggctgtcatgcctcaccctgagcgggccgttaggccttggcagtgggcatggcgaccccctccatktgatactctgaccacctccccctggctccagctctttatcaatgcccgaaactggaccctggaagggagctgctgactggccacaggggctcacctgggccccatggcttttcrcctaagtgggtcctgccccctcccccatgaccttcaggagcaccccatattatttccaaaaatatcttggacagacaaggaccaaaatgccaaaatctcagcggactcgatratctgcctgctgatgttccttctgtggctgtgtctattttcagttctgctctaacatggcatgccctttctcagcccaggaaacagcatgtggttcagagaaaagagcgacaaggaaaagttaggactcctgaggtccgaacaggggcttctgttgcccacttcacaacacccagtgatcaccggtgtgcaattgcctccttggctctgagggatgttttgcgctcccttttctcatcattggggttagcgggtgcagacaaattcagcaatagtatgcagatcagcccctcaccacctcattgttctcatctggaactgaaactttctggatttctcttgaagtgctacactgcactgaatgtaaggaattgttgcttgtggaagtttctcagcgtttctggctgtcttagggctggcctcagaacccagcattcctgttatttgcttctaaattagcagctctctttttttttttttttttgaggcagtctcactctgtcacccaggctggagtacaatggcgtgatctcggcccactgcaacctctgcctcctgggttcaagcaattttcctgcctcagcctcccgagtagctgggagtacaggcacacaccaccacacccagctaatttttgtatttttagtagagatagggtttcaccrtgtctcccaggctggtctcaaactcctaacctcaagtgattcgcctgcctcggcctcccaaagtgctgggattacaggtgggagccactacagctggcccagcagctctgtttctgatagaggtggttggggctctcatccctagatcctaaccctttagtatgctggaattctactcttcacttactgcattgactgttgttgattagttattattgcaaagcactgtcaccggcctcagggagtttatgtgtaatagaattaaaaataatagctgtgtataacacttagctcaagccacgcatgtgtgaggcatttggtatgtatctgaattaattctcactaaaattcagcaaaggacttgatagcctctccccgccttttcaataaaggatgaatgaaggttgactgcattgcctggggtccacagatggtgaggggggctgggcgcacccatactacatctgcttcccgccatcctgcagtcttacttcctggaggcagtgtgttgagactttgtgctggcagctgtctgttgcttcctttgctcacaggactgtggatagaggtcccttcctcatgactgtggatagaggtcccttcctcatgactgttctgttgtacacctcaagtcagttggctccctagaatgttcaacatcttgataaaaggagtttgcctgagaatggagactataatcccagatccctgagggctaggagagctgggtgggggcgctgagcacttctgtgtgctcctggtagagtagccaccctgagaaaaaactgataataatgaaacaatgttaaatgatggctatggggaaaacaactatttcagagatttttctcattgctttgcaaagcgacctaccctgagcagtatgggactcctccggatcatttttgacatttgaatgttctttcctgacccttggaaaggatatatgtatgtctttcaaatttatagtatcgaacatacaatttgggggctggtaccaagggttagatattaagtttattaagtgcttgatgcaaaagtcaaaggatggcatgggaggtaacctggttggctgtgataagtaaactcgtggattttgaagggggagcagtttctggtttgggtcgcagtggccaagtaagacccaccctcctcagacactatcaagaccaagtccactggcttttcatccgtgttttcatccagtaaccaaataaccctgtccttgctgacccccacccagctccattcccactcacccactcccaagggccctctggtgaaccttccaggctagctctctgctccctccttgccttcatggaaaaccagctatcctctgagagccacttctgcagcccctccaagtggtggcttttcttctcaaacctcaacctcacatatctcatcttccccaggctggggagtcggggtcctcgtaccactgccagactgttcacccagttcaaagaaaaccctgccygttgcaggctcatgccattctactacatccctttcatccaattctttgtgttctactgacttccccagcgcttcctttgggagaaggtgccaattcttcaatagttgattcctctctagaaatacaatgttcctgccaggtgcggtggttcatgcctgtaattccaacactttgggaggccaaggctggtagatcacctgagtttgagaccagcctggccaacatggtgaaccccgtctctactaaaaatacaaaaattagctgggtgtggtggtgtgtgccaataatcccagcttctcgggaggctgaggcagaagaatcgcttgaacccaggaggcggaggttgcagtgagccgagatcacgccactgcacttcagcctgggcaacagagtctgtcccaaaaaaaaaaaaaaaaagaaaaagaaagaaagaaatagaatgttccagggccgggcgtggtggctcacacctgtaatcccagcactttgggaggccgaggtgggcagatcatgaggtcaggagatcgagaccatcttggctaacacagtgaaaccccgtctctactaaaagtacaaaaaaaattagccaggcgaggtggcgggcgcctgtagtcccagctactcgggaggctgaggcaggagaatggcgtgaacccgggaggcggagcttgcagtgagcggacgttgcgccactgcactccagcctgggcgacagagtgagactgtgtctcaaaaaaaaaaaaaaagaaatagaatgttccagtattttagctggggttgtggctgctgaaaataaagatgacatctcccagcttccctcccagttatgattaaattgtggccaatggtagagaaaatgatgtatacaatttgcaagtgttcttacaagaagggtacattttcccctttatccattcttgcttcctattgtttggaatgcagacacgacagctggaagttcagtagccatactgaagtagctttgggaattggtaccatgcagagcaacaagataagaggaaggctcttcctcttatctacttgggaggctaaggtgggaggatcacttgagcccaggtggttgaggctgcagtgaactgtgatcataccactgcactccagcctgggcaacagagccagatcctgtctcaaaaaagaaaaaaagatcaaaggagactggttcttccaacactgaggagtgccatgaggacaagataacactgaatgtcttgagtgtaggaaatgaacttgtgtcttggtttttgcttttgtttttcattgagacagagtctctcgctctgtctcccgggctggaatactggagtacagtggtgtgatctccgcttgctgcaacctctgcctcctgggtttaagcgatcctcccaccccagccttctgagtagctgggattacaggcacgtgccaccatgcccagctaatttttgtatttttagtagagacggggtttcgccatgttggccaggctgttcttgaactcctgacctgaagtgatctgcctgcctccatctcccacagtgctgggattataggcataaaccaaagtgccagcctatcttgtttaagcactattaattttggtgttttccatcccttgtaactaaaccttaccctattcaaccactcctaactcgctctcattctttaagggtattaggccctggttccctgtcttgtgcttcacttcagccccttctgttatcctgtgtccatgtcagtgaccatccaacactctgaacttttctacagtgaccttcattccacctcagctaactatcccacttggattttatcacccaggatcggctctatctccaaacttatttattcaggcgtcctgtttccaaccataaggctctatctccaaacttatttatgcaggtgtcctgtttccttccaactttttttctttttgagatggagtctcactctgtcgcccagactggagggcagtggtgcgatctcagctcactgcaacctccacctcctgggttcaagcgattctcctgcctcagcctcccaagtagctgggattacaggcatgtgccaccatacctggctagtttttgtatttttagtagagatggggtttcaccatgttggccaggatggtctcaaactcctgacctcaagtgatctacccaccttggcctcccaaagtgctgggatgacaggcatgagccaccatgcctggccctttccttccatctttcttctttatccacaatactctgagatttcaaagtaattaggacctccagtgcaataattactttaccccaatccattgctccttttcttccctccttatccagcttccagtaacagcctttccaaaaccccttcacttgagctatgaccttttcatcatacccatttggcaaactcccaacctacctgctttctctgagaaagccagacagaacaggttctctcataagttcatcattaaccacgtatggggaaacagggaatgggaaggaaaaatggagatgaaaggttaataagaaagtgcccaagtgggcctttgatgatacaatgtgccatgaacccagggtcatgatgaccttagttctctaaacctgaggtctaaaagcaaaaacaatttacaacaacatacacacctagtgatcaagtccttcctttgggtttcagctgggtcaatagcgctgctcaaatcctttgtgagaggttatttcagtagcaccacatacctcccttttcagcccaagtctmtgttgtactttatttttcaccattgcaatcaatgaactgtgaactgtttttgtttagagatggagtctacctctgttgcccaggctgtagtgcactagcgtgatctcagctcaccacaacctccacctcccgggttcaagcaattctcctgcctcagcctcccgagtagctgggactacagacacgtgccaccatgtctggctaatttttatatttttatttattttattttattttattatttttgagagggagtctctgtcgcccaagctggagtgcagtggcgcgataatttttatatttttagtagagacagtttcgccatgttgatcaggatggtcttgaactcctgacctcttgatctgcccgcctcggcctcccaaagtgctgggattacgggcgtgagctactgtgcccggcctgaattgtttctttgatcaaagatctgtctccctgttagtgtgtaagttccatggataggagacccatttttgctccccaccgtgtcctaatacctagcacagtgcccggcacctagtaggtgctcaataaatatatgctgaacaaattaatacatatgaatgttaaaattagtaagtattgacatacatttttttctcttaatacaaaagtgaattagtggattgggttcatgggtgcttggactttgtacaccctctcaagcatttcccctttttacctcatttgtccagttaaagtcasgagttcttgttatcaggtcaaatgaaggggactggccctgtgtaagtggaaagacagggagaaccagtaagtctcttttctttcttgagatggagtctcactcagctgcccagggtggaatgcagtggcgcgatctargctcactgcaacctccgtccctcaggttcaagcaattctcctgcctcagcctcccaagtagctgggactacaggcgcaggccaccacgcctggcaaatttttgtatttttagtagagacggggtttcaccatgttggccaggatggtttccatctcttgaccttgtgatccacccgcctcggcctcccaaagtgctgagattacaggtgtgagccaccgggcccggcctcttttcttgcttggtttaacattttttcttttcttttttttttttcccgcttagtttaacatttgcctggcagccaacagggcccttcagttgcacagaaaaagacacatcactgaactaagcacacattactgtcatcctcagttgctagaaggagcactactggctggggaggcagcaggcaggggctaagcacagaaaaggagtgtgagtgagagcatccagatgggaccacctggtaggggccatctgttttagagaggcttcccgccagggcaccctctgctctccaacaggccagcccaccaagggacttcgttctgaactgtgtctgggacactgctcaaactagaacatagataatggagaaagactggaaagaagaggggtgggcatcagtcagtggtgagcctggtgaaggaatgtctcccacggcagctgggtggtcagtatcctggggcctggctagcagtgtgctcccagcacctgctgtatgtaagaccctgtggtggtggaaaccaaacaaaccttctgtcactggacacttgggggtggcaaacagccagatggtagagaccggaggcctgctgcagtggagcctgggtcttggcatcttgtggggcttcaggaaacctttccgtgtgagcagcccactaggaatgcctgcgacattgggccatcctcccccaagcaggaagggctttgtgcagctccctctgcctggtcaggctggaggggcagcctgcgamtacagaatgagacagaacactgtgaaacagccctgcccatactgtcactcagggaacaacattgtcargggcctcctcctgagggacacacatgagggagatagacttggaacaagtgatttcaatccagtgacttttaggggaagctcagggtgccgtggagctcatagcaggggatgtggcccagacttttgggatcagggaaggattctcggagtgagctgagacctgaaggatgagtagcagtttgttacatgaaggtgagtggcactctagaaaaacaatatttgcaaagcctcagaggcaagagacatggtaaagagctaaacaaaggtgagtgagtctgtctggaacatcaagtataatataactgggaaacaggacaggcaaaatcgaaggcctaacagaacaggaatctggacttgattctaagagcaacggaagccatttggaggggtttatacagcagatagatagacatgagggggtctgcatttttgagaaatcactctgagaggagggaggcaggagaggacatgggagtccacagagaaagctacacagtctccaggcagaaacagtgctagctcggactaccgtagtggcagtggaaatggcgagaagtggaaggattccagggctattaggagatagaatcaccatgaatggccaggtgcggtggctcacgcctgtaatcccagcactttgggaggctgaggcgggcagatcacaaggtcaggagttcgagaccagcccggctaacatggcgaaactccatctctactaaaaatataaaaattagcggggtgtggtggtgcacgtctgtaatcccagctgctcaggaggctgaggcaggagaattgcttgaacctaggagccagaggttgcagtgagctgagatcacaccactgcactccagcttgggccacagagcgagactctgtctcaggggtgggggtggggggaggaatcaccacgaactgggtgttggggaagaggggtggggagagaggagccagtgatgatgcccatgcttcttgcttgaaccactgggtagatagtgtcattacctgtgatagggacatgtctgggaggaagatgatgtgctttgcttacgatgtgttcagtttgaaatgtcaatgagacatgtaggtggaggcatccaggaggtggtcagaagagatctgggatggagatgaatatttgggaagcactggtatgtggatgggtaaggttatctagggggagtgtgcagggcctggtagcccaacattgaaggggttgacagaaaaagaggaagctgagaaggaatggccacgactaacccaacagtctaaccagttgagcggcttcccactgcccggcgatccaaggcaacaagagagattaggaagcaggcctgttcaccacaactcctctcccctagatcattgccaaacgcagtacaacggccctccccactcccaaacatctcacctgtggaaagttacagggaagtggccttggctaaatcaagcagatggaaagagctaaattaggctgggtacggtggctcaggcctgtaatcccagcactttgggaggccgaggaaggaggtcgggagtttgaaaacagcctgaccaacatggagaaacctcgtctctactaaaaacacaaaattatccgggcatggtggcacatgcttgtaatcccagctactcagaaaggctgaggcaggagaatcacttgaacccaggaggcagaggttgtggtgagccgagatggagccattgcattccagcctgagcaacaagagtgaaaaaaaaaagaaaaaagctcaattatgtgtctcaaaaaaaaaaaaaaagaaagaaaagagctaaattatgtggtgctttggaagctgggaccacatggactcttaagagggatggcaccttctaagaggttccaagggcggaaacaaggggcagttccactgggtttcagacacagagatcccagcctggattgtcgtggaggatgaagctgctccatcttggatgctgatccgccatgttgtcctctggttaacccctgttctggaatgcctcctctaagattgccactttatctactgtgaccttaaatcctgctcttaggtagattcacatagcattctgcgcctttccctgaggggttgacttcagtggtgccacacatttctactgaggcatgtgtaccttttgcatcaggtatatcagccctgggactcggggataactgactgacggctgcctggcttctgtttctaagttgctattaaatgtttctttctgagaaactggatacatcaatcagtctccctctttttttttttttttttcttttttgagatggagtcttgctctgtcacccaggttggagtgtagtggtggcactctctcagctcactgccacctctgcctcctgggttcaagtgattcttctgcctcccgagtagctgggactacaggagcacaccaccacacctggctacttttgtatttttagtagagatggagtttcaccatgttggccaggctggtcttgaactcctgacttcaggtgatctgccagccttggcctcccaaagtgctgggattacaggcgtgagccaccgtctctttcttcagcctctcagctcccttggcctttgggtaggtttgcatagactgcttgtggatgtggaaagtcctccttcccttggtgcctgttgtgcctctgtctccgcaggaggcccataggattctgaagagctgtgatgggagccctgcctcggctctccatcagactcaggacaggccaccagggctgctatccatcaccacacaccacctctcccgtttgacagtgtccaaattgcctcctcttccccacttctggaatatgtgttgagagacagcagtgagatgcaggagggcgtgtgtctgtggagaagtcaaaactaaaggttgccagaatctagttggaaaaatacgtcccttgttcctggttgggagagcagtggggccatgtgctgttagctggctccaggcacagggtccttatggagaaatgtacagagcactggcatatggatggtggtccccgctgcactggcactgatgatcttatgctgaaaagggatgcatgacagaatcagaggaattggactccattgtagggaactaggggacagaggataaagtgcccaatctcgtgacttagcagcagcaaagaagagaggccctctttcctctttgccctacttacaacccaaaccctccaactctgtctttctgtcattggtgtctccattcttttttttttttttttttttttttttttttttttttgaggcagagtcttgtttggttgcccaggctggagtgcagtggcacgatctcagctcactgcaacctccgcctcccgggttcaagtgattctcctgtctcagcctcttgagtagctgggattacaggtgtgcgccaccacacctggctcatttttgtatttttagtagagacggggtttcaccatattcgtcttgaactcccgacctggtgatctgcctgcctcagcctcccaaagtgctgggattacaggcgtgagccacccggctggtgtctccattcttcgtgaccaggcttccatcttggaacctgctctacatttttcccctccaccttgtgcattgtcccatattattgttttccttctgcattgctcgtcctggcttcatctctccctctcctaactgtaacagcttagcacagactctcatccctccacacacactatacaagtctggggctgaccacccagagttagtgtcagatccctgaagtaaaggtctgagtcttccacaagactcccctcatttcagacactagtcacaaatctcaggcgtccccaagtcagccacactttgcctgactggctttatgttcagaagttcccacaatccccacaggctcaataattcaccagaaggactcacagaactcagagaagcactatacttatgattgtggcattatagttttattataaagaatatgcattggtgtccaggcacggtggctcacgcctgtaatcccagcattttgacaggccgaggcaagcaggtcacctgaggtcaggagttcaagaccagcttggacaacatggcaaaaccccatctctactaaaaatacaaaaattaggctgggcgcggtggctcacgcctgtaatcccagcactttgggaggccgaggcgggcggatcacctgaggtcaggagttcaagaccagcctgaccaagatggtgaaaccccgtctctactaaaaatacaaaattagccaggcgtggtggtgcatgcctgtaatcccagctactcaggaggctgaggcaggagaattgcttgaatctgggaggcggaggttgcggtgaaccgagattgcaccattgcacttcagcttgggcaacaatagcgaaactccgtctcaaaaacaaaaacaaaaaaaaacaaataaaaatacaaaaattagccggacatgagattgtgtcactgcactccagcctgggcgacagagtgagactcacaaaaaaaaaaaaaaaaaaaaaaggccgggcatggtggctcacgcctataatcccagcactttgggaggccgaggcgggcagatcacgaggtcaggagatcaagaccatcctggctaacacggtgaaaccccatctgtactgaaaatacaaaaaattagccaggcgtggtggcgggtgcctgtagtcccagctactctgaaggctgaggcaggagaatggcgtgaatccaggatgtggagcctgcagtgagcagagatcgtgccgctgcactccagcctgggtgacagagcgagactccgtctcaacaacaacaacaaaaaagaatatgcatagggaaggttggaacaggtcccagaatctgagctcctgtggggactgctgaggagtcagggcacagagcctactggcacatcaatgtgttcaccaaccaggaagcctcactgaacttcagtgtccagaattcctattggggttttattgggctgatatcaactgggccaaagctccaaccctctaatcacatggttgatctttctggtgtggctcacccccatcctgattcatgtccttagcataacctatctagaggcccaccatgagtcacctcattagtataaaccattagggcctatcaagaataacaactccaataatgggaaattccacagattttgagtttttcaggaaccaggcataaagggcaattaagttttttgtttgtttgtttgtttgttttgagacagagtctccctctgtagcccaggctggagtgcagtggctcaatctcagctcactgcaacctctgcctcccgggtcccagttcaaacaattctcctgcctcagcctcccgagtagctggaattacaggcatgtgccaccatgcccagctaatttttgtatttttggtagagatgaggtttcaccatgttggccaagctgatcttgaactcctgacctcgtgatccatccgccttggcctcccaaagtgctgggattacaggcttgagccaccgtgcctggcctttttgtttttgcttttgagacaaagtcttactctatcgcccaggctggagtgcagtggcaccatctgggctcactgcaacctccccctcccggattcaagtgattctcctgcctcagcctccttagtagctaggattacaggcacccaccagtgcgcccggctaagttttgtatttttagtagagacggggtttcaccatgttggccagcctggtcttgaacccctgacctcaggtgatccacccgcctctgcctcccaaagtgctgggattacaggcgtgagccactacgcctgctctttcatttttatttttatttttattttttttaagagatggagtcttggccaggcgtggtggctcacgcttgtaatctcagcactttgggaggctgaggcgggcgaatcacctgaggttgggagttcgagatcagcctgaccaacatggagaaaccccatctctactaaaactaaaaaaaaattagctgggcatggtggtgcatgcctgtaattccaggtactcaggaggctgaggcaggagaatcacttgaacttgggaggcggaggttgtggtgagccgagatcgtgccattgcactccagcctgggcaacaagagcgaaactccgtctcaaaaaaaaagagaaaaaaagagatggagtcttgttctgtcatccaggctggagtgtagtggtgtaatcatagttcactgcaacctcaaactcctggactcaagcaatcctcctgcttcagcttccctgggactacaggtgtgcataccaccatgcccagctaattatttaaatttttggttgagatggggtctggctacattgcccaggctggtctcgaattcctgggctcaagtgattgtcccaccttaacctcccaaagtgttgggattacaggctgagccactgcgcctggcccagtcaagttctttattgtacaacatcttttaaaagggcctaactggtaaataacctatctcttaactgccatccaataaatacaggccaggccctgtacaagtcagtggaaagttgatggtgaaaagacagacatggacccctctctcctggtgcttagtgtgttacacagtgaggcacctgcagtggtgacaggagcatagcagcacagcaggagccagcagttaatccacaaatgttttctggagatctgaggatgagctagctagggaagaagggggaaagaaagttctaggcagagggcatcacatgtgcaaatgcccagaggcatgaaagaggttgactcagtcaagggattgaagaaagttcagtgtctataaggagaaacagactataaggggaaaatggcagggcgcagtggctcacacctgtaatcccagcactttgggaggcagaggcgggtggatcacctgaggtcaggggttcaagaccaggctggccaacatggtgaaaccccatctctactaaaaatacaaaaattagccaggagtggtggcacatgccagtaatcccagctactcgggaggctgaggcagcaaaatcacttgaacccgggaggtggaggttgcagtgagccaagatcatgccactgcactccagcctgggcgacagagcgagactccgtctcaaaacataaaaaaaaaagactataaggggaaaatgatgggatatggggctgaaaagttgcagggaaaggactgacaggtatagaattgctccaaacacgaggacacactggtcttcctcagacactaacttcgttatagcaggcctttgtgtattgtgtatctactgtggctaccactgattgccagacaatcctaagcatctccccaaggcaggtttctcagccggggactaagctgggtcacaaactagatctcattacaggatatgaactgtagcacgccctagctcttcctgttcaggctgaaggcccagaaagaagggccatgttttacccatttttagaccctctcctaaagcctagtacagggctaaatacacaaaatacttcatagctgggtttcttagtctttagtcaatgagcttggataaaaatttcatctttctttttcctttttttttttttgagacggagtttagctcttgtcgcccaggctatgatattttgagacagggtctccctctgtcacccaggctagagtgcagtggcatctcggctcaccgcagcctcaacctcccggctcaagccatcctccca

SEQ ID NO: 95508 - DNA, 34919 bp, Homo sapiens
agccatccttaaggagaccttttcccggagcacctacttcactgggcttctgtaatagctacttggtgtcacatggtcttttccattagatcctgcagggataagctgggtctctcctgcgtatctcactatgactcgcccgagcctagacaagtgccctgtccgcagagtgggcgcgcagatgttcgcggacttgaatgtaactggcttagatagaagagagcgcctctccaacctcccggcagagcttcggttgagtcggacagattcacccagcgcactcgggttgctccctgtctcgactaggaagcgaacttcggagatgatgtataaaattcagcctgggggctgagaggtgctaacttctatttcagggttagtgagggtacagtaagcctcccagaaagctgcaattctggaggaactctgaatttcatccccaagcgagctctgccccaatagcctcctcctttcagctgggtcccgcctccttatacagccttayggtctgtaaaccagccagtgcccccattcacccctcacttcccgcactccmaggccagtttctctccttcccctccccccttcactcctcctctttccgggagcctcgtgccgggtcctagaggggcagaatctggatgtcgaagggggcggggtcgggtcctatccctcctacccttgggccgcggaatataaggctccaggcgagcarggaaccggtccacacagggtccggaggagcaatggtcacccgggatcgagctgagaatagggacggccccaaggtgagaggcgggaggggagggagcagaggtccctggtttggctaggggactgggcccctgacgccgtcggtctggagagaggctggggacgcaggggtggaaggggagcggtgctccagaactccaggagccagaagctggagaggaagctgcaaaatatgaagaaggggacaggggtcagagccagacctgagtgggcggcgggaacataggactaggggcctcggtaatgggtgtcggcaccttgtggcctggggagggggccggtgttggagtaaaataagcaattagagggcagagccaagggaggagggtgggaacgaaaagagaagaggataggcacttgctccactctggctgtgagccgggcggggctggcccaaggcggtcttgtacagaaggtcccggggcgttggttccagaggccccagactggtggaagattttaggagaaccgtggagaaggtgaaggcctggagggttttgagggaaaagaggcggcgcggtcgcgctaggtatctccctttctatactcagggccgccaggtctgagcccggcaccgtgcggcgcacgtgcgtgcgcgcagagagtccccaaagttctccactgagacaaagagaaactgcaccagacggagacgtagagagaaaagaggaggagagacacagagaggggaggagggaggacgagactgagagaggagaatgcgaagatccggggaggcgagctacagaaactgatctaggggcattgggagggggagcggagagggatcgaatggggccggccctaggcaatctggggtcttgtggccggggtggaagccgggctctcccagcggcgggatccgacgccggggcggccgcactgagtctcggtctggtcggcccgctctccttttctcgctggtcgcagatgctcaagccgcttgtggagaagcggcgccgggaccgcatcaaccgcagcctggaagagctgaggctgctgctgctggarcggacccgggaccaggtcagtccctccgctagccctaggtccccaagcttcccgtttccgcgtcccagggcttcccactggggtggggacacaagcttggttggcaaccctggccccaaggcatcctcacccgagtcccgcctttggaattccatcccagacccccactcgctctcagaacgcgatcttcttcgccacccctcgggtctgtaagtttcacgcctggttctgtaaatttcgctcccggggtcggtcagtttcaccctttgggtctctaagtgtccgsttccccctcccccacagccagcctctgatgagccagcctctgttatgtcgggtggttaatttcattccctgggttgcggtttcaaatctcctcctcacgcgttgggcattggttccaacccctaggattggacagtttcgtctcagggtgggccaggactttccttggtcatctccactccgcatttggtcgcgcgttctgtgggcagtgcgcaaatgcgatcgggggcaccaccagctcccgcatccgtccctcccttcttccccctgccactttccccctttctccccacccctttctgtctctgcgccctcccctcccgtctgtagaacctccggaacccgaagctggagaaagcggagataytggagttcgccgtgggctacttgagggagcgaagccgggtggagcccccgggtacagcgcgggggtggggcagcggagggagggaggggggacgccaggaggctccggccggggcagagtgggcgggccctgcggtggatggtgggcttggggagtggccggttctgctccgaggcgaggttaataacacccgcgcgtgtctgtctctgtgtctccctcattttctccctctttccgtccatctggcttcctgtctctgtgcgcctgtccggccttggtatctctgcgccccgccccttccctcacccctgccgggcccctgccctgcccacctgtgctcccgccggccgcaccagccgccgcggctccaggggttccccggtccccagtccaggacgccgaggcgctcgccagctgctacttgtccggtttccgcgagtgcctgcttcgcttggcggccttcgcgcacgacgccagcccggccgcccgcgcccagctcttctccgcgctgcacggctatctgcgccccaaaccgccccggcccaagccggtagatccgaggcctccagcgccgcgcccatccctggaccccgccgcaccggcccttggccctgcgctgcaccagcgccccccagtgcaccagggccaccctagcccgcgctgcgcatggtccccatccctctgctccccgcgcgccggggattctggcgcgccggcgcccctcaccggactgctgccgccgccaccgccgcctcacagacaagacggggcgcccaaggccccgctgcccccgccgcccgctttctggagaccttggccctgagccttggggggtggtgggggcggggtctaggggtggggtagagactccagcccgagggcagcagagggacccgggcgtccgggcgagcaggtgttggggagggcagtggggcgcgcgggctcagcgcgcgggtgagatgtggtctatattagagtatctatataaatatatatttccctggttcctgtcccttttccctgccccaacttctcccttgcgtctaggattgtactctctctgcccctcagcccagtcccagtcccttcccgagtccctagtgcatggaataaagtggttattaaatccccgtgtgtccccgagccaggggcctgcctttatctcgacgtccacgcccactttcccttcccttctgtctcccaccctcagtcctgctctccatggcccaagccccggggcagacaggtaagtaaagaagagagcagagcgggaactgagatcgaaattgaaaccaggtggaaagagagagatagggtagggggagaagggatgggggcctttaagaaaaaaacggataaaaaggaaaaattgaaataaaatcgactctggtgggattcgaacccacaacctttgaattgctctattcgtcactagaagtccaatgcgctatccattgcgccacagagccacccggcgaacggcggcgtcttgttgcttacgggtactagagtgggaatggggcagggttggggagcggggctaagggacttgggcgggacatgccaggagggcgcggtttggatctcagaggccaagccaggtagaggtagcgggcgcaaagcatgttagccaggtgagagagagggcgcacatgggtcgaaaaaacagggagggagagcaaccgaaaatggctgagcgagcgagtgcagagctccggctgcccgcttggggggtgtttccggctcaggcgctccccactcccagatatagtcccacccaaataaactagttttgttgtaaatttctgtgtgtttttgtctcttctcgtttatctgttctgccatctgctgctatgcggtccacagtctcgatggttcttcatttccagtctaaaagatgtggaaaaggagacgaatcaatttggcactcttaagctttgccccattccttacttctagtctcttaggaggacaacggggacagtaagttttcgtgcaggtagcgtggccgagcggtctaaggcgctggatttaggctccagtctcttcggaggcgtgggttcgaatcccaccgctgccaggctggagtttttctggtggattacgcacctgctacagttctgttaacagttctgttaggttacacctatttacatgcagaaagtaattttacgaattcccctggtaatggtttcaccatcatcttccgtgtttggtcttccagagagatcataggcctgcatccatcccagaagctaagacctgatggtaactgctgaagcaatatttcgtttcttcataacatctctattatttcgtttcttcataacatctctattttaacatgttttcaaatgttagctcaacttccaacatatttaaataatttattgtacgttctcttaacactgtgttataggactcaattatccggtaggaaaagcacaaataattggtagtgtcctagtttactttttttttttgtcgtattatcttgggtcataggagtatcccctctgtgaaaatcaattaacaatattcaacatgctgatattaaaagaaaagctttaaggttccaccgagatttgaactcggatcgctggattcagagtccagagtgctaaccattacaccatggaacctccctcgtgggggctttcaagattgtgtacattactggacattctattttgcgtgtcttccacacccgtcacttaaaacgaaaacaaaacaaagtctgctgttggatatggtagacaccgttatcgagcacttgaaatatatgaattcagatgtattgccagcttctaaatacacatcttcttttgaaggaaggctttgtacaaacaaaaagacttaaaatttcattaatatttttagaatgttgattatatgttaaaataagattttggtatattagggtaagtaaaatagatccgtgaaattaatttcgcttgctttttattctttgtaatgtggctaccagaaaatgtaaattcgataatacggctcgcgtttgtactgttttaaagtatgtttattaccctccaccgtcgtttgctgtattttgtggaaatcaagtttctgtatcacctagctttaaaaactagtaactatttttgttaccattttatgcgaagtgcggtacccaaaagcaaagacatgccgcccgaacagggacttgaaccctggaccctcagattaaaagtctgatgctctaccgactgagctatccgggctcttcacgagagctttactttttgcttataagagggttctctataggaaaagccaggcttgtagaaccgacagaggattttatctgtgcagcatagaatattttggcacagatttggaagcagcgggtgaagctcgcctgctgctgattgagctttttctgcctcccgttcttagagcccccgccgaggctgcgacgcagggactgtaccatagtagaggctggaacagtgcggcgccggaaccggccgcgcggggccgctgcgggctatgggcttctctgagaggttcctccccagtccctagtggcccagatcccggacacctgggctcccgcccaggatcctgcaggcccagggcggtcctggagcggaaagaatgccacgcggggcattcagaccctgtttgcyggcgctgtatttcgctttcctgacctgccctactccagagcagagaatgaggtcgggcgtgccaaaggctggggacaaagagggccatgcgtggggggatcggtgtatggggtgacagrgarctgttcctgaccatttgacatgtgctggaatgcgtgtgcgactcacctgcgtgtggctgcagtcacgtgtgatttatgaccaagtgcaactctccactgtttagtgattcacacggatgattcacacgtaggaatgcaggtgccctgtgctcatctctgcctgggaatggggaggaacagatcttgggggacattggggagtgggcggacaagcactccagggcatcagtccgggccgctgaccaggcggagggcagtgtcccaattatacaggcgttacctccttttctccatctcagcatctgatccctccctccgcagtggaacccakgctsctgatatccatctgggtgagccagccagagggaccggctgtgtcagaggcaagcaaacaagtattagagtgcaagactgtgggcggagagaggaagcccgagccgccagcagggagcttcggagagagaaagcccaggaacatcccagagagagctgggcccatcctcagccctacccagccccgcagcccctagccctccgcccagaaacccagccctgtccggcgtgccgctcttctcctccaggccggytgctgctgcggccagcgttgccggggcatcccttcctccttcccatcatggcagtgtaccgcctgtgtgtgaccactggtccctacctgagggccggcacactggacaacatctctgtcacactggtgggcacgtgtggtgaaagccccaagcagcggctagatcgaatgggcagggacttcgcccctggatcggtgagtacaaaggagacagggaagmgcgacctcagaggggcaggggccgcaggcgggaggagtattcctcctggactcttgagatcctgctgaactcaggataccggccctgacctcctcaccttccctattgaggtccctgtctttcctggagatgatgaactccatccaggcaggactgtggagaggaaggagcgttggacagggagtagagggacttcccctggctcctaaactcctcccataattgaccgtgggctttgggcaagtcgcttcccctctctgagcctgggtttcctcttatcgaggggatctgcctgcctctgccagccccaggtggcctccacaagagttcccagccggcctaggaagctagtgaaatgcagtgcccactgtgctcgggcacctttttcttttctttttgagatggagttttgctcttgttgcccaggctggagggcagtggtgtgatctcaggtcactgcaacctccacctcccgggtttaagcgattctcctgcctcagcctcccaagtagctgggattacaggcgcctgccacgacgcccgactaattttttgtatttttagtagagaagcggtttcatcgggcaggctggtctcaaactcctgacctcaggtgatccacccgcctcggcctcccaaagtgttaggattacaggcgtgagccacctctcccggcccggggaagctttttctaattcatacaaaagcccggtatgggctgggagcagctcaggtttgtatgcccgaataggcttaggtgkagatgcatcttgcaaggcgcaaggaccgccttggcagttccccgcctctcacctgcttgctgtcttggtcccctcaggtacagaagtacaaggtgcgttgcacagcggagctgggtgagctcttgctgctgcgtgtacacaaggagcgctacgctttcttccgcaaggactcttggtactgtagccgcatctgtgtcaccgaaccggatggtagtgtatcccacttcccctgctatcagtggattgaaggctactgcaccgtggagctgaggccaggaacaggtgggccagagacgaggactacactgtactgcagaaggtgtcctttgggattaggagtggggtctcacagagccccagagtatagggaataagattgaggtcagaaactctgggctcccaagtagatgttttctgaawaaagggagcctctcaagccctgaaawgcgagggttttgcagayggtattgactcttctggagactcacatagacacatacactcatataggcaggcacccttctctcatacacataggaagcactttgctttccwcagcctccctctgcacttctccagagtgagttcctccagaccccagagaggaactaacctgcaccctgagtcattagattttaacaggtagagaagccctggctgctcagagattttagctggagaggccccattccctcccctactactagcttttctagtgtggatgaagtccctgagaggtgytgctaggattccttgttgamtttctggggccttctgcagatgctgggcttgagcatcttcagtttccagagctatctgatctggagaggcaacagtagggctgctctgggtgttgggaggaggctcaggatgaaggagggatatyctaggtcaaagtgaggcaaatgaatattaccccatggtcygtaataagttttccatagacctcaytataaactctcatccatctccacagcacatccatccatagcttcacaaaatatatttgttcatcagtcatttaaagtgcatcttatacacatggtgccaggcaccatgctagaagccgggaatacagaagaagaaaaagaagaaaaaggaatacaagacgacttctgccctcagggagtttatagtctggaggggagataaacatgccaacaattgggaagattgctataatttgggggtgaagctgtcttgaatcccttctactgatgaatacacaaagaacgtgggggcaccgccacrtgtttcacagggatgtggctgtcggattgggttcaagggtcagggggttcaggcaagrtttgcagaagatgttgttggaaaagagacttataccaagagtaattttcattccccacagcaagaactatttgtcaggactctcttcccctcctcctggatcacaggacacgggagctccgggcccgacaagaatgctaccggtgagggtggcctaatttgacttctttccccatctttatcctgacctcagtcttaatcagattgttcctaactctaacctcattctcaaccttgggtgcctagyttggatcaggactcttatttggacctaaccccactttaatagtgaccctgaatctgaactgagaacaccaatagtaacagttgtcccaacaccaccaatgaatccatactcagccctcaactgtccctgatgtaacccagatcccaatatcagaagtgacctgaagtatccaccaatctcagtcctttctcagcctcccccactaaaccggccatgattttaatctcaacacaaacccatctctaacccagtgtgggcattaatgccatccttaaatgctaccctatgtgaagccagtgctttcatggagaaatrtccaattccttgtcactcatccagaaagtaggtggtttttgaagttttaatctgaagccgtgtctttaaagctaagacttgtgtttatcccgagcatgacctgccacctctgacctctttccctcggaagctggaagatctatgcccctggcttcccctgcatggtagacgtcaacagctttcaggagatggagtcagacaagaaatttgccttgacaaagacgacaacttgtgtagaccagggtgacaggtgaagattaaagcttgggaaggaggggaaaggaagtcaagtggaaggtctgtcgggaggatggggtcctgatagccaggaaggaggggtaggggtctatgacaatgcagtttcattcaagcatcaggatgggagatggccccaaagggtctggcacaggggacaagagtgaggaggttattttagctcaggagcagagagggcaggggaggagccgggagtaagagagacccagggacttggaaggcaggaaagagggaaggagttgagcagctgggcttcagggcccactgactggtttctgtctttctactcccccgacccccagcagtgggaatcggtacctgcccggcttccccatgaaaattgacatcccatccctgatgtacatggagcccaatgttcgatactcagccaccaagacgatctcgctgctcttcaatgccatccctgcgtaaggccrttgtccctctaatgaacatcttacatctctgcccatccatccccctccccgtgctcccagactgccccttctccctattcccagtatcccctctccctgccccagtccctcctctctggactcattccctctccctgccccacagtcttccctctctacatgccccctgcccccttcctgcccttgtctcccccttgtgctccccagttcccctctccctgcccccagactcctcagcctctgctttcatgattgaactcctcgtggttttcccacccactgggtgttaattgggcccccagcgagtgtgtgtgcagtgagtgagtgagtgcttaggagcccaggtgacatcgttcctgggcctgtccgatcattcatccccccttgccaccctcccttccccaggtgcccacacttttcagggcacatcactttttttttttttttttgagacggagtttcactcctgtcgcccaggctggagtgcagtgccgcgatctcggctcaccgcaacctctgcctcctgggttcaagcgattctcctgcctcagcctcctgagtagctgggactacaggcaggtgccaccatgccggctaattttgtatttttagtagagatggggtttcttcatgttggttaggctggtctcaaactcccgacctcaggtgatccatctgcctttgcctcccaaagtgctgggattacaggcatgagccaccacgcccagcccacacatctttatacatcctatgttattgacctattgccacacgcctacttgttccatgttccattccttttgttgttgttgttgttgttttgagacggagtctcactctgttgctcaggctggagtgcagtggctcgatcttggctcactgcagtctccacttcctgggttcaagcaattctcccacctcagcctcccgagtagctgggattacagagatgcaccaccacgcctggctaatttttgcatttttagtagagacggggtttcaccatgttggccaggctggtctcgaactcctgacctcaggtgatcggcccatcttggcctcccaaagtgctgggattataggcgtgagccaccgcatctggcctccattccctttcctttgattcagcttatttagtgagtgcatattatgaactggatatggtggggcagacatagccaagtccttgccctgaggagctcatagtataatggggataatatatgtccactgggcttacaatacaatgtgggaaatgatgagtgtgaaagatccaaggcatgtgttcatggaggagttcatgtgtgcaaggaggagttcaggcaatgctccataaaggactttgcttctgagctgtgcctagaagagatagatttttatcatagagatggagtagatggctttctaccagaggtgaagmttaaatgaagacctggaagtgggggaaagccattttaatttcaagcatgcttctccatattataaaataatgttgcaggkcatggtggggcacatctgctacttgggaggyactacatggtagtgcctgctacttgggaggttgaggcaggaggattgcttgagcccaggagtttgaagctgcagtgagctatgattgtgtctctaaacagccactgcactccagcctcggtaacacagggagatcccatcttaaaaagaaggaaaaaaaatagtgctcactgtaaaaattcaaacagcacagacatccacaaagtgaagagtatgcatctctccacgtgccagcccctcttctaccktccagtgtacaaagcatgtctctgatcatgtttggagagcgggtcttggttggccctgtctaatgcctagggtgggagaaaatactggaaaggttggtagaagctggctggtggggatctccatgggctagtcaggcttggcagctggggctctgtcctgtaggcagaggggagccagtggaggtctgtgacaagagggcagcttggagaatacasgccaaaacaccagtgagggtggcttgtctgcaccatagggccgtgtgtgccaactttatgtgcaagtgcaatgacctgtcttagggatggctgcatatgaaccagggtcttccgaggccacagagcctccaccgggtactagactttttctcccatgtggattgttaggcatctctactctggggatggaccccgtcagttcctccaggcagaggggsacacagtgattcccagcagactctagcccccagacctcaccctcatcttttcctctcccatcaggtccttgggaatgaagcttygagggctgttggatcgcaagggctcctggaagaagctggatgacatgcagaacatcttctggtgccataagaccttcacgacaagtgagcagagccaggcaggagatgtctacccctcaccttatctcatgctcagaccccttcctctccttcctgggaaagggccctctcccagccctcccagggagactgctggatttgagtgggaggggctcctggcttcactggtggcatctcccagattcctctggagaacaaagcaccttctctgaggaggggacaaaaacaggggattcaggagagagagacactctgcttgcctgggagagggtcacagtcatttagggaatcttgatcctcmtcagggacacacgactctcttcccctactccaaccaccaagtgctccgggctttgggtccagaaaggcttaggttctcaaatccctgctctgccactcagctgtgcaagtcactccatctctctgacccttagtgtctagtattaaattgaagatataatgattcctacctcatagagtttttgggaagraaacctaaaccacaatgataagcaaaggacttggcaggactaggatctagggaagtagtttctagaccaactggtcccctytcttgtatcccagagtatgtcacagagcactggtgtgaagatcacttctttgggtaccagtacctgaatggtgtcaatcccgtcatgctccactgcatctctagcttgcccagcaagctgcctgtcaccaatgacatggtggcccccttgctgggacaggacacatgcctgcagacagagctagaggtgggtaaggatctgggcagtgggcctgataggtgggaggtgggtgtgtcaccattatggacaagggatgtgtgtggagggtatggaaatggcctgggctgcatttcacctgtrggcctcatcctctgggcagccatggtcctgcacactttaagtagagcagatacggatgagggtcagactggggttgggaggctttgaggcctgagatggggcctggtgaaatggtgtgaacgcgcagggtggctgcagggacatctytgaggaaggcttgcccttgttttgaggcctcctgaagaggtgctgaggcctagaggaaagctgttttaggacaggccaatggtagggccaccagatgcatcagggaaratcacggagaactaggagctctgaggttgtcggagacgaggctaacccagtctttttggggcagtcaagccctcaggcattctcctccagaaagctagagacatggttggtcagttctcatgtgttcatttagctgttgctggatacatagtgctcagatgtcagaaggggattccatctgagttgagagtgggaaggactaggtatgaggtgaggaggagaggackctggcttgtctcagcaggcgagctgttgcacaaggagggactcagctggacytcattccggacattttgggaagggcggggtaccccactttggccattaattcaggcaccaagaatttctgagacctcagctgggggcctcagctcctctctggggtggaagtgggcaggsaaatgggagggaagtggagcgcgagtagggagggacactcagcctctgtgtgccttctgcagagggggaacatcttcctagcggactactggatcctggcggaggcccccacccactgcctaaacggccgccagcagtacgtggccgccccactgtgcctgctgtggctcagcccccagggggcgctggtgcccttggccatccaggtgagcccggcgccgccgccccgggatgggggctcaggtgctaaccgccagcccggagccccatcatccctcgttcctttcggacgcagctcagccagacccccgggcctgacagccccatcttcctgcccactgactccgaatgggactggctgctggccaagacgtgggtgmgcaactctgagttcctggtgcacgaaaacaacacgcactttctgtgcacgcattkgctgtgcgaggccttcgccatggccacgctgcgccagctgccgctctgccaccccatctacaaggtccgcgaccccgggtgggggcccagcggggcaggggccgggcggccttgtccccggccttcagctcacgtgatccgctccgctcgcagctcctactcccccacactcgatacacgctgcaggtgaacaccatcgcgagggccacgctgctcaaccccgagggcctcgtggaccaggtgcggcctccctgccgggtcactgatctccgccccsgaagacgctttgccccgctacccgcccccaagccctgttctgcgcccaagccccttgtgaggacacctggggtgtgagaacacctgtacaatcactgcctcttccaccagccccgcccactccgccggtctccggtctcctaccggcccccttcacagaccctgtctcccccgcccccgcagcctcaccgcccccgcccaccgcccccagccccgccgggccacgggtccacaggcagggcagcctcatcctgagccccagcactaccctcagctgaccctgagcccagccaggctccccggctttcagttcattcttttagttaccaaatacctaaggatctcctcccacgcacgtaatggggcgtcaagctgcgcagcctgcgtcaggcaggccctcgtgggtatttgatccgtggattgcttggtgaaccgaagaaggccctccttgggccgagtccccagccccatctcgtgcccagacactagggtggggattgggccggcccgggagccgagctgtgctgtgtcctcaggtcacgtccatcgggaggcaaggcctcatctacctcatgagcacgggcctggcccacttcacctacaccaatttctgccttccggacagcctgcgggcccgcggcktcctggctatccccaactaccactaccgagacgacggcctgaagrtctgggcggccattgagaggtgcgaggtgcggggcgggaccagcagtcccaccagggtctcctggcctgggacattgtggtccctgcgctcatggcgcctggggatttcaggtgttttcacaccctagcatagggaattcttgagggtatgaattgagtttggggtcccttctgaaatggcaggtagctgccrtccagagaggggcttgggggtgtgtggatgcaggggaaggagggggtgtccagtggagtcagagtatcagggctggtgcatcatttaagcatgggctggggccwgtggcaggcaggtcytccttcctcctggstggggaggggggtggcagcatgaatcagactcttcgtgcactcccctgcccaccccccaggcccctgtgcaggaaggaagtgtggagcacccatggctcaggagtgagtgggacttaagggaagcccggccactcagattccagctgcacctgggggtccctgctgaacccccatggctatctgtctctctgccgcctgagcagcagtgggcctcggtttcctggccaggactgagcccgtggttactccagtggtaccagcatctctttcctgcagctttgtctcagaaatcgtgggctactattatcccagtgacgcatctgtgcagcaggattcggagctgcaggcctggactggcgagatttttgctcaggcgttcctgggccgggaaagctcaggtatcccctctctatcccactttccgtgtagctctgatgagctagcacttgcttggccacaccctactcccatcagttatttattgaccagcctttgaagtagatactattaatatccccaactagcagatatggaragaggcacaaagaaggctgtgcaaggcgggttccgagccagctccgactgtctccaaagccattgctgcatccactgctctgtgcccctctggtcccttgacctttccacaagcccacccatkcatttcagcttcctgagctctgtcaatattctgcaacgtgcagtgggagccatctctgacttcagaggattctgggaactttctctcaaaccctccttcctgtcctgccacgtggcccctccagccaccaacctctcttcatttctttctttctttctttctttctttctttctttctttctttctttctttctttctttctttctttccttcctttctttctttctctctctctctctctccttcctttctttctttctttctttctttctttctttctttctttctttctttctttctttctttctttctttctttctttctttctttctttctttctttctttctttctttctttctttctttctttctttctttctttcttgtttttttttttgagacggagtctccctctgtcgcccaggctggagtgcagtggagcgatctctgctcactgcaagctccgcctcccgggttcacgccattctcctgcctcaacctccggagtagctgggactacaggcacccgccaccacgcccagctaattttttgtgtttttagtagagacaggatttcaccatgttagccaggatggtctcgatctcctgacctcatgatccgcccgcctcagcctcccaaagtgctgggattacagacgtgagccacctcgcctggtgcgagacagagtcttactttgttgcccaggctggagtgtggaggcacaatctcggcttactgcaacctccacctcctgggttcaagagattctgctgcctcagtctcccgagtagctaggattacagscgtctgccaccacatctggctaatttttgtatttttagtagagatgcagttttgccatgttggacaggctggtcttgaactcctgacctcaggtgatctgcccacctcggcctcccgaagtactgggattacaggtgtgagccaccgcacccggccttggagtttttaaagggtgacccttccctgtgttttgcaaacctgctattaatcatgatcagtgctgatcctgacagctcctccctccttgggcagttgtttcatatttggggtgtctgtttcctacttaagacccaaagggggatctaattactgttaattcaactctcctatcttactttatttcatttttctctgatttaatgcatcagaacactcttcagattgacaacagctcttccaacaagtataaacctattgtagattcatatacagcatttaaaaagggaaaacacacttattaacctcagtcagtctgaggttaattcaactctcctatcttactttattacatttttttctctgatttagtgcatcagaacattcttcagattgacaacagctctttcaatgagtacaaacctattatagagtcacatacagtatttaaaaagggaaaacacacaagttaacctccacctcccggttcaagcgattctcctgtctcagcctcccgagtagctgggactacagtcgcacactaccacgccyggataatttttgtatttttagtagagatggggtttctttcaccatttcggtcaggttccatattccaatgggggaaaaataggcaatatgaactacagaaaagttcctatagatggtctgtccacttctttgtttttattttttgtttttgctcatgttttgtttttttgagacagggtcttgctctgttgcttaggctggtctcaaactcctgggctctattgattctcctgtctcagccttccaagtagctgacactacaggtgtgtctgcctgctttacttttttgttctcagcctccgagtttagagactcaaccaggaacagaaccttcagaaaactcccacacactcccaggcggatgtctggtcttgcctcccaacctctctgttctgttgcatcagcctccgtccagtcagcctgactccaaaccttagttctctttgactcatgtttccctctctgtcttcctaaatccagttaggtggctgatccctactgtcaccaccctagttgtagtcttcctcatagtgctctggaattgtggcagctgcttctcaaccagtcccacctctcccagcctctcgctgcttgcccgccaagcctgcagggccaccaccctgctaatcctctgaaatactgcccagaaaccacatggccctgaatgccgctgcagcctcacctccaattaggtcccctccctgttccctcaccctgttaataccccatgccttcctactctggctttttttttttttttttttttttgaggcggggtctcactttgatgctcaractggagtgcagtggtgtgatcacagctcactgcagccttgacctcccaggctcaagtgatcctcatgcctcagcctccctggtagctgggactacaggcatgcaccaccacatcactgcatccagttacctttttaaaaaatgttttttagagacaaggtcttgctatgttgcccaggctggtctcaaactcctgggcttgagcaatcctcccacctctgcctcccatgctctggcttcttaccctctcatgcattccttcattcaaccaataattaccgggctcttggtatttattaagtattgttctaggtgctgaggtttagtagtgaaaaagacaaaaattctggccttagttgagcttaacattcttttggagagagaaagagagaatcaacaaacacatgtcaggtggttatgaatgctaagaggaaaactgaaacagcatcaggggatacagtgtgtcaaggtaaagagatcatttcagggaggtggccagggcaggcctctcaggagctgatgcattagtagctgaaggaaggagaggtgctagttctgaagataattggggcaagagtagcaggcagaggtatagtaagtgtgcaggccctgaattctgaatgtgctggtgcatttgagaastatcaggaaggcctgcacagctggagtcraataagtgaacagccaggaaggaaatgawgtgggagaaggggctggggcccaatcaagtagggccatgacaaggtgagtgagatgggaagccctccgagggttttagcgaggggtgacgtaatctgacgggcatttgtccttgccagtgtgcagtgtgaggtggtgtagatgcttaggtggggacgtcaggtaagctgcctccagggtaatgcccacggctgagtctggagctcagacgccaggcacagccagagaagggaatttgggagttgttggcaagtgggaggtggttagagccatggacttggatgagatgagtgaggcacagcatgaatggaccaagggctgagccttggagctctcccctctccaatcctgaaatgcttttctctgttgtcttttttccaytggagsctcatccatctttcaactcacaaggcccctcttgtcctccaggaggcctccactaaccactctgctcctggtgcccctttctgccctgcttgccctctcctcaaagagccaagctctggtcttagaagcttccttctgcttctgttactgtgagcttttcagtaacacgccctctgcgtgggtctctgctgctaagcccagcagaggatggttggatactgggtgcttgaacaaatcttggtgaaccgggtaggattaaatcattacatcctaataggggctgcagattgaagtgccttggaagtcagggagaggcagctgggcacttgggcttgaagctgcctctgtcattggccctgcctgcyggggattttctggccagatcccagcccccatctcctatcctgacccacttcagagaccacaaatcttggtgrtggccatccctaaccagcccgacaagacagtcrtggctcggtgttccctacttcctcactttccccctgtggtgagccccagtcctgagctggccctaggaatccagtaccttccatccacaccctctacccttcctccccacacccaggtttcccaagccggctgtgcaccccaggagagatggtgaagttcctcactgcaatcatcttcaattgctctgcccagcacgctgctgtcaacagtgggcaggtgaggctacaaagggmaggcctggggacatcaggtctcagcaatggacttgaggcctgaatttgggttgagagcttgggtrggtcagcgttggggtgggtttatgattagacttggggttggagtggcagctgagtggggtgaagggttggcattgggtgatgactgggtggagctgggtccaaggttgtaatggtgattcaagttgatgttaatttgggagaagaacttaggggctcctctcatggttagaacccagccaggtggagtagcagcttgctctgtgtggcatggcaacccaaggcccttttctaggattacctccactctggggccacctccttccctagtgactcaccccaccgagtcctggaacactgggcggggagtgacaaggagtaagctggcttcctgccccacttctgggartttccactccctaccctttcctctcttgcctttccatgatcccctcatttcccagctctcttgcctttccgtgatcccctcatttcccaactatcacctctaggayggcagaggtggaatcagggatggtgaagagggaggtgatactccccttctggccaactgacccaactgggatgggggtctccacagcatgactttggggcctggatgcccaatgctccatcatccatgaggcagcccccaccccagaccaaggggaccaccaccctgaagacttacctagacaccctmcctgaagtgaacatcagctgtaacaacctcctcctcttctggttggttagccaagaacccaaggaccaggtgtgtatacgggatgttgaggggagtagggttctttagggccaccagtaggggtggtggtggcttcgtctgggggcttgaggactgatcgacgggatttatgttcactgcagaactgccttgggttcttcaatttcttcagaaaatgataatcccaaaagacatagactgaagcaaataccagtttagttaccaatctgtccgtccatccatttatccgamtgttcattcatcaactastcatgtgttaatgcaaacattcaataaacatttgttggatacttcctatgtgtccacacagcactgggcaccaggcctataacgctggmtgagaccttcctgccttcaagaagcctgtggtctagttgaggagacatacaggtcaatgaaaaagggcaccaccgtgttgtaggagttacttatatgttaatttctccattcaacacacacttcctgagtaccagtggtgacccagacactgttatgggcagctatgaaacttgtccatgtgagcttacagtccagtgataggggtaaggacagggccctgaggaacctaaatgggtctgggggaacccaggaaggcttcttggagaaagtgacatctaagttgaaatctgcaggacaagtaggagttggacagagaggaagagcagggctcttttttagggagggggaagaacaggaccaaggagcgaaggcgagaaatcactggtgtgtttgtaggatcacaaayggaaatagcagagcgragaggaaggtagggctttgtctgcacagtgttcgtttagaagacaaagggtagccaatcaaggcttcccccacccccccacatggagtcttgctctgtcacccaggctggagtgcaatggtgcgatatcagctcactgcaacctccgcctcccaggtttaagcgattctcctgcctcagcctcccgagtagctgggattacaggcacccaccactgtgcccagctaatttttgtatttttagtagagatggggtttcaccatgttggccaggctggtctcgaattcctgaccttgtgatccacccatcttggcctcccaaagtgctggaattacaggtgtgagccaccgcgcacggccgccaatcaagacttttaagcctgaggcccaatggttaaatctgctttagctagggtgctcctgtrgctgcgtgaatggatgcaaagggcaactttggaggcaggaggcwagagaggggccaatatctgagtttaggccaggcaagtagccctttatcactggttcccatcatctttgtttccacccagccgtcttgcacacaagctctctaacaggtgaatattcttatttctcacgcttgactccctttggtgctggaaagattccagatgttgctgggcacagtggctcgtgcctgcaatcccagcactttgggaggctgaggccggtggattgcttgagcctaggaattcaagagcagcctaggaaacatggtgaaaccctgtctctacccaaaacacaaaaattaatcgggcgtattagtgtgtgcctgtggtcccagctgcttggggggagctaaagtgggaggatcacttgagcccaggaagtaaaaaaatgcagtgagccatgttcacgccactgcacgccagcctgggtgacacaaaaacaaaaaacaaaaaacaaaaaaacaacaaaaaaagaaagatcccacatatttgatcttcctggcaagttttaacttgctaccttatatcctgggaatggcaggactctgggtcctgtccctatctggtcccagagggatgacagataagtagacaacagcatgagggtggagggctctctcctataaactatagaaagtttaacttggaaatttataacaacaataataatggcagctgtcactgaggagccatcatgtctcagttattaaatcagatcctttgtgtacatgattttaaaatgtgaaccaaatacatagctctatttaaaatgcttggcagccaggcgtggtggctcacgcctgtaatcccagcacattgggaggccgaggtgggtggatcacctgaggtcaggagttcgagatcagcctggccaacatggtgaaacccccatctctactaaaaatacaaaaattaggtgggcatgatgatgcatgcctgtaacccagctactcagaaggctgaggtaagagaatcacttaaacccgggaggcagaggttgcagtgagctgagatggtaccactgaactccagcctgggcaacaagagtgaagttccatctcaaaaaaaaaaaacaaaaaaaaagcagcttggcaccgtgctggcatataaatgttcaataaatggtagttccacttcacaggggagaaaactgaggttcagggagattcagcaatttgttcaacagcacagagctagtaagtaggctttgaatccagtgtcatatttctgtcttctgctgtgttttctctttctttctctggtgtgtgtgtgtgttctgtttttttgatggctatactacarttttagaaatcaagtattaagccaggtgcaatggcacaggcctgtagtcccagctactcaggaggccgcagagagaggattcctagaggctaggagttcaaggctgcagtgtgcatgaccatgcctgtgaatagccactgcacttcagcctgggccacataacaagaccccatctttaagaaagaaaagaaaaaaagaaattagatgtcaatctgattttaaaaacataaaacttgttatttcaaaaaaaaccacaatacaataaaataaaaaaactayagacatatttcttttttcttaagattctctggatcagaaatttgggcagggctaggctgggcagtccagagggtactggctagggtgaaacacttgcatgcaatcagctggtgactgggctgtgctggaagttcccagaaggctttgctcacatgtctggggcctcagtgcacctgtgtrgtttttctctctctccatatgctgtcttatcccccaggactctccaaggggtctctccccagcaggatagctggacttcctcatagcacggtggctggcttccaagattgcaaacaagctttcagatttcttcaagtctaggcccagaagtggcagactgtcacttacagcactattttttttgcttccgtccctccctcccccctctccctccctccctctctttctttctctctctttctctcttttgacagggtcaggttgtctgaaaaaaagcctggtcaactccagacagggtcacccaggctggagtgcagtgacatgatcatggctcactgcatcctcaaactcctgggctcaagaaattctctcaccccagcctctcctgtagctgaggccacaggcaycaccacgcctggctaattttttgatttttggtagagacagggtcttgttatattgcccaggctggtcttgaactcctgggctaaagtgatcctcctgccttagcctcccaatgtgctgggattataggtgtgagccactgcatctggcctagacaattctaatcaaggaggaaaataaaaaagagaaagaaagggaacataaatacacagcattaggaatgggaaaggcgtataaccacaaatgcagagaagattttttactttttttttttttttgagacagagtctcactccgtcacccaggctagagtgcagtggcgcggtctcggctcagtgcaacctctgcctcccgggttcaagcaattttcctgcctcagcctcctgagtagctgggattacaggcatgcaccatcacacctggctaattttgtacttttagtagagatggggtttctccatgttagtcaggctggtctcgaactcctgacctcaggtgatccacccrtctcaggcttccaaagtgctgggattacaggcgtgagcctccgcgcccggctggtagtactcttaagaagggcagtgggtctcattggaaggctctagtcccagatccacacctaccacccatatgactttagttatgtaatggcctctctaagccttatttccttatctttaaagtgagaataataagaatacctgtcttcagagttgatgtatggttgcgatggttcatgtacagtgcttacgtgttagctgttattacgaaaatgaaattataaggccgggtgcagtggctcatgcctgtaatcccagcactttgggaagcagaggcaagaggaccgcttgggcccaggatttaagaccagcctgagtaatatagtgagaccttgtctctccaaaaaaaaaaaaaaaagaaaactagccgggcatgatggcgtatggctgtgatcccagctactcgggtggctgaggtgggaagattgcttaaatttgggagttcaaggctgtggtaagctgtgatcccatcgctacacttctgcctgggtgacagagtgagaccctgtttaaacaaaaaaagaaaaaaatatatatatacttattccacttagctacaacaatcttaaaaatatatcagccaatgaaggccaatagtgaataataaaacaataacacaccatgataaagtctaatttattctaggaatgaaaggaatgaaaggttggttcaaccttatgaaatctagcaatataattcattacgtcaataaagatgcataccatataattatctcaatatgtgctgaaaaagcatttgataaatgtgagcagccattactaataaaaactcagtgtaaaatgaaacccccttaaggagttttgattagaagtatatttcaggctgggtgtagtggctcacgcctgtaatctcagcactttgggaggctgaggcaggtggatcacctgaggttgggmgttcaagaccagcctggccaacatggtgaaacctcatctctcctaaaaataagaaaattagccaggcatggtggtggctacctgtaatcccagctactcgggaggctgaggcaggagaaatcacttgatcccgggagacggaggttgcagcgagccaagatcgcgccactgcactccagcctgggtgacagagcgagactccgtctcaaaaaaaaaaaaaaaaaaaaaacaaaaaccaaaagtatatttcaaaaaacactgtatttatggtgagaccatagatgtctattcattaaagtcagagataagaaaataatgcccaatgcccactattactgctgctatttaacattgatctggagggcttcgccaatgcaacaaaacgagaaaaagaatttgttaaagatcagtagtattggctgggcgtggtggctcacatctgtaatcccagcactttgggaggccgaggcgggcagatcacgaggtcaggagatcgagaccatcctggctaatacggtgaaaccctgtctctactaaaaatacaaaaaattagccaggcatggtggcaggcacctgtagtcccagctactcgggaggctgaggcaggagaatagcgtgaacccgggaggtagagcttgcagtgagccgagatcgcgccactgcactccaacctgggcgacagtgcgagactctgtctcaaaaaaaaaaaaaaaaaagatcagtagtattggcaacaattatatgaaggttctagtaaatgggaagtgtgtgctggttaggaggctggacctctgcgttgtcgtgatgagctggttgtgtgatatgatcatgagggagggacagtcctgtacacaggatggcagtgactggagctcattgtgatatttctcgatagtgattggctgtgctgtaaagtgtggcagtggaggatgatggtgattgtgttggcaaaagttccatcacgatggttgattgtgaaggtaccttagaaccaggatgctggttgtttttaggagttgaattttgtgaaattatgaagtaattgttatattcttgggtatatttcctgggcagtgtttackttgatctcggttgtatgaaaggtgtggttcgttcttttagttcacagagcagttggatcaggtatgaaagggacctttaaaggtctaggccaggcacggtggctcacacctgtaattctagtgctttgggaggccaaggtgggaggatcacttgagcccaggagtttgaggctgcagtgggctatgatcacaccactgtactccagcctgggcaacagagtgagaccttgcctcaaaaatttttttttctagttcaacccatccattttcagatgcaggaattgagtctcaaagagtcaaagtaacaggcagaggcttgccagcagaggcagtactgaatttgggttggctggctcctacgtcacagtctgtcccctactctgtttggggtttgggtgctggggggcctcgtgtcaggatcatggggtggcagtttggggcaagtgtttacaatggctgcaactgggttgtgctactagaagccaccttgactggatttgctgttacatgtggtcctccgttattccccatcccatctgaatgtcatcctgacctcttacctgatgtcctcccagaggcccctgggcacctacccagatgagcacttcacagaggaggccccgaggcggagcatcgccgccttccagagccgcctggcccagatctcaagggacatccaggagcggaaccagggtctggcactgccctacacctacctggaccctcccctcattgagaacagygtctccatctaaccacccccaaataccacccaagargaaagaaaggtccaagcatgaggaggaccagttcctcaggtcctccagacccttccatcctccctgttctcagttcacctgaacctyctcttctgcacatggagacttttgcagccragatggctctgacatcatacaaactgggccctgagctgtgagagaccagcacagcagcgtccaggttaaaagccgctgaccaaagtccaatgcacaatagcccctccgaaaggaaggaaccgcttcacttcttgccccacttggggcagcctcttgttccagcctcttggaatgcccagcttgggtttctgagcttttctccctcatcctccccmatccccaaactccttctcctaccatgcctttctacgttctctttcttccaagcctagagccaccagcccagcttccttctctggaaaagcctggaaactgggcacagaaggactgtgtgcctgggtctaacatgtggtcccctttgtccctagcacctttaaggggaggggaagaattggagggcagcttgcctggacccctaacggctgttctcaggaacaggttcccaggcctggggtgtttgtggagatctgtctttctccaaagatttcatccaactcccctttcatcccactccctttcatcccatttttttctttctgtccttgagcccagtgagttcaataaaaaccaaaatatttggctctcattttgttttgctgctttgatgtgtgtgtgtgtatgggtgggtgaggttgggggtgccaggggattgcagtgaggggcagcagtggatccgtggatcatctattctggagacagaagtgtcccggctcaacgcactatccagccaagccatatattcctgccctcaccttccagagtgcatcatcaggaggtgagggaatgtctggattcaggggactgagaagtggaatagtgagtattttgtgaagcctcagagtctgggtaattgttaacgttgccaccgaaatccagttctcctcctggacacatggaagkctcagcctctggccctcttgtggatgggtacagtcacaggatgagttttggttgagttgggagcagaagggatgaggatcgtctccaggccacacggagacccctgatttccttctctctgcctctcccttccggaagcacatgttgagatggcacttgcttgtgtgtccaagggactgtagaagaggcccccgctgactgagccagacatggactgagtgagaaataaacttgtcaggtgaagccactggaatttgggggttgttactgtggtatagtctagttgatcctggccacatggctggtaatatggggagtctgattttctcccttccagccccacagcccttaaacatagagatctgtgcagcctcaagtcagtctccccggtcttcttaatccacagccgcccaacaccctggttttctgcttccccagacctcagatccagcccaccttccttccttcctctgccacctgagtcaaattctgtgcctgacccaaccctggtcatggcctctctctggcgggatcacagtgtctttggacaatgacagggtaactgctcccccatccctgtggtgcccgtggtagggggatcagatggttttagtgtcaacgtaataggcgacccacccagagcttcacgtggctgggggctttgcgggctgcagtgtgtctcagccccagtgcagaccatggtcagtgttcgttcctggagttagtggggatccacaggctgccttggctggggctgccattgtctaagaaaacaaagaaatcatctaagaatctaagaaatatcttaaatcatctaagaaatatacagccaggcacggtggctcacgcctgtaatcccagcactttgggaggctgaggcgggtggatcatgaggtcaagagagcgagaccatcctggccaacatggtgaaaccctgtctctactaaaaatacaaaaattagctgggtgtggtggtgtgcgcctgtagttccagctactccggacgctgaggcaggagaattgcttgaacctgggaagcgaagattgcagtgagccgagatcgtgccactgcactccagcctggtgacagagactccatctcaaaaaaaagaaaagaaaagaaaagaaaacaacatgtgttttcagtacaaccgcagctccacgaagagctccacgcctaaccacatttcctccctaactaaattgccatcccaaagccctggcatattgaaattctggggcggccaactgtcccattacatcccagcccaagaatcttctctgttgtcaaccaaaccacttctccctttgctcgcgcgcgcgckygtgtgtgtgtgtgtgtgctgtgtgtgtgttggggaaggctgtctttggctgttgaattttcactttctgcatctgtgatccttggagaagaggatcctcataccactgtgctaaagaggtgtgtttgcagatatctcacatgcagattgcaacctaaggacttatcccaaatcaccagttttgttcactgtagaacaaatcaaaggactaagaaatactcaggggcgcccccttgtggccaccaggggtgagggtgaggctgaggctaggtgcgcagtgcaggcccctttgaccttgcgcctggctgccaagcattttaaatagagctatgtatttgttttatttatttatttatttatttatttatttatttatttatttattattctttgagacggattttcgctcttgttgcccagactggagtacaatggcacgatctcggctcaccgcaacctccgcctcccgggttcaagtgattctcctgcctcagcctcccgagtagctgggattacaggcatgcaccaccacaccaccccggctaattttgtatttttagtagagacggggtttctccatgttggtcaggctggtctcaaactcccaacctcaggcgatccacccacctcggcctcccaaagtgctgggattataggcgtgagccaccgcgcctggcctgtttcatattttaaaatggtgtatgcaaaggatctgattcaatgacagagacgtgatagctcctcagtaagtgacagctgccagtattattgttgggtgcgcagtgcaggcccctttgaccctggggttggaagcagcagtgaaaagggcatgggcatgctcaggcaccctgtcccccaagaggatgaacactccttgggcctccacaaaggcagcattagtaggcatgcctatcctgaaaaatgcccctgagccggagagggagggaccagggcgggtcattggaatctggttttccagaaaggcagcttggaaagagatttattgggcagacacacctggtacacttaggatgtcctgccctgactctggggacaggacatggggaggaggctcacatcaagtttctggagccctgtgaggtcaggagctcccctcagcttacactctgccctccactgttttttggtcagtctaaaaggtcaactggtataatgggaagcacaccagcctccttccccagctgatcttgagcaagtccctcggcctcagtggtcccgacctgtcagatacatgagtgggacgagaagacctgaaaagccctttccagcgttgacatcctagcatcgctttgcttcgtggctcttgtctgcctagatgctgttctagattttgggagagcagctgtgagctccccaggcacaaccccttctttcacccttcttatgggtgctggagagacagacaataaacgcatcaataaacagataaagatccttttgggcggtggcaagtgcagttggagatacaaccaggtggcagggtagcatgatggagggcggagggcggggaaacatgagggacggtggtcagggagggactctgaggaggtgacactagagttgagacctggatgacatgaacaacacacgcttagggtcgggtgcggtggctcactcctgtaatcccagcactttgggaggctgagacaggcaaatcgcttgagctcaggagtttgagaccagtcccggccacgtggcaaaatcccatctctaccaaaagatacaaaaaattagccaggtggactacgcctgtggtcccagctactcgggagaccaaggtgggaggatcgcttgagcctgagaggtggaggttgcagtgagctgagattgcaccactgcactccagcctaggtgacagagtgagacaccgtctcaaaacaaacaaacaaacaaacaaacaaacaaaaccactcttgaaacagcttgaacagcttggttgaaacagcttgaacagcttgggggaagggtattacaaacccaggaatggcaaatgcaagggtcctgaaggacacatgttctgggtacagcaagaaggccagagtggctggaaaaaggtgtcgggaaggcatggtcttgtagacatgataagtccttggattcgtctcttttctttctttctttctttcttttttttttttttttgagacggagtctctctctattgcccaggctggagtgcagtggcgctatcttggcttactgcaatctccacctcccctgttcaagcgattctcccgtctcagcctcctgaatagctgggattacaggcgcgtgccacaacgcccggctaatttttgtatttttagtagagacggggttttaccatgttggtcaggctggtcttgaactcccgacctcatgatccgcctgtgttggcctcccaaagtgctgggattatgggcatgagccaccgcgcctggcccttggattcatttctacggacaaccccattttaagctctggtgaactttaagcaggggagtggcgtgatttgatttttctttctctgtgtcttaggagagtgggtccccaggagttagttgctccttgccttgcagggcttggggtggggtcaggcacgggggataccccagcagtgagaactcagcttcctgtgtggatggcccctagttagcaaccccagtgagtgtgaatccttcccagaaacctctcctcctcactggctcccgcccctggtccaggagaaccagttctkcagcccaatgagcacctatcaagagtcacgcgtctacgttttggtcatagctggggagtgccccatytacatcctcatgcctgatcccgtccctgtccctgccccagccacattgacatcctcagcatccctgcctccatctctgtctccctcaggaacctaattcccactccacactggagccctgagcaaacccagggccaccctgggatttgggttggaggagacctattggtagcaggatatgactcagtttgcccagtccactgccctgcttctcaccaagcctcagcagccccctggggacacagggcaaaggggagagattagaaagaggaagctgggagaatttgcatggaatttgcatcttaagatttgcatcttcaggctcccagcatcctccaagagtcatcgaggtggttgaggagggagatcccaggggggagatccagctggacggcttctgtctgcagcccaggacagccagccctgccacccagagctgggcacaaccctcatcctcagccttctcccctctcctccctccctccccacccaacccctttccctcccctacaccacgccttgccccttctctcaccctgagcccaagtcagctctcttcggatcttcaccataactccaaagccatcatcgattcaatccccagccctgaccttgtccttgtcattaacccattcaactatgttttcggtgtctcccaggtaccaagtatgacaccaggagatggggacaaaaccaaaaaaaagtatggactaatttattagagaaaacagacatcaatcaaagatgttagctatagtgctgtgagagccatgtatagtgaaatttggctttcctggaaaaagcaattattgagctaagatcaggaggaagaggaaacgtgacctcagtttgagaggtagagagggaacagcatgtgccaaggccctgggatggtgacgagctgacttcacttccttcaggtctttactcaaaagtcttcttcccaaggagccctccttggccactctgtatctaaaatatcctccttttcttttttctgagatggattttcgcttttgttgcccaggcttgatagcaatggcatgaccttggctcactgcaacctctgcttcctgggttcaagctattctcctgcctcagcccccgagtagctgggattacaggcatgcaccaccatacctggctaattttgtatttttagtagaaacggggtttctccatgttggtcaggctggtcccgaactcctgacctcaggtgatccgcccacctcagcctcccaaagtgctgggattacaggcatgagccaccatgcccggcactcctctattttttatattatccttccctgttctctcttttctcttcagcacttatcactatttaacatactatttaatgtatttggttactaggtaatattgtctgcttccctcacttgaaggcaagctccatgggtgcaggggtttgctttgatcgcattgtattttcaggacctgacacagcgctgaacacacagtaggggttcggccagtgtctgttgatgaatgaatgaaaggcacgtggtcccagacagaagagagcaaaggggaatgtgagg

SEQ ID NO: 95509 - DNA, 102508 bp, Homo sapiens
gtgaaaccctgtctctactaaaagtacaaaaattagctggttgtggtggcatgtgcctgtcatcccagctattcagaggggccaagacaggagagtcgcttgaaccagggaggcagaagttgcagtgagctgagatcgccatcgcactccagcctgggggaaaagagcgagacttcgtctcaaaaaaaaagaaaacaaaaaacaaaaaaaaaaacccaaaaaactataaagcaactagacctaacagacatctctagaatactctacccagcaatagcagaaatagcagaatatatattcttctcaaatacacatagacgattctttaagatagaccatatggtaggccattgaacaaatgttaatacatttaaaaggataaaaacaatgtaaagcatgttttctgaccacaatggaatgaaatgagaaatcaataacaaagaaacttgggaaacatacctctgtggaaatgtgcatgaaaatctccaactatcattattcaatttctgtttctcccctccattctgttcatttttgctttatgtatttgggtgcaaaataccataccatacatatatgtaaaaattaacttaaaatggatcatatacataaatataagagctaaaactataaaacttttagaaaaaaaggcataaatctttgtgactttggattaggcaatgatttcttagttatgacatcaaaagcacatgcaacaacaaaatagacaaattatacattatcaaaagttaaaacttttttatttttaatttttatatttttatatatattttttgagacagagtctcgctctgtcacccaggccggagtgcagtatggcaatctcggctcactgcaacctccgcctctcgggttcaagtgattctcatacctcagcctcctgagtagctgggactacaggcgcacatcaccatgcctgcctaattttttgtattttagcagagacagggtttcaccatgttgcccagggtggtcttgaactcctgagctcaggcaatctgcccgcctcagcctcccaaagtgctaggattacaggcgtgagccaccatgcccacctaaaagttaaaacttttatttttcaaaggaaaccatgaagaaagtgaaaagacaacccacaaaatggaaaaacatgtttgcaagtcatatatgtgattttaaaaaatctacaactcaataaaaaaaagttagcccggctaaacgcagaggatttgaatggataactctccaaataagatctacaaatggccatccaggcgcggtggctcacgcctgtaatcccagcactttgggaggccaaggtgggaggagtgcttgaacccaggagtttgagaccagctctgggcaacatagtgagatctcatctcttacaaaaaatgaacaaaattagctgggcgtggtggcttgtatctatagtcccagctacttgggaggctgaggtgggaggattgcttgagcccaggaggtcgagtctgcagtgagccaagatcatgccactgcactctagcctgggcaacagaccctgtcttaacaacaacaacaacaaaaaatacacacacacacacacacacacacacacacacacacacacgaatgaccaataagcacataaaaagatgcttgacatcattaaccatcaggaaaatgcaaatcagaacctcaaagagatatcacttcacacccactaggataatttaaaagacagacagtaacaagtattggcaagaacacagagaaatagaattttcatacactgctggtagaactgtaaaatggtgcagcgactttagaaaacagcctggaggcacctcaaagggttaaacagacttacaatatgacacagcaattccacttctaggtgaatatccaagagaaataaaaacacacatctacacaaaaacttgtatgtgaatattcatagcagcatttgctgggtgcggtggctcacacctttaatcccagcactttgggaggccaagtcgggtggatcacctgacgtcaggagtttgagaccagcctgggcaacatggtgaaaccccatctctactaaaaatacaaaaattagctgagcttggtggtgggtgcctgtagtcccagctacttgggaggttgaggcatgaaaaccacttaaatccaggagacagaggttgcagtgagccgagatcatgccactgcattccagcctgggcaacagagcaagactacatctcaaaacaaaaacaaacaacacaaaacaacaaatattcacagcagcattattctaatagccaaaatgtggaaacactccaaatatccctccaatgatgagtggataaataaaatgtgatataatgagactttatttggtaatacaaagaaacaaagtactgataacaagctacaatgtggaggaatcttaaacaccttatgctaaatgaaagaacccagacacaaaaggccacatatcatgtttccatttatatgacatgttcggaacagacaaatccatagagacagaaagtgaattgctggttgcctagggctaggtggggagagcagagttggggtggaacagggagagactgctgcttatgggtttgcagtttcttttaagggtgataaaaatgttctaaaattcattgtgatgacagcacaacaccttgaatatatttttaaaaacccattgaattgtatactttaagtggcttttcgatattatatttcaataaagctgttacttaaaaaaatgttggtagtctttccgtgtaaataagggatctgtagttatttttaaaataaaaactaaaactaacttttttattttttttttttgagacagagtcttgctctgtcgcccaaactggagggcaatggcacaatctcggctcactacaagctctgccttccaggttcacaccattctcctgcctcagcctcccaagtagctgggactacaggagcctgccaccacgcccggctaattttttgtatttttagtagagacagggtttcaccgtgttagccaggacggtctcgatctcctaaccttgtgatccacccgcctcggcctcccaaagtgctgggattacagccgagagccaccgcgcccggcctttttattttttgtttagacggagtcttgctgtcgccaggctggagtgcagtggagcgatctcggccgctgcaacctccgcctcccgggtttgagtgagtctcctgactcagcctcccaagtagctgggattacaggcatgcaccaccatgtctggctaatttttgtatttttactagtgacagggtttcaccatgttggccaggctggtctcaaactcctggcctcaagtgatccacccgcctcggcctcgcaaagtgctgggattacaggcatgagccactgcacctggcctttttttttttttttttcttgagatggagtctcgctgtcttgcgcaggctggagtgattcttctgcctcagcctccagattagctgggattacaggcacccgccatcatgcccagctaattttttttgtacttttgtagagacagggttttatcacgttggctaggctggtctcaaactcctgacctcaggtgatcctcccactttggcctcccaaagtgctgggattacaggtgtgagccaccgcaccaggcctaacttttatataaaacaaacaaacaaacaaacaaacaaacaaacaaactgttggaagggcagaagactgctgttagtgttaagaaaatcaagctgtgtaggaactaccaacaaactcagctccctgcagcactgaggtgaacaccttgcaggaagacacccggaacatgtggctgaaaccttctttccaaagcctgctgaagtctgctcacctgccttccgctgccagaagccataatcctctctactctcactctcttaatcttgcagatacactgtttattggcagaacctgcactggagccctgaagagcagctacaggaactgtcatctcccagatgccagctcctgtgataccggggagaacacagcaggaagtgggaatggctctaagcagccacacagagcaggaaatgaactcaccttctgtttgaaatgaggaaatcgaacccgatattgtagaagtgacttgctcaaggtcacataacttgctagtgataatgtacctactcttcagcttagggctttcgttgatggcgggggggacaaaaaccatctgtgtgaattttaggaggcacaataaactgactatcaagttactattttgatttaacacccagaaaacaaatataccaaagatgatttatgtaggaaaaatcctggtgctgtagatttcaggcctgtccaaacattacacttcaaacagctgcttgaccctgcaaaataaaagctcatttcataggcttggtggtttgtcaaaaaatccttcaacatgatattttggcacacacacaaaaaaattccacatatcatgagcagaaagtctgagcagagttttgctcttgttgcccaggctggagtgcaatggcgggatctcagctcaccgcaacctctgcctcccaggttcaagcaattctcctgcctcagcctccctggtagctgggatcacaggcgtgtgccaccacacccagctaattttgtatttttagtagagatggggtttttccatgttggtcaggctggtctcaaactcccgacctcaggtgatccgcctgctttggcctcccaaagtgctgggattacgggcatgagccaccaagcccagcctgatttttttttttttttttttttgagatggagccttgctctgttgcccaggctggagtgcagtggagtgaccttggctcaccacaacctctgcctcctgggttcaagtgattctcctgcctcagccttctgagtagctgggactacaggcgcatgccaccatgcctggctaaatttttttgtatttttagtagaaacagggtttcactatgttggccaggctggtctcaaactcctgaacttgtgatctgcccgcctcagcctcccaaagtgctgggattacaggcatgagccaccgcacccagctagtctgattttttattaagatttgtttactgagaaccaaggctccaattacccattcactcattcttaaatttgttcattcattcgcaaatgttccctaaacatcccttaaggagcttacttcagtgaaggagacagaaacgtaaaaagtgaataaaatatatatgagactgataaacttagtgtaagagtataaatatatgtaaacggatgaactaattattataagtataatagggttgggcacagtagctcctgtctgtaatcccagcactttgggaggctaaggcaggaagatcgcttaagtccaggagttcgagaccagcctggaaaacctaatgaaaccttgtctctacaacaaaagaaaaagtaaaaagtggccaggcacagtggcttatgcctgtaatcccagctctttgggaggccaaggtgggcagatcatttgaggtcaggagtttgagatcagcctggccaacatgaagaaacctcgtctctactgaaaatataaaaattagccagactgggcacagtggctcatgcctgtaatcccagcactttgggaggccgaggcgggtggatcatgaggtcaagagttcaagaccagcctgatcaacatggtgaaacctcgtctctactaaaaatacaaaaattagccaggcatggtggcaggcacctgtaatcccagctactcagcaggctgaggcaggagaatcgcttgaacctgggaggaggaggttgcagtgagccaagatcgtgctactgcactccagcctgggtgacacagcaagactccgtctcaaaaaaaaaaaaaaaaaaaattagccaggcatggaggtggctctcatggaggcagctagcatgaggctagggagcgccgagccacgcgtcatgccctgcgctacccagactagtgaacaatacagtcaggatggctaaaggtgaccccaagaaaccacagggcaagatgtctgcttatgccttctctgtgcagacatgctgcagtgggataattaaggaatcagaaagactgaggggttgaggaggaattatttaattatttaggtgcaccgacccagtcggattaacatccaaaggactgagccatgaacaaagagtcaagctaccttttaagcattttgtggggcggggggagatctgtgcagggggaagcatattacagaagcaagaaacaaagacagttatttaattaagacatgcattacatcatttcttactttccaaggaacaacatgttttacgacttgagattatctgcctagtgaccttgcagctacacagctagagaaacagagtcttcacaatgcctgggaaagggagagataaggctcactagccacagaaaaacaggcagtcaatttttaaaggacttcagctttttttctttctcagggagaattgggttttcttacatacaactgagtttttgcttacacattctttaatttcttttttttttcttttgagacggagtttcgctcttgttgcccaggctagagtgcaaaggtgcgatctcggctcacagcaacctccgcctcccaggttcaagccattctcttgcctcagcctctggagtagctgggattacaggcatgcaccaccacacctggctaattttttrtatttttagtagagacagggtttctctatgttggtcaggctggtcttgaactcyggacctcaggtgatccgcctgccttggcctcccaaattactgggattacaggcgtgagccactgcgcccggcctctttaatttcttttaattcctgttccaatgcagagaagaacataagaagaaaaacccagaagtccytgtcaattttgcagaattttccaagaaatgctctgggaggtggaagacaatgtccagtaaagagaaatttaaatttggtgaaatggcaaaggcggatgaagtgtgctatgatcgggaaatgaaggattatggaccagctaagggaggcaagaagaaggatcctaatgcccccaaaaggccaccatctggattcttcctgttctgttcagaattccgccccaagatcaaatccacaaaccccggcatctctattggagacgtggcaaaaaagttgggtgagatgtggaataacttaaatgacagtgaaaagcagccttacgtcactaaggcggcaaagctgaaggagaagtatgagaaggatgttgttgactgtaagttgaaaggaaagttttatggcgcaaagcgtcctgctaaagttgcccggaaaaaggtggaagaggaagatgaagaasacgaggaggaagaagagaaggagaaggatgaggaggatgaacaaagaaactgtttatctgtctccttgtgaatacatagagtaggggagcgccgtaactgacacatctcttatttaatgtctgttgccctcattaggtttaattacaaaatttgatcacgatcgtattgtagtctctcaaagtgctctagaaattgtcagtggtttacatgaagtggccatgggtgtctggagcaccctgaaactgcaccaaagttgtacatatttccaaacatttttaaaatgaaaaggcactctcgtgttctcctcactctgtgcactttgccgttggtgtgacaaggcatttaaagatgtttctggcgttttctttttatttgtaaggtggtgttaactatatggttattggctagaaatcctgagttatcaactgtatatctctatagtttgtaaaaagaacaaaacaaccgagacaaactcttgatgctccttgctcggcgttgaggctgtggggaagatgccttttggaggggctgtagctcagggcgtgcactgtgaggctagacctgttgactatgcagtgggcatccatttagctttaggtcgtcttgtttctgtatatagtgacatagcattctgctgccttcttagttgtggacaaagcggggtcagctggcatgagaagtttttttttttttttttttttttttgagtaaagtggggtagtttttaaacaagctgtagaactcttcattgtcagcaaagtgaagagccactgcatcaatgaaagttcaagaacctcctgtacttaaacacgatttgcaacattttttttgtatgtttagaatgctgaaatgtttttgaagttaaataaacagtattacatttaaaaaaaaaatagccaggcatggtggtgggtgtctataatcccagctactcgggaggctgaggtgggaggattgcttgagcccaggaaatcgaggctgtagtgagccaagatcatgccactgtactgcagcctgggtgatagaatgagactctgtctcaaaaacaagcaagcaaacaaacaaaaactctgaaagaagcactagcaaagaattatgagagcatctgaaaggaataataataactctttttttttttttttgagacagagtttcgctgttgttgcccaggctggagttgcaatggcgcgatcttggctcgccacaacctccgcctccygggttcaagcgattctcctgcctcagcctcccgagtagctgggattacaggcatgtgccaccactcctggtcaattttttgtayttttagtagagacagggtttctccatgttggccaggctggtcttgaactcccaacctcaggtaatccacccgcctaggcctcccaaagttctgggattacaggcgtgagccaccatgcctggccacaataataactaacttttattgggcactcactatgttttaggcatcttctaaatgctttacatgtattaatttatttaatcgtcacaaaaaccctatgatgtgagtgggtagcactctttttagaaaactcaggcacagagtggtttaatattgaagagggggaaaaataacttttttttctgcccttcatagttcttagacaggatggacctctgtaacacaggacacataacaagagaaaaacaggccgggcacagtggctcacacctgtaatcccagtactttgggaggcctaggcgggaggattgcttgagctcagaagtttgagaccagccttggcaacatggctgagatgctgctgtctctacaaaaaatacaaaataaaattaactgggcagtggcaggtgacttagtcttagctacttgggaggctgaggtaacaggatcacctragcccaggaggttgaggctgcagtgagctgagattgtgacactacactccagcctgggcaacagagcaagatcctgtctcgaaacaaaacaaaactccagaagtttaacaacatgtatacctcctatgtatccataggagataaacagagaaagaagtaaacctcaaagaggtggctttgaattcagggttcaatactatcatttgctggacagagaaagaaggctgtggagaaggctgataatgagggagccgccaggaaaagcagagtaaacaagactgaggtttgctgcacagatttaagccagagccatctctactgatgagttcctagtgatttagaatcatcctgcttttcctggtacagaaaggaagacaacccttacaaatggagacttccgatcaagcgtggtggctcatgcctgtaatcccagcaatttgggaggccaaggtgggtggatcacctgaggtcactagttcgagaccagcctggtcaacatggtaaaaccccatttctgctaaaaacacataaattagctgggtgtggtgtcacgcacctatagtcccagctacttgggaggccgaggcaggagattgcttgaacccgggaggyggagattgccatgagctgagatcacgccactgcactccagcctggtgacagagaaagactctgtctcaaaaaaaaaacaaaacaaaaaaacaaaaacaaatggagacttcctttatggattaaatttcccttacaaaagggtaatttctactgttttcagagcttctcctgtatctgtagcttctcaaaakcatcagctcaaaatagtccttacgctaaggaggcatattttgtgctggcatatgctggtctcctacaataactcgccaaagatcacaaaactaataagcgaattcgggctccatgcctgtgtcctgcgtcatctcactgcagatctttacaggacaaggcaagtcacttggtaacttctaattagagggatcaaggaagacttcatggaagaggcagcatttgaatgaagccctgaaagtaaagtaaaagagcattccaagttgggagcgtagatacagagatgcaaaaagaaatgtttgggggtaagcatttggcctggcacaagaaggtggaagatattgagggggagcttggactctctgctaagtgtctacacactattgtgaaggtattgagaagtcaaagattttttctgagccgttttttctagccctttaatacaaaatagctaacacctacgccaggcatggtggctcaagcctgtaaccccagcactttcagagaccaaggctggaggattgtttgaagccaggagttcaagaccacccttgccaacataatgagacccccatctgtatatatataaaaaaatcagggccgggtgtggtgctcgcacctgtaatcccagcactttgggaggccaaggagggcgaatcacaaggtcagragttcgagaccagcctgcctaatatggcgataccccgtctctactaaaaatacaaaaattagccgggcgtggtggcrggcgcctgtagtcccagctactcgggaggcygaggcaggagaatcgcttgaacccgggaggcagaggttgtagtgagccaagatcgcaccactgcactccagcctggtgacagagcgagactccgtctaaaaaaaaaaaaaaaaaacaactaacgtctaatatggggtggtggtagaggagaaaaatttctgatatctattctagaagtgcaacttcattgaaaacacaagacataagaacactcaaaaaaatgatagacaaggttaaaaatgtgatacaagagatgtttcaaggttgtgcatggccaggcgcggtggctcacacctgtaatcccagcactttgggaggccgaggcaggtggatcacgaggtcaggggtttgagaccagcctgaccaacatggtgaaaccccgtctctactaaaaatacaaaaattagctgggcatggtggcgggtgcctataatcccagctactcaggaggctgaggcaggaraattgcttgaacccaggaggcggaggttgcagtgagccgagattgtgccactgtactccagcctgggcgacagagcgagactgtctcaaaaaaaaaaaaaaaaaaaaaaggttgtatgtgattgtttaacaaaccacatggttttgtaaatttaaggttatattaattgtttctttggtttgaatagagggtttgcaagtagaagaagagtctggaaaaggctttgggcagttgagacaggttttggaaggaagctgctatggtttgagaatgtgttctccaaaactcatgtgttggaaacttaatccccaatgcaacagtgttaggaggtggggcctaataaggtgattaggtcataagcgttctgctctcctgatggattaatgtcatttttgagggagtgggttagttatctctagagtgggctgttttaaaagtgagtttggcctccttttgctcacttgccctcgctctctcttgctcttttggcttctgccatgggatgtctcagcaagaaggcccttgtcagatgctggcactttgatattgaacttccagactccagaactgtgagaaataaattgattttcttcataaatttcccagtctgtggtatcgtgttatagcaacacagaacagattaagacagaggccataaataatggacggcaagccctattgccaaatgtgggaataaaacggttaatgctgaaactgactgcccaagaaccctctccttaccttcataacgccccagggagaggagaatcccagtaatgagtgactggaaataataaactggctctgacagragcctaggtgtccagatgtaggcagctccaggctgactttgtggttccacaatccagagtgagaaaattccaaggcttcctcctagaccacatcctaaatgcgtaagaattgccagagaaaattatccaagatatggaaatgggcaaaggagattaccaggtttcctttcaatggaattgttattactgcctattggaatttctggaatttttggattttatagggttgtgcaatttaactgatttcttattgactaggttattttataattttgtaggaaatgaagtaaaattgtaaaaaaaatctgatggtaaggcaaattctttttttttttttttttttttgagacagagtctcgctctgtcacctaggctggagtgcagtggcatgatctctgctcactgcaagctccgcctcccgggttcacgccattctcctgcctcagcctcccgagtagctgggactacaggcgcctgccagcaygcctggctaattttttttttgtatttttagtagagacagggtttcaccgtgttagccaggatggtctcgatctcctgacctcgtgatctgctggcctcagcctcccaaaatgctggggttacaggcgtgagccaccgcgcctggcttggtaaagcaaattcttatccatagcaatgcaaataaattttgtctgataaagatacaattgatttctcctctgcagaagagagaacatcaaacattacattttattgcactgtaggatattaaccagttttgcatctatttgcaaaaccattttatcttttctctttgcctctctgttcctcaaattccctttgaaataatcttaacatcttaccagtgccctcattaattgaattgaataaaatatttgacctgtgttcattgtatatttgcacaaaactatgttttcgattttttttttttttttttttttgagacagcgtcttactctgtcacccaggctggaatgcagtggcacaatcttggctcactgcagcctcaacttcccaggcttaagcaatcctcccacctcagcctccctggtacctgggaccacaggctcatgccaccacatctggctaatttcttgtatgttttgtagagatgagatttcactatgttgctcaggctggtcttgaactcctggccttaagagatcagcctgcctcagcctcccaaagtgctgggattaaaggtgtgagccgtggtggctcacgcctgtaatcccagcactttgggaggctgagtcgggcagatcacaaggtcaggagattgagaccatcctggctaacatggtgaaaccctgtctctactaaaaacagaaaaattagctgggcgtgatggcaggctcctgtagtcccagctactcaggaggctgaggcaggagaatggcgtgaacccgggaggtggagcttgcagtgagccgagatcattccactgcactccagcctgggtgacagagccagattccatatcaaaaaacaaacaaacaaacaaaaaaggtgtgagccactgcgactggcccttgtttttacatcttaaaatattatactttacattgttaattcctgcaggttttccagtatctaggctaatcagaagaaagtaaatgccacaattttcacaaatggaccaaaagtagtttccactatctgcagtgcttgttggcaactctgataattgtaatggagttttaaacagacattttatgagaattagaaaagaggggaaaagcatttactaggaactgtatattgccaattactgtgctaaatacacagacgttatctcacttattcctcagaaaatctttgagatctttgtcctaattttgcaggaataaacaggaaatatttgagtaagtatggtaacacccaactgcagatcaagtcacataagtggaaaattacaataatggttcatgaaccctggtggttaaaagggcgtatcataaaaagggtggacaattcagtaaacatgtgaatgaaaggacaaccagcaagattaaagtcataaacaagaaaaactggtgccagwgcttgggcacagcttaattacataggcacagcttgaaggcgtctttgtttctttagacctcagttagcaacagatcttccctcacacacccaccttccaccctctgcttcccttcctgagcaagagagggaatttagcattcacttcagtgcctgccttcctacatcaagacctatgtacataccaggcaaaatgaactctttaagaataaaagaaaaaaaaacctatgtactgtgattctcaaaaggatttgtactccatggccagaaggcagcaagagtgactagaagctgatagaactgaggtagcctcttagaaacagaaagagagtacgtccctccactgtatctgtgatactatctaaaacacaagatctagccaggagtggtggctcacacctgtaataccagcactttgggaggccaaggcaggcagatcacttgaggtcaggagttcgagaccacactggccaacatggtgaagccttgtctctattaaaaatacaaaaattagccaggcatggtgtcacacacctgtaatcccagctactcgggaggctgagacaggagcatcacttgaacctgggaggtagagattacagtgagctgagattgcaccactgcactccagcctgggcaagagagtgagactctgtcttaaaaaataataataaataaataagatctgatgcaaaatggaataatgctaacttttttattttttgagacggatctggctctgttgttcagactggagtgtggtagtgtgatcacagctcactgaagcctcaacctcctggactaaagcaattctcccacctcagcctcctgaatagctgggaccacaggtatgtgccaccacacctggctaattttttattttttgtagagatgggggtctcactatgttgctcaggctggtcttgaactcctggcctcaagtgattctcctgccttggcctcctaaagtgctgagattaaaggtgtgagatgccatgctcagccagcataatgctaatatttaaaakattggttgttatatttttctctatttttgcctctatacttgatatattttatgaaaaataagtttattgtcaagaaaaagaaaatctggaggaaaaaatatttaaattatttaattatttgtcttgattttgaacccccaccccataacagaagagagatgggaaggtagcwaggtgccggctgcttttttttttctttttctttttttgagacagggtctcactttgtcactcaggctggagtgcaggggcacaatctcggcttactgcagccttggcctcctgggttcaagggatcctcctgcctcaccccaccaagtagctgagacctggggcaccaccacacccggctaatttctgtttgtttttgtagagaagggatttcacccaagctggtttcaaactcctggactcaagcgattctcctgccctggcctcctaaagtgctgggattataggtatgagccaccacacccagcctccagctgcttttcttttcttttctttgtattttttgttttgttttgtttttgagatggaatcttgctctgttgccccagactggagtgcagtggtgcaatcttggctcactgcaacctctgcctctggagtttaagtgattctcctgccttggcctcccaagtttagctgggattacaggtatgtgccaccatgcccgactaatttttttgtatttttagtagagacgtggtttcaccatgttggccaggctggtttcaagctcctgacctcaagtgacccaccctcctcggcctcccaaagtgctgggattacaggcatgaaccaccatgcccagcctccagctgctctttttttgtttgtttgagacagagtctcgctcttgtcacccaggctagagtgcaatggtacgatctcggctcactgcaacctctgcctcctgggttcaagcaattctcctgcctcagcctcccaagtagctgggattacaggtacccaccaccacacccagctaatttttgtatttttagtagagatggggttttgccatgttggccagactggtctcgaactcctgacctcaagtgatacrcctgcctcggcctcccaaagtgctgggattacaagcatgagccactatgcccggtcaccagctgctcttaaccacccctcagggaccttgtgctgctcttgcttctccagtcatgggctctacctaccagcatccggcctccctggtcagcatccctttttgtcttctacttgacggatgtctccttctcttggaaattttaggacagttcatggagatcctatatatacaagatttgctggcttcagccacaaagtttcttcaggcctgatttcctcctccagctccccagtcctgacttcagttctcactctacccctgccacctgtatcttctacttctcctgtgtttgcacgttttattttatattctcataaacagattccccatccatacacatactgcccagaccagtgcctaatggttctacaatttatcaaagaatatctgcggttaccaaatcagaccctggggatgcccgcatggtttccccaagcagccaacttgtttctgttgtcacactgcattccggcagggctgcccaggtcatttgaaggaatctgggmctccagcagcacttgagggtggctctgggaaagcatccttcactctgcagggcgcctgcttgctgaacaggaaagccgggggctttctgaggctgcagtcagaacctgctggtgtgtttttggtttgtttgttgttttttgaaatggggtcttgctttggtgcagtggtgcaatcatagcttactgcagcctcaacctcccaggctcaaacaatactcccacctcagcctcccaaggagctgggactacaggcatgcaccatcaagcctggctgatttttgtattttttgtagagaaggggtttcgaactcctggcctcaagtgatcctcctgcattgccctcccaaagtgctgggattacaggcatgagccactgcgcccggccctgctgatgttgaacaggttttgccactgcctggtaccatactcgtgatgagggtggctgttttaggggagccctgaatcagcagaggggaccagtgcctgcgcacagaagtcttagggcacgtcccagccctttcttttccctcaacatctcctgaggagcctgtagtcactctgacactgtcacagtgcctctggagcccctcctttccctaagtcccatccacaactccttgggacaaatggttttgcatcattctcacctggcccaggtctccttcttgtccatagggctgttatgacagcctttgacggacacctctctgagaccaggtgccatgcttgaccttttcctgagcagctgatttgcttcctgtcaatggaaagcaacgcagctggtctggtatgtctcattcttgawaaatctcttcgttcttttgaacccgctggctccagggatcatacttctttctgaaaacctgagttgttcccattgaacttgccagcggccttgtcaggaggtttctctgtttcaatttttagttctcggctccgtgagggatgagactggaacacgatgctgcagccctgctctctcctcagtgaaggctgaaggtgtgtgacatggaaggtgagaaggtggcacagacggggtcgctccatgagaggaggagtgcaaggagagaggagaggcggccagagggctcagacctccaggaccctcaggggagggggcacgaagatgagccaggaaaaaccgtgagaaggaacagcgcaaggccggctggggccagagccaaagagagggtcatcggccgcagaggtgggtgacggtcctgagcgctcactgctgactgttaggcgccactgagggtattgcactctcaccattcaatgccatgaaagggagggaggaggcagcgctgacctgcagagggcaggagggcagaaagaactggtttgggctggttgtttttgtttttgccatggaggaacatgttggtccacagaggggaagcctcgggaagaaaggaaaacactgaacatgcaaaaggtgaaggaaataattgaccgagccaagtcccccttgaaggaggaggatgcgaaggtgggaagtcattgtgttaattgaagcagagggtgataccccagggtgcacagtctgatcaagtctgataaaggtggacagaagctcccagctcagcctaaaggtggcatctcctcaactcccatcccccagtctgaatcttgggatcttagcagtgcatgggcctggagaccaaagcaatgttaggagaaggatgaaggcctgtagtgaaaaaaaaaagtgtgagcgcggctggcttgccctgagccaatttactcatgggggtgcctggaaagaggacatgaaggaagagaaagaaagagaatacacacacacacatacacacacacacatacacgctagccaaacccacagggcaggctttagtctatttttcctgcagtcacctataagggagaatgagatgagaaagcgaacacaagaagccaggccctaacataggtccctccatgccttctgacttccctcctgcccactgcacggaggcaaatgaagagtagaagaaagcttccagcgccaggcctgggattgagtgcacccgacttgggtcctcggtaaatacaccccagaacttcctaagtcatcgctcttctcagtcatgggagcaactggggtctgggatcagcacaagtgctcaagagcttagaactgtgccaggctgttctaacataaaaaggcaccctccgtagctgctgaatgcatgactacttgaatgtattcattataatgtatatttgttatatatttttgagacagaatgtcttcctgtcacccaggctagagtgcagtgacatgatcttggctcactccaacctccacctcccgggttcaaacgattctcctgcctcagcctcctgagtagctgggattacaggcacctgccaccatgcatggctgatttttgtatttttagtagagacagggtttcaccatgttggccaggctggccttgaactcctgacctcaggtgatccacccgcctcagcctcccgaagtgctgggattacaggtgcgagccactgcacccagccctaaatatctcttgaatgaatgactaaatgtatttaccgtgcattggaaaaaaaaatatatgattggcatgttaaacccatgatttcacaaataatattggttagaaaaggctaagtttaaaaaaatgaattgacttaaagttgatttcaagaaagctataaatagaacctgggaggttaagtctgcagtgagccaggctcacaccgctgcactccagcctgggtgatagagtaagaccctgtctcgaaaggaaaaagaaagaagaaagaaagaaaaaagaaaagaaagaaagagagagggagacagaaagagagagaaaaaagagagagaaagagagagagaaagagagagagggagataaagaaaggggggaaataaaaagaagaaagagagagaaagaagaagaaaggagaaagagaaaaaagagagggagagagaaagagagaaaaagaaggaagagaaagaaagagagaaagggggagaaagaagaaagagaaagaaaagaaagaaagagagaaagaaggaaagaaagaaggaaggaagaaataagtaaaataatattacaagctgtgcttggtacagcattgagcccgaggtgcactgtctcccctcctgcctgcgtcacccacaagggcctacatcaccttctgcctggctggcagagaggaaggaaactcattaagtgtcagatggtggatgtgcactttgcctaggtatctccttcacctgctcccagccctctgaaatttattcctccggaagtactatcaaccttagagaagttaacttgtccaagatcaatcaactgtaaatggcagagacagaattcaaactaagctctgctgacttcaaakcttgctcctttcactgtcttccagccgagtagaagagagcggtcagtgtmtacagcattgttcagcttgggaggggaaggacgagggagtttgcctaggagtttccctgtctttatgaagtcagtggctagatcttctgctgagctactgtgggggaatttgataagaaatcaccctgattgaagcttttatcctgttctgatagaaaattcaaagaaataaaagcactggaaaggggagacccttggggagtaaatgtaccaccatccatgacattttatgttgggaccaatcgatttatccattgggtatgtacttttacacttatcctcatatttgaggaagggccaaatttttatgactttcccttactatagagatctctaactccttgttactcaaagtatggtttgtggaccagcagtagggtgaccaaccatcccgatttgcctggagctctgagattttctgggacaagggactttcagtgctaaaactgaggtagtcctgggatgagttggtcactctaaccagcagcaccagcatcccctgggagcttgttagaaatggagaattccaggcttactgtatcagaatctgcacttgaacaagaccatacacacattcaggtcagaaaagcatttctctaggttaaatattggtagagtgggttgaatggtgggtgggctttatctaatcagttgaaggcctcaatagaacaaccccctatattagtcagggttttctatagaaacagaatctataaacttagtttaaggaattgggtcacacaattgtgggagctcgatgaattcaaaatctgatgggggagacccaggaagcagctgcggttcaagtccaaaggcagttaggctggaaacccagatgaggtccaaaaccatatgctggcagaattcccttttgcttgggggaggtcagccttttgtttgattcaggccttcaactgattagatagagcccactcacattatggagggcaattcactttgctcaaagtccatcaatctaaaggsaaatctcaccccaaaacaccctcacagaaacatccagaacaatgtttgaccaaatatctgggtatcatggcccaggtaatctgacataaaaaattaaccatcacagaaatccctggaacctgtgttatcttatctgaaaaaagagtctttgaagatgttagaaaggatcttgaaatgaggagattatcctggattctccaagaaagcccccaacttaatgacaagtgtccttataaaagacacacagggccgggtgtggtggttcacacctgtaatcccagcactttgggaggccgaggcgggtggatcacctgaggtcaggagtttgagaccagcctggccaacacggtgaaaccccgtctctactaaaaaaatacaaaaattagctgggcgtggtgatgggagcctgtaatcccagctactcaggaggctgaggcaggagaattgctcgagcctgggaggcggaggttgcagtgagctgagatcgggcctctgcactccagcttgggtgacaagagtgaaattccatctcaaaaaaaaaaaaaaaaaagacacacaggctgccatggtggctcacactggatcgctggaggctaggagttcaaggccagcctgggtaacataacaagacccccatctctattttataaaaagagagagagagagaaagaaaggagagacatatcaaagagatgaaggctgtgtgaaggtggagaagagattggggtaatgtggccacaaaccaaggaagccaaggaatgcctccagccaccagaaactggaagaggcaaagaagaatcctccccaagagcctccagagggagcatggcctgccaacaccttgattttggacttctggcctccagaactgtgagagaatgaatgtctactgtttcaagacaccggttcgtggcaactggctatgggagccacaggaagctaatacgactgggaaatggcaagaagcttgtctacctgacttctctgcagggcagkgggtccacaccacgcacttgcacacatactaggagggaggccagaggcagtcctcgcttcctcagggaccccttcctgctggtctcctcccacctcctgcccgggttctgctctgccacagtagctcagctctgtgtccccaccgctagccggcatctcctccctgctctgcaccacagtcctgtgtgcttcactctgcagaccccaggctccaaatatgtcatctttattctctctctcaccccaggctccaaatatgtcatctttattctctctctcagatctaggaggccttcatccctcacctcagccctgggcccacctgctgccactatctctcaagtcacaagcatttattgtgcatctgctaggagttgggcacttgaagtgctgggggcccctagaagtttctgcccttcagaagttcactgtctgctcagtaattttccatcgtctcacctctctgaaaacatcgcctctggccattgatttccaggaatctgcttagtgcctgcacctcctccccctcacaggatgcaaggatacctgtgtgtgggatattagagctgaaatgtaactgcagagtctctttcaaaggtgcacagtttcatttgttggtcatcactgtggaaaaaaccatatgccaaatgaaagtaaagcaagggtctgggcgtggtggctcatgtctgtaatcccagcactttggggggccgaggtgggttgatcacttgaggtcaggagtttgagatcagcctggccaacatggtgaaaccccatctctactaaaaacacaaaaattagccgggcatggtggtgtgcccctgtagtcccagctgctgaggaggctgaggcaggagaattgcttgaacccaggaggtggaggttgcagtgatccaagattgagctactgcactccaacctgggcaacagagtgagactctgtctcagaaaaaaaaaaaaaaaaaagaaaagaaaagaaagtaaagcaggggctgaatttgacataaataatgacaaattattatttcattaaagccacagacctaaggcctagtcttatttgtataagaaaagataaggaacaatgatgttacattttctaatctagagtagctaaaagtttacacaaatgttaacccagtactagaaaatgtgaggataggtctgattccatatcttgcatcttaaaaaagtcatactgtaaaatctacttcaataatcaagatgtttaatcagtatagatttgtgcgtatttatccccgtgttatgctctgtgagtccaagaataactcattctattgtgctttgctttatcacaccttgcagatactgcacgttttacaaatggaaggtttatggcaaccctgcctggagcaaggctatcggtgccatttttccaacagcatgtgctcacttcacgtctgtgtcacattttcatcattcttacagcatttcaaactttttcattattataattatgactgtgattattatttcgagacagggtctcactctgttgcccaggctggagtgccgtggtgcgaccactgtagcctcaacctcctgggctcaaacaatcygcccacctcagccccttgagtagctgggactacagacgcatgccactagtttttttaatttttttgtagagacagggtctcattatgttgtccaggctggtcttgagytcctggactcaagtgatcctccaacctcagcctcccgaagtgctaggtttacaggcatgatcagtgacctttgatgttactattgtaattgttttgaggtgccacaaatcgcacccatataagacagcaaacttaatcaataagtgtgcatgttccgattgctcaactgaccaaccggctatttccccatctctctcccctcttccgtgggcctccctaytccctgagacacaataacattgaagttaagccaactaataatcctacaatagcctctaagtgttcaagtgaaaggaagagtcgcacgactctcactttaaatcaaaagctacaaatgattaagcttagtgaggaasgcatgtcgaaagctgagatcggccaaaagctatgcctcttgtgccagttagtcaagttgtgaatgcaggggaaaagctgttgaaggatgttgaaagtgtcactccagggaacatacaaatgataagaaagcaaaacatccttattgctgatacggggaaagtttgagtagtctggatagaagatcaaaccagccacaacattccctttagccaaagcctaatccagaccaaggccataactcttcaattctgtggaggctgagagaggtgaggttatctatagaagaaaacttggaagctaacagaggctggttcatcagattgaaggaaagaagccagctctataacataaaagtgcaaggtgaagcagcaagtgctgatgtagaagctgcagcaagttatccagaagatctggctaagatcactgacgaaggcggctgcgctaaacaacagattttcaatgtagataaaacaaacagctttctcttggatgaagaggccatgtaggaccctcatagctagagaggagaagtcagtgcctggcttcaaactttaaagaacaggctggctctcttattaggagctaatgcagctggtggctttaagttgaagtcagtgctcatttgccattctgaaaattctaggacctttaagagttatgctaaagctggccaggcgtggtggctcacgcctgtaatcccagcattttgggaggccgaagggggtggatcacctgaggtcaggagtttgagaccagcccggccaacatggcaaaaccccatctttactaaaaatacaaaaattagccaggtgtggtggtgcatgcctgtgatcccagctactcaggaggctgagacaggagtatcacttgaacccaggaggcacccgggaggcagaggttgccgtaagctgggatcacaccactgcactccagcctaggcaacacagcgagactctgtctcaaaaaaaaaaaaaaaaaaaaaaaaaaaaacatgctaaagctactcttcttgtgctctataaatggaatagcaaagcctggatgacagcatatccggtaattagcatggtttactgaatattttaagcccactattgagatttactgcccagaaaaagaagaaaagattcctttcagaaaattaccactcactgacagttcacctggtcacccaagggctctgatgaagatgtgcaaggagatgaatgttgttttcatgcctgctaacacaacatccagtccatagcccatggatcaaagagtaattttgactttcaagtcctattacttaagaaatacattggccgggcatgggggctcacgcctgcaatcccagcactttgggaggctgaggcgggcggatcatgaggtcaagagatcgagaccatcctggctaacatggtgaaacactgtctctactaaaaatacaaaaattagctgggctgggtggcacacgcctgtagtcccagatacttgggaggctgaggcaggagaattgcttgaacctgggaggtggaggttgcagtgagccaagattgcgctactgtactccagcctgggtgacagagcaagactccatctcaaaaaaaaaaaaaaaaaaaaaagaaagaaatacattttgttgggccatagctgccattgatcttgattcctctaatggatctgggcaaagtaaattgaaagactttggaaagaattaatcattctagatgccattaagaacattcatgattcataggagaaggtcaaaatatccacattaacaggatttgggagaagttgattccaacgctcatagttgactttagggggctcaagacttctgtggaggaagtaactgcagatgtggtagacacagcaagagaagtacagttagaagtggagcctgaagatgtgactgaattgctgccatctcacaatcaaacttgaatgaaggaggtgttgtttcttctgaatgagccaagaacatcttttcttgatgtggattctactcctgatgaagacgctgtggacattgttgaaatgacaacagaggatttagaatattacataacgcagttcataaagcagtggcatggtttgataggattgattccagtattgaaggaagttctactgtgggtaaatgctatcaaatagtatctcatgctacagagaaatctttggtgaaagagtcaatcgatgtagcaaacttcatcattgttttatttcaggaaattgccacaggcatcctgatcttcagcagccaccaccctgatcagtcaccagccacaacactgaggcaagaccctccagcagcaaaaagatgactcactgaaggctcaggtgatcattagcatttttcagtaataaagtattttacaagaccagtgctctaacccattagctatggagccgtaataaagtattttaaaattccagcgggcatggtggctcacgcctataatcccagcactttgggaggctgaggagggtggatcacctgaggtcaacagttcgagaccagcctggccaacatggagaaaccccgtctctactaaaaatacaaaaattagccgggagtggtagcgggggcctgtaatcccagctattcaggaggctggggcaggagaatcgcttgaactcatgagacagaggttgcagtgagctgagatcacgctactgtactccagcctgggtgacacggtgaaactctgtctcaaaataaataaataaataaataaataaataaataaataaggtatatatgttgtgctgggtgcaatggtggatgcctgtaatcctagcactttgggaggtcaaggcaggtggactgtttgagcccaggagtttgagaccagcctgagcaacatagtgagaccccatctctaaaaaaatacaaaaaattagctgggtgtggtgactcatgcctgtactcccagctactcaggaggctgaggtgggaggttcgcttgagccctgaaggcagaggttgcagtgagccgagattgtgccactgcactccagcctcggcaacagagtgagccctgtcattaagaaaaaaaaaaaaaaaaaaaaacggccgggcgcagtggctcatgcctgtaatcccagcactttgggaggccgagatgggcggatcacgagatcaggagatcgagaccatcctgatgaacacggtgaaaccccatctctactaaaaatacaaaaaattagccgggcgtggcaagcgcctgtagtcccagctactcgggaggctgaggcaggagaatggcgtgaacccaggaggcggagcttgcagtgagccgagatcgcgccactgcactccagcctgggagacaaagcgagactccgtctcaaaaacaacaacgacaacaacaacatcaaggctgaactgacctttagcaccaaagagaccactctgtctctcctctctcaggtttaactttctcataaaaatcttacccccagcccattttaacttaactcacaatatatgcctggcactatgcaagactctggaaatgtgaagaggaacaaaatagctatggctgacccctagttggccacagtttatagtctaccagaaatagttatcaaagtgtggtctggggacctcggaggagggagggagagtcttggagcccttttggggctgtgtgtgaagcccaaactacattcctgtattcataataatatagccagttctctttcttcatggtagttatgttctataaagttgctgtgaatgctgaataagtgaatactgaattattactcttaagggaaatacagggttaggttcctaaagcctctggtcatttttgtcaaccaaccaatacgtaactttgttttctgtgtatttctatttaaagataccttaacatgagaggatggtggcatgtatgccatctcccattcatgttcctacttccctggaaggctgagatgatttcttatgccttccaggttctgatgagattagggctttatgctgtggccccctcagaatagagctgcagaatactaaagcccttagctgcagctaagaatgagcttctcgaaagggcgtcccatggcttgccttgcagttatctgacccctcttgttttggtgttgtccttttggtgagtgggacaaagaccataggagctggcaccttgagccactcttccttttgctgtttacgtaagtgccaaacagtctgatctaaaagtagcctgttgtacctttccggttcaaccaggcaggccttgtccttgccctcgtgtgtgctcaacagataggaaagaccaagaggcaggtattagatcagcgtattgcctaggcattctgctcattactagcccatctgacccctacatctgcagcctgaaacccagtgatgagaaaattctccacgttacaaccctcataaatggcattaacctcttctagaagaagatggattgcaaatgatttttagatgttcttgtggataatacttgcagtatctacacatttaacgtttgttcatattaccatcattgcagaacacaggggtaaaaaagctgcaagttggagaaggagtctttgcttctccaaaggagacttctctcctcttttgctctctcaggaaagaggggactctaaagtagttcacttasgggtggaccatgcaacatggctaaaaatgaggcctgcccagagaccaaggcttttcacaacttcctctgtcattctgtgaaacttagtcttaaacagatcagggttttgcctggctaaaaactgtattctctactttatctgaagtgaaatgtatttctcctgttccagccagtgaccaatccaaccatcttatcctggaaaaaaaaaataaattgtaagcatcctcaagatgcattcactttcgaagttttattatttactggctcacaaagtaataatgtacactgtaaaaaagtgtgcaaggccgggcttgtggtggctcacgcctgtaatcccagctctttgggaggccaaggtgggtggatcacgaggtcaggagatcgagaccatcctggctaacatggtgaaaccctgactctactaaaaatacaaaaattaacagggcatggtggtgcgcacctgtagtcccagctactcaggaggctgaggcaggagaatcacttgaacctgagaagcagaggttacagtgagccaagactgcgccactgcactccagcctggcaacagagcgagactccgtctcagaaaaacaaaacaaaaaaaagtgcaaaatacaaaaagtagaaataagcacacagaaaaatcagtctcgcatctacaaggaggcaacaactgttaatattctaagatacttyccttaagtcctttatgtatttttttcctttacacaagcacaactctatatgcgatcttgtgcttagccttttgattcacatcatttcatatttctccatgatttcacattgtaaatatcatgttgactaactgcatagcgatttgtggatgcatcaaaatttacctaactcttcctcaaacatgtggcacgtaggttaagaagcttgtcactcttgacacaagctatctgaatgagtgacagacggtatggtgtggttaaaatagcagtgactttgcagtcacattttttgacccatgtttgagatctgggtcagccacttgtaacttgtttgtgtgactttaggcaaaccacttaatttctctgagcctcaattcctttcctggtctataaaataggacaggtaacttccacttcactgagttgttctaagtcaggagtggacagactatagctcagcggccaattccaggccactatctgtttttgtaaaaaaaagtctcaaaggcacacagccatctccattcctttatacatcgtgtatggctgcttttgtaccacaagggcagagcagagaagttgtgacagagacatggcctgyaaaaatatctggccctctatagaaaagatttgatgacccctattctaaataatggacatgaaagtaattctgtagacagaaaaaagcctaaccaaatgtgaaagattattcatggcagagcctacagtaggtgctcattaaacatttgttctaaggatgtgtagctcaatggagaattgtattcaccagaatccctgcagaatgagtctctgtttaggagaagcatgaaggaggaggtgattcagaagagcatcaggatggggtgagaaccctgtgcaaagggacagaaaaggagatttttaacacctgggaaactacagggacaaggagaactgtgtgaagatgtttagaagctttctggatgatgctctgaataaaactcctgtgcagcccaattaaagtaaacatctacagtaaacatcaacatggttctttaagactcagagcaagaccagtgtttatttaacttcaactcaatgtagggattggatcacaaggagtatagctttcaaatagattatcaaatggacagaataaaaataacagctcaggctgggcatggcagctcacgcctgtaatcccagctctttgggaggtcagggcaggaggatcacttgagcccaggagtttgagaccaacctgggcaacacagtgagacttcatctttgtattttaaaataagctaattaattaaataaaaataaaaatgtctctgggcatggtggctcacgcctctaatcccagcactttgggaggttgaggcaggcgcatcacttgaggtcaggagtttaagaccagcctggccaacatggtgaaactccatctctactaaaaatacaaaaattagctgggcacggtggcatgtgcctgtagtcccagctactcaggaggctgaggcaggagaatcacttgaacccaggaggtggaggttgcgatgaaccaagataacgcgtcactgccctccagcctgggcgacagagtaagacctccrtttaaaaaaaaaaaaatcagccctaatattgaatttacaatacaaaattttaattatatgtgctcccataaagcacaatgaagaacatcttatttattaaaaagaggataatatttcactgagcaggctgggcacagtggctcatgcctgtaatctcagccctttgggaggccaaggagggcagattgcttgagccsaggagcctgagcaacatggcaaaacctcatctctacaaaaaatacaaaaattaaccaggcgtgatggtgggctcctttaatcccggttactcaggaggctgaagcacgagaattacttgaaaccgggaggtggaggttgctgagccgagatcgtgccattgcgctccagcctgggcgacagagcaagactctgtcttaaaaaaacaaaaaacaggctgagcaaggtggctcatgcctgtaatcccagcactttgggaggctgaagtgggaggatcacctgaggtcaggagttcgagaccagcctggccaacatggcgaaaccctgtctctactaaaaatacgaaaattagctggggtggtggtgcacgcctgtgatcccagctacttgggaggctgaggctggagaatcacttgaacctgggaggcgggggttgcagtgagctgagatcgtgccactctactccagcctgggtgacagagtgatactctgtctcaaaaaaataaacaaaaataaataaataaaaacaaaaaacaattttaaaaaatggtagtaaggtcagacttttgatcatatatttttttgagttccctagtgctattctgccaattttttctattggacagctttttctctcccattgctgatttgtaagctctcaagtgaggtcctataggcagtctatggacagtatattaaatactggatatttttgtttatttatttcttgagacagtgtcttgccgtgtggcccaggctgcagagcagtggcaagatcacagttcattgcagcctcaaactcctggactcaaagcagtcctcccagttcagcctcctgagcagctgggactataagcatgtgccaccaagaccagctaattaaaaaaaaattctttttgtagagatgggtatctaaatatgttgcccaggctggtcttgaattcctggcctcaagtgatccacctgccttggccttccaaagtgctgggactataggtgtgagccaccatgcctggatatttttattgggaggaggggatgtctgtcaagattaaccaagaggaagtgaaaaagcataacaatcatccatgaaaactggccaagtggtgcacacttttagttccagctacttgggaggctgaggcaggaggatcacttgagtccaggtctagcctggacaatacagcaagaccccacctctaaaaaatactatccatggatccactcctttatctgcctgaaaaaagaaggtcctgccctggcacacttagaagtgttctctcctgcctctctataaagacggaggaagcggagaagacaacttttttttttttttttaacagagtttttagttaagagagaaaaaagagcagactggatgtgaggaaacagatgggaagaaagagcaaagagcagagatttaacaaaaaatgttgttgagggttatgtatacctttaacatatttgaaaaatataagggccaggagtggtggctcatgcctgtaatcccagcactctgggaggccaaggcgggtggatcacctgaggtcaacagttcaagaccagcctggccaacatggcaaaaccctgtctctactaaaaaatacaaaaactagctgggcgtggtggcacacacctgtaatcccagctactcgggaggctgaggctggagaattgcttgaaccctggaggcaaaggttgtagtgagctgagattgtgccactgcactccagcctgggcgacaagagcaagacactgtctcaagaagaaaaaaaaataaagaaaaatataagaaaaaaatgagttattttagcatggtggctcacacctgtattcccagcactttgggaggccgaggtgataggattgcttgaacccaggagttcgagatgggcctgagcaacatagtgagacccagtctctttcaaataaaataaaatagacttcagaccatggttgacttcaaaatctataaacatacaatggttaactaagaatttctgtgcctgtgggggataccttttagtatagtttctcttgagtggaatgtgaagttgtgtggtagataaggctaggctgttccagtggtcaaatgagcatttaccagtgaaatggagagttgtttgataagtagatcattggtcagtatcccttgctaccaatctggctgtgagagtccctaagcaccaaaagcaagacacgagcaagactccatctccaaaaaaaaaaaaaaaaaaaaaaaaaaaaaaagaaaagaatagaaaaaaaaagtttagaattagaattacgtatgtgtgaaaacaatgtgaaaaaagacttttgtagatttttgaactacaaaaaagacttttgtagattttaagaaactcagaagaaaactttttctagtggaaagtaaaattattggatggaatgggaaatccaaaacagggaagtaacactcagacgctgactgaccacctactttcgagctactgtccaggaatatgagaagaattcagagccacattttttttcttccttttcagagaggtggggcttacgatttagtctggaattcagatgcctattggtgactgctccgtggcagctaaaccaagaaaacagctgctctgctcattatttcaaaccacactagggtacagagctcgtgcttcgggatggaaacctatggttatctgcagagggagtcatgctttcaaggacctcatgtaagtaattcggaattcaatagagctttattactgaaattgcaatcagaaaaaaaggggggaaaaaggaaaattacaaagaggaagaggaaagctttggttttaaatctatcaaatccatcatttttaaagacttttttactgctaactcagtttagtcattctgtggctgctacttgcttctcagttactgtgccaaaattcagggtctttctgcatctccaaactgaaagttgaaattgaactcttttctccagattcctggcactttcatcagataaagtggggttccttttactttttgagatctctgtttcataaatacagtttatttccaaaacatgcaawgtttaactattttgtttccttcccttttgaaacatggcatgtagagctgcctgatttgtacttcttttccctcagttatttaactattgactgatcacatgattggggtgggtgcatttactccaagttaattagtatctaagtcaaataaaaaggaaattatcatgtttatcaatatataaatgcgacatatagtgtgctatactatagtgtagtttattaaacctaatttttcattgaggcatatggaaatccaaatgttttaggaaatcatcatcacagttcaattaggtgattaaaatatatattcaatttaaagatcatctatagttaaggaatggcttatacaaacgtgtgtgygtgtgtgtgtttaaagacaggatcttgctctgtcacccaggctggattgtagtggcataatcatagctcactgcagctttcaactcctgggctcaagggatcctcctgcctcagcctcccaagtagccaggactacagacacagactaccatacccggcaaacttttaaattttttgtagagacaaggtcttgctgcgctgcccaggctgatctcgaactcctgggctcaagtgatgttcctggcttggcctttcraagtgctgagattacaggcgttgagcccctgtacctggccttataaaaacttttcaatcagatgatattattcctgcaattattgccaacacagtttactcctagctgtatcaccaatgcatactttctatctgccttcttcaatgagaatttattatttttattttttattagcacacttaaattgaaattcaaggtcagactttctgagcttctagctggaacttgtaagtttttttcctcgtgtcatcaataaaatctgcttagaaatggttgtttctagttatgaaagtaatagttgttctactcatctctccatccattttttttgtataactgactttaaaaatatggcctgaaataatcatttcattcatttgcctaatgtttggtggtttctatggccacacaagctctgaaatactctatatggcctttaagttatcttccaagttactctgccacttaataattcaattatcttttccaatattcctcagtaaaacctttctcctgtcaggctggtctcccctgtatgctattctcatgcccattttattgtcttcaatcacatcatgttctctcttccaggaaatactcttttaaaatgtaaaactgatagggttttgtggcacactgaatgtgagacagaaaggaggtgcagaggtcaagaatgcctcctaagatcctagtaggtgataatacgattcactgagaattaggacggaagagaaagcccaggtttataaggaagaagaaagctcaattttggacaagcggatttgaagtgcttgtagaacacatccaaataaagatgtcctataagtagctgaatatttgggtttggactgagaagactgggatagaaattcacatctaggaatcattttaaatgattgtgaaaccggccgggtgcggtggctcgcgcctgtaatctcagcactttgggaggccgagtccggcggatcacgaggtcaggagatcaagaccatcctggctaacacagtgaaaccccgtctctactaaaaatacaaaaaaaattagccgggcatgatggcgggygcctgtagtcccagctacgcgcgggaggctgaggcaggagaatggcgtgaacccgggaggcggagcttgcagtgaacagagatcgcgccacggcactccagcctgggcgacagagcgagactccgtctcaagagaaaaaaaaaaaaaaagaatgtgaaaccatgcaagtggttgaagtcatgctggagatacactaaaatgagatataaggaagactacagaattctagaaaatacttttatttaggagtttgagaaagtatgagtcagagaagttggaagtaggcaggaaatcaggtgtcttgcaagcccaggatgtaaaatatctcaagaataaggcagtgaccaacagtgtgaaaaagaaggggttaagagaagagaagccagagggcagagaagactaggtacatgggcagttggaaaaagagggtacgtggccaggaaagcaccgctaaatatttaacaaaggtgtaagagcctgacacaatggctcacatctctaaccccagcacttcagtaggttgaggcaggaggattgcttgaggccaggagttcaagatcagcctgggcaacatagcgagaccctagttctaaaaaaattacaaatattagccggacatggtggcacatgcctgtagtcctagctactcaggtggctgaggggagaggatagcttgaacctaggaagttgaggctgcagtgagccatgatcctgccactgcactccagcctgggtgatagagtaagaccctgtcacacacacacacacacacacacacacacacacacagtaccatagaccgaagcacctgggtttccgcagaattttatgccccattaaatttagtgatgtctaacagtcattcagttgtctaagatttagacagctattatgtgaaaaataccattaaagagttccaaattggccggacgcgatggctyacacctgtaatcccagcactttggggggccgaggcgggtggatcgacgtcaggagttcaagaccagcctggccaagatggtgagatgctgtctctaccaaaactacaaaagttagccaggtgcggtggcaggtgcctgtaattccagctactcgggaggctgaggcaggagaatcacctgaacctaagccgaaatcacaccattgcactccagcctgggcaacagagtgagactctgtctcaaaaaaaaaaaaaaagagttccaaattggccaagagtgacagtagaacagagtcaggggcagaaaaatctggtgaaacaggtagggtaagaaatgtcattgggtgctttgggctaagagtaaacagtgtatttcaaaacacgtaaagtttatggagtgtggccaggcgcagtggctcatgcctgtaatcctagcactttgggaggctgaggtgggtggatcatctgagatcaggagttcgagaccagcctggccaacatgtcgaaaccccgtctctactaaaaatacaaaaattagctgggtgtggtggcgggtgcctgtagtcccagctatttgggaggctgaggcagaagaattgcttgaacccaggaggcggaggttgcagtgagccgagatcgcaccactgcactctgcctgagccacagagtgagacattgtctcaaaaaaaaaaaaaatttatggagtgcataatgtctagcacaaatttgtgtctccaatgtatatcttcctccagatcctcaatctcatggaaatgttctgtaggtgctacaaattcaacatatccaaaattaaagctcattatcttctcacctactccagcccatctccaaacctgcttctctaagtgcagtggtgcaatcttggctcactgcaacctccacctcctgcactcaagcaattctcctgcctcagcctcctgagtagctgggactacaggcgcacgccaccatgcccagcttttttttttttttttttttttatttttactagatgaggtttcaccaccacgttggccaggctggtcttgaactcctgacctcaggtgatctacccgccttggcctcccaaagtgctgggcttacagatgtgagccactgggcccggccccttctccacattcttatgattccaatcctctcattctctatttccattattaccactttagttgaggtcctgaaatattattcctaactggtttcccttcttccagtccttcctcctcttcccaatccatcttctgtagttctttttttttttttttttttttttttgaggcggagtctcgctctgtcgcccaggctggagtgcaatggcgcgatcttggctcactgcaagctccgcctcccgggttcacaccattctcctgcctcagcctccctagtagctgggactacaggggcccgccaccacgcccagataattttttgtatttttagtagagacagggtttcactgtgttagccaggatggtctcgatctcctgaacttgtgatccacctgcctcggcctcccaaagtgctgggattacaggcttgagccaccacacccagccatcttctgtagctctaattaagcaaatctgatcatgccatttccctaattaaaaactctcccgattatagtgagggaaagtctaacctccttagcataacatcatgcaaggcccttgctgaactgaccttgctcacatcttgtctgcatctcccagttactttctgcctccacacatctatctcataagaccgccaaatttcccaccttgtttttaaattcaccatgctgttttatgcttgacttattataaagattgagcaagagtgttgtgttactacgatcgtgagcctagatggtggaggatgaccggtgcaggcagttgagtagaagcaatttggcctagccagagagaaaagaacaaggatggctaggaatctttggtagaagatgtgatcctcctttgactgaatgtttattgactgtgtttctcacctaaggtatgattcaaggaactatgagggagacaagcataccaaacagggctaacttcaaggaatttatgatctgattttaaaaacgtaggtcatatatagtgaggtgactaatatgactgatttttctcgggttccttataatacatcagatgtctaatattacagtcacaaacatatacattcaaagataccaggtaattcatcataagtataactaataataagtttgaggtcaggcatggtggctcacgcctgtaatcccagcactttgggaggccgaggcaggcagatcacctgaggtcaggagttcgagactagcctagacaacatggtgaaaccccgtctctagtaaaaatacagaaattagccaggtgtgatggcaggcgcctgtagtcccagctacttgggaggctgaggcaggagaatcgcttgaacccgggaggtggaggtttcagtgagctgagatcgtgccactgcactccagcctgggcaacagagcgagactcggtctcaaaacaaaatgaaacaaaaagtttgagatgagtaaagacaagtgctccgggaattcagagaaggaacagattattttgggatagggtgttcatattaggtttcacaatagagatggcgtttgaaacctgattgggtgtaagcagcagacaaggaagagccttctaactttgaggaatgatacaaaggtagagaaagaactctttggggcagaaggatccgggaggggaataatgttggtaagatcagcaaaaggtcaggacccttaaattgtggaggaccttaaatgacaaacttgttcccctaggcatactttatctagcagggaatgggggaccactgaagtttttcttaaagtcttaacgagatgaaagcagccttttaagaagatttaatcaggcaataatgtgcaagatagatgaaaggagcgagggaatgcaggcaggaaggacaagaagaaatagagtaatccaggtctttgttaattccacttatttattttattattaaragatggggccttacaatgttgcccaggctggactcaaactcctgggctcaagaaatcctcctgtcaggccgggcgtggtggctcacgcctgtaatcccagcactttgggaggctgaggtgggcggatcacgaggtcaggagatcgagaccatcctggctaacatggtgaaaccccgtctctactaaaaatacaaaacattagccgggcgcggtggcgggcgcctgcagtcccagctactcgggaggctgaggtaggagaatggtgtgaacccaggaggcggagcttgcagtgagccgagatcgcgccactgcagtccggcctgggcgaaagagcgagactctgtctcaaaaaaaaaaaaaaaaaaagaaagaaatcctcctgtctcagcctcccaagtagctgggattacaggcgtgcatgcactactgcacccaggttaatagtgggctttgatgcccgattttcttgattctaaaacactattgatataatagtttgtataataaaaaactctacattaaatatttacattgattataaatattgattttaggtatataaaatcatttaaaaaaagcatctcagaattaaggaaataagatgataagatctgaactaaggccaggtgcagtggcttatgtctgtaataccaacactttggaaggcagaggcaggaggatcacttgaggccaggagttcgataccagcctgggcaacaaagcaaaaccctgtctctacaaaagttttgataaattagctaggcatggtggcatgtgctttaagtcccagctacttgggatgctggggtcacaggatcgcttgagcccaggattttgaggctgcagtgagccacaaccataccactgcactacaagctgggctagagagcaagaccctgtctctaagaaaacccaacaaccggccgggcgcggtggctcacgcctgtaatcccaacactttgggaggccaagatgggcggatcacctgaggtcaggagttcaagaccagcctggccaatatggtgaaaccccgtctctactaaaaatacaaaaattagctgggtgtggtggtgggcgcctgtaatcccagatactcaggaagctgaggcaggagaatcgcttgaacctgggaagcagaggttgcagtgagctaagatcacaccactgcactccagcctgggcgacagagcgagactccgtctcaaaaaaaaaaaaaaaaagaaagaagaaagaaaacccaacaacataaactgagataacattttgaattatttgaaagattgaatgttaaagtcagagagagcgaagattaaaatatgactccatgattttgagtctgaatgaaagtgtcaagttagtaccattaaaagaaatagcaaagtcaacaggataaaatgaactttcatatattgagtttgaagtgaggaactatctagtaggcaattgaacataggggcctcaagctgggaagaaaggccaggctggagtatgtatcctaggaattacctacatggaagtgataatggaaggcttgagagtgagccaatttctgaaagaatgagtacgcagaggggcaggggcaggagctaatcataagagagtgttcatgttaaggggcaagaggaggagtagggacaaaaaacaaataatttgaaaggtagaattatattcattccagagtaggggcatgaaaaacatgaggagagagagaggttgaggccttatgttcatgcttaggcttttttttttttttttgagacggagtctcgctctgttgcccaggctggagtgcagtggcaagaacttggctcactgcaacctccgacttccaggttcaagcgattctcctgtctcagcctcccaagtagctgggattacaggcacacagcaccacacccagctaatttttatatttttagtagagatagggtttcgccatgttggccaggctggtcttgaactcctgacctcaggtaatccacccactttggcctcccaaagtgctgggataataggtatgagccaccacgcccggcctgtgggctattcttcagttccaggagttctggaccagtaccttggctgtttccttagcttacgttgggaaataataaaatttccccagaagcgtgttactgatattcagtgctgttgatcttagctagttcctttaaagtccagaagaacatacttcccacatacctttgtttgtttttgagatgggggtctcactctgtcccccaggctgagatgcagtggcatgatcatggctcactgcagcctcagcctcccaggctcaggtgatcctcccacctcagcctcccgagtagctagttactccaggtgcatgccacgatacccagctaattttctgtattttttgtagacattgggtttcaccatattgcccatgctggtcttgaactcctgggctaaagcaatccacccgactcagcctcctaaagtgctaggattataggtatgaaccaccacacccrgcttcccacataacttttaatgagaagtttagagcataattgtgttgatccaacattttataagagagtcaaagttaaaggcaaactagtttttaacacatttccarttcttctggaatggctgtgccaattwaactttctgaatttctattagtcagggatgactgagcattctctgactcacttcatttcccaagcagccagataagaaataatttattggtttacaatatgatacttttttttttgagatggggtctcactctgttgcccaggctggagtgcagtggtgtgatcatgactcactgcggcctggacctcccaggctcaggcgatcctcccscttcagcttcctgggtagctgggactacaggcaagcaccaccatgcccagctaaattttttaaatattttttgtagagacagggtcttgccatgttgcctaggctggtctcgaactcctagactcaaatgatcacaaaagtgttgggaagacaggcatgagccactgcactcagcctggtttacagtatgatactttcaattagcaataatcgcaccttggataaacctcattggctacgatactgccactgcacaaagctacagtatgatactttcatagcccataaagaaaaatatatatatgtaatgttcatatatatatatattttgtttgtttgtttgtttgtttgagacagtctcactctgtcacccaggctggagtgcagtggtgtgatctcagctcactgcaacctctgcctcctgcattcaagcgattctcatgcataagcttcccgagtagctaggattacaggcacctgccaccacgcctgactaattttcgtattttagtagagatggggtttcaccatgttggccaggctggtctcaaactcctgacctcaggtgatccacctgcctcggcctcccaaagtgttgggattacaggcatgagccaccgcactcagccaaaaaatatattttaaaatcctgagaaaaggcaatatttcacaaaaacaaagtcattatgttaatttgtacctttcttctatgattggcaaaggagcatagggatggctcaccaccacaggtgctctaaaaagctgactggtcggcatgayaaactgattcgtaattggggctacaaatagtgattaaatggtcctgaaatataaatttcaaaaagattatcttccagttataagtatcttaatcagtacatttgtaagtatctttcaatgttatgctcttgcaaagcttaagctgatacagtttargatattgctgaattattttcagccaatataatctctttttttgagactgagtctcactctgttgcccaggctgcaatgcagtggcacratctcggctcagtgtaaccttcgcctcccaggttcaagcaattatcctgcctcagcctcccgagtagctgagattacaggcgggggccaccacccggttaatttttgtattttttttttttgagacggagtctcactttgtcacccaggctggcgccatctcggctcactgcaagctccgcctcccgggttcaccccattctcctgcctcagcctcccgagtagctgggactacaggcgcccgccaccacgcccggctaattttttgtacttttagtagagacggggtttcactgtgttagccaggatggtctcgatctcctgaccttgtgatccgcctgcctcggcctcccaaagtgctgggattacaggcgtgagccaccgcacccagcctaatttttgtatttttagtagagacgggatttcaccgtgttgaccaggctggtctcaaagtcctgacctcaggtgatccacctgcctcggcctcccaaactgctgggattacaggcatgagccactactcctggcctcagccaatataatcttaatccttacatgcttttcctgggagaaaagaattgctttccccatgtagtgtagcctcataaggctattctgcaacaggagcaattttcttttctggggaggctataaacaatctggcgtatgcagtgatatctggtttgtaaggtgtgttttacctctgtatactctagagtagggggtccccaacccctgggccatggactggtactggccagtgtcttgttaagaactgggccgcaggccaggtcgggcgcggtggcttatgcctgtaatcgcaacactttgggaggctgaggtgggtggatcacttgaggtcaggagttctcgaccagcctggccaacatgatgaaaccccgtctctactaaaaatacaaaaattagccagaccgcatgcctgtaatcccagctactcgggaggctgaggcaggagaatcacttgaactcgggaggtggagcttacagtgagccaagaagccaagattgcgccactgcactccagcctgggtgacagagtgagactccgtctcaaaaaaataaaataaaataaaaaaataactgggccgcataataggagataaatggcaggcaagcaagcattaccgtctacattcctcctcctgtcagaacagtggtggcatcagattctcatagaagcacaaatcctattgtgaactgcgcatgctagggacctaggttgaacgctccttatgagaatttaatgcctgatgatctcaggtggaacagtttcatcctgaaaccatccccacccccacttcccatggaaaaactgtcttccaggaaaccagtccctggtgccaaaaagactggggaccgctgccctagagactctggtaattaaaagtgttgtggctgagatacagtatggggtgagatacttaccagctagggaaagatatttactaaacaggaatatccagcttaatatggtgatgaattgctcagtttattccacctcttgttgatttcttcatgatattggcttagggcagagatggcacatacatggcaacatccttgactcccttccatctccctagaaaacaacatggcagacatcacaatgttaccgggggtccttgctcccagagctcccaacatggtggcgggttgcttccaagatggcagcaagcctctcgttctctgacctggggttcttggccccacggattccaaggaatggaatcttgggccatgcggtgaatgttatagctctattggaagacgtgggtcatggaagagaaccgtagaacccagcgactagtgttcatctcaattaggacgaacccaggcayttgccgtgcaggaacaacggcaagccttcagcccgatcgggagcagcagtgggcgcctcgctggatcaggagcacagcagacaccctgccagatccggaggggtggaagtcagcggcgggtctgcgactgcggcaaacagcagtggtggacaacgagcgaaagcttagcttgagcggtaacaaacacggtacaaacacggaccagaggagtatgcagttacaagatttaatagagtgaaaacacagctcccatacaaagggaggggagccaaagagggtagccgttgccggctggaatgcctggctttatatcctgatcattgtccctcccactgtgctctcaggcaatagatgattggttagttctttacctcctgtttttgtctgattggcattttagtgagctctctttactacctgattggtcgggtgtgagctaagttgcaagccccatgtttaaaggtggatgcggtcaccttcctaactaggcctagggattcttagtcggcctaggaaatccagctagtcctgtctctcaacagtacatactcttttccagtaaactctagccccagagtcatttttgacacagttctccaggcagccaccatcaatcggttggaagtggggatcgaaataaggttggggattctccctggctcacagttttactgttagtatcttctgaatgcaaggaacagggcatcttttttaaaaagaggatttaggccaggcacggtggctcatgcctgtaatcctagcattttggtaggccaaggcaggcggattgcctgagctcaggagttggagaccatcctggcaacatgacgaaaccccatctctataaaaaatacaaaaaaacttagccgggcatcgtggtgcctgcctgtagtcccaattacttgggaagctgaggcacaaaaattacttgaacctgggaggtggaggttgcagtgagccaagatagcaccactgcactcaagcctgggtgacagagtgagactctgtctccaaaaaaaacataataaaataaataaataaataaaaagatgatttaaggatacatgtagattaaaatcagaaagttgttcaggattcaagtcaagtcagggcctggattctctccctatggcctccctgtgctacctctcacagctatctgtgactatgtttttaaggtgccccattttcctttcatttccaactggccagtcctctccgtattccccagtccagatgtttcagagagctactttaacatgcacattagctaattaccattgtcactattagctagccacaggcttggtgccaggttttttcatgggtcatgaataggcagctcttgaggaggcagcctatgggcacaggtgatattttctctctttcatttagtgacggtttttactttatgaaaatttgaaattcaactgtgctgcttaggtatttattaacacttcaataaaaactttaggaaaaatttgtgccaaataatgtccttttcttttttgaaagcctcactaaactaatacatcaggagaatgccatagagattagaccttgattttaaagaagatgtcttttaaaatctcttaagaccttgatgtgagccattcagagagatgtgggctggataatagaagagttatgtgaactcttaactaatggaacaacttaaccaaaaaatgatgactgtaggtcgggcgcggtggctcatacctgtaatccgggccctggccgaggcgggcagatcatttgaggtcagaattttgagaccagcctggccaacatggtgaaaccccatctctactaaaaatacaaaaattagccgggcgcggtgacacatgtctgtaatcccagctcctcgggaggctgaggcaggagaattgcttgaacccgggaggcagaggttgcagtgagccgagatgacgccattgcactccagcctgggcaagagtgaaaccctgtctcaaaaaaaaaaaaaagtgatggctgagatgaaccttgagataggtttctgttataaagtgcaatgctctagttagtatagagaggaaacactgggtggtagtagctaagcaagtgggatcaagggctgggctcttctgtttaacagctgtgcaacctcaggcaacttcgccttctgtattttggtctttttgtctgtaaagtagggggtatatacagaatttacatcttaatgttgttatgagtactgatgaatatagatacaatgtttagaatagtttaggctattttagtttagaaatgtttaggctacgaaatacacgggtagaatttacagagaggcagagtactttaaaataattaaatcaccaaataaaataagacaagtctgttacaagaaatgttcccaaagtggccagataagcatctgtcaggggtgctgtaggaaggtctyccactctgatgagaaggttagattagaggatctcttaaagcctaggagtcattgatagcctagttatgccctgaatgcttgaagttatatttatgcttatggagtaatctctagaaaaatctgattttattatactacaaagccataagtaatttttttgcaacttgtagagttctcagactaaagtcaaatgaaaccaaatcatacaaaccaaacttaactagtgacgatttttggtatgtcaattcacaatgttaaacagtaaagtaacagaaatccagaaatgtaatattatttacccataggaaagtgatctcaaaaagccaagagaaaatgcctcctaagggtccttgctgcaatttgatctcaagaaagcagagaagaaaattctaaaaagattatttcatttaaggttaaatgattatggaaatataaaattctcagtgttggtcaaacacaaaacttgcaggtggcttagaaagtgcatacaattctcaaaatgtattccctaccgttaaaggtatttatatttatagttatatttttctagctatattaagcattatttttaaaacacattacagtaaaatacacataaaaggtacatatatattacrtatataatttgagtttttacaaactaaacacacctatgtaatcagcacccagattttaaattgtttttgaagttaatttttcttacctttcaggaagaaaaatttaacgttctattctgcatatttggaggtacactatgtaactttaaaagcaacatacccatcttgacttcaagtgactttcttttttttttttttttgagattgagtctcgctctgttgcccaggctggagtgcagtggcgcgatctccgctcactgcaagctccgcctcccgggttcacgccattctcctgcctcagcctcccgcgtagctgggactacaggcgcctgccaccacactcggctaattttttttgtatttttagtagagacgggttttcacaagtgttcgccaggatggtcttgatctcctgacctcgtgatccacccgcctcggcctcccaaagtgctgggattacaagcttgagccaccacgcctgacctgacttcaagtgactttcaatacctcttgtggtaggcagaataaatagctccccaaagatatccacatctttttttttttttttttgagacggagtctcactctgtcgcccaggctggagtgcagtggcacgatctcggctcactgcaacctctgcctcctgggttccatttattctcctgcctcggcctcccaagtagccgggactacaggcgtgcgccaccatccccggctaattttgctttagtagagacggggtgtcaccatgttggccaggctggtctcgatctcctgacgtcgtgatccgcccacctcagcctcccaaagtgctgggattacaggagtgagccaccgtgcctggcctagatatccacatcttaatccctgaacctgtgaccatgtttccttacttggcaagagggactttgcagatgtgaccaggactttgagagggaaaattatcttggactattgagtggacccaatgtaatcaccggggtctttttaagtgagagaggaaggcagcagagtcacaaaagatgtggcaagggaggcagaagtcagaggtgccatgtgccaaggaatgtgggcagcctctagaatctggaagggggaagaaaatgaattctccctggcagcctccagtaggaaggcaacccaactgacaccttgattttggtcccttgaaacccattttggatccttaacgtccaaaactgtaggataatacatttgtgggtttttttgtttttttttttttttttgagatagagtctcgctctgttgcccaggctggagtgcagtggtgcgatctcggctcactgcaagctccgcctcccaggttcacgccattctcctgcctcagcctcccgagtagctgggactacaggcgcccgccaccacgcccggctaatgttttgtatttttagtagagatggggtttcaccatgttagccaggatggtctcgatctcctcaccttgtgatccgcccgcctcggcctcccaaagtgctaggattacaggcgtgagccaccgcgcctggccaatttgtgttgttttaaagaccctaattttgtggtaatttgttacagcatatgtgaaactaatacaccatttatagtctggtgagtctgtcttcagattcatatatctcactgcacatttaatagcttcatgtggctcacaggcatctcaatcataacrtgccctaaattaaaactttacttttttcttcccaaaccaggtcactctcccagcctttctcatcttagcacacaaccaaccacccaattcctaatggcagaaacctggaagtcatttctttctttctttctttttttttttttttttaagagatgaggtctcgatccagcacccaggctggagtgcagtggtttgatcgagctcactgttgcctggaactcctgagcacaagcgatcctcccacctctgccttccaaagtgctgggactgcaggtgtgagccaccacacctggcccggaggtcattcttgagtctttttccctgtcatccccttatatctaacctataattaagtctcatcaattttacttccaaaataaacatcatatccatccacttcagttgagtttcactgctaccaatccattctccacagagcagccartgtgatttaaaaaagaaatctgggcctggtgtggtggctcatgtctgtaatcctagcactttgggaggccaaagtgggcggatcacctaaggtcgggagtttgagaccagtctggccaacatggtgaaacccccgtctctactaaaaatacaaaaattagccgggcatggtggtgtgtgcctgtratcccagctactcgggaggctaaggcaggagaattgcttgaacctgggaggtggaggtttcagtgagctgagatcrtaccactgtactccagcctgggcgatagagtgggaccctgtctcaaaaacaaacaaacaaacaaaaaagaaatctgatagcacttccttgcaaaaatcccttaatgtcttttcttttgtggctaatgtgaccttttcgtggctccaagctagccacaggagaactaagagttcataagtattttacaaattagagcttcattattaattgaaatgcatcacaaactgcagtttgatgagatttgaaatttgctgtacagcaagaaatctcaatgaactgttagacttagtttcacctgtggtaaatttttaatggttgtaaaaaaaaagatgttaatattttgtatcatcaacttcattcaaagtttcttgtcaatggtgactcaggaatctgttgcccaggttggtctcgaactcctggcctcaagctakccttctcacttggcttcctaaaatgctgggagtgactcagaaatttgaaagggtcattaaaaagtcttaaagcctgattcggtggcatggtcctgtagtcccagctactcagaaggctgaagccagaaaagatggcttgaggccaggagctcgagtgctgcctggacaacatagtgagacccttgtctcaaaaacaacagcaacccaaagtcttatttatcttcaggagctgcgcaagccctttaccaccgccacgtttctccctggatgtccctaggcctcgggactggctgggagttccctgtagtggaggccgccgctgaactgattataaagatgagagaggctctgccatgccttggtcatcaattcacactccaccagtgtcttctagcagtcacggcaagggttaacgtcagggaccgctgtggggtggccgcgctacacgacagtatagttgcggtcctggtttatgaaataactgagggaacaagaggcgcaagaaatccctccttgggtgcaagaccaaaacaactacccagcgggaagactcgggcttcagtgcgtgtgtcgccagtggaggaggacgcttcggggcgggagcacaagctggcaggacagccccgcagcagctccagcgcggcagaggccatggaagatggtccgctggtcagcaccctgcctgcgcctcaaaataccgccgggaaggtgggggacggggacgggagcagccaatcacrcgagctctctcgggtggcgtcagggcgcgatcgcggattcggcactccgggtgggcgtggctgggcgagcgaggagtggggacaaggtcgagcgacgagtcgtctacccgcgcgcccgagcgcggaaaccgaggggcaggctcgcgctctgcctgcttcgtggcgcttggttcgtccctcgcccgaggagcgcggtggcggcgtgggagggagcctctgacggcgtctggtgagagccgcgcggcggcgtgggactccgggagagcatcctgcccacccccagggccgcctcccccggcctcctgccccaggcctcccctccccggccgctttccaccccaccgcgccccgaggcccacactggacccggctctcgcccaatgtcctgcaggcctcaccatagggcacctctttggcccaattcagggctccgccgtgtggctcggggtgggccctgatgagcaggggaggggatgtagagggaggcccaggttgacttgtcccctggaacagtgctgtccaatcaggggggatgctgactgtcccgttaggagmggggcggggcgagagagggtggagaactgcctggcaggcgagctgtcctggcgtgaaaaggctgggctaaaaggtcccctccctgctctgagtctacattctgagtctgggcttccttgtatatttgagaaacgttaattccccgccctcaccccaatttttttttttttttttttttttttttttttttttgagactgagtctcgctctgtcgcccaggctggagtgcagtggcgcgatctcggctcactgcaagctccgcctcccaggttcacgccattctcctgcctcagcctcccgagtagctgggactacaggcgcccaccaccacgcccggctaattttttgtatttttagtagagacggggtttcaccatgttagccaggatggtctcgatctcctgacctcgtgatccgcccacctcggcctcccaaagtgctgggattacaggcgtgagccaccgcgcccggcccctccccccagttttacgcttgtaaaattrttagaacacaagaacgtattttttactactctggtaggaggggtggggtacagtttcgcagtataggtaactcgttaacccaactgtaggagcgccgcagttgaagccaaaccgaattatagcgtcggaatggggccctgactttcagacagctttatatagctctttccttcttattcctttgagtcccatcctcattgcactgatgaaagggcgatttatcatgttttcgaggaagatttgtactcatggatgtttatggaatgaacagacacaaggcaaacactgggtgtgggacagtgttctgagcgctgaagtcattcagacaagggtttgattttcggttctctcaatgatgaacttgggttcaagtaattctcctgcctcagcctcccaagtagctgggattacaggcgcctgccaccatgctcggttaatttttgtatttttagtagagacggggtttcaccatgttggtcaggctggacttgaayagacatcaagtgatccgcccatctcggcttcccaaagtgctggggttacaggcgtcagccaccgcgcctggccaatgatgaactattaaacagtgatttggggcaagtaaattattttctctgtgcttcctgtctgtaaaacgcggctaatacgagggctgtgaggatgaaatgagttaatacrtgtgaagaaacctattagcacaatgtttggcacttcagaagcgctcagcaaatgtttactgttgtttcctctgttcagtgactgcttgacccaagtgttcattatttttatttgatagccttaaaaatattctcttcacaaagaactctttccacggttgagtggggcattatttttctggaaagggttaatcaccttttgtcagcatttataatggacggtcttgagttgagagaatgcagaaagtagtctttaagaatttgggtttctgccgggcgtggtggctcacgcttgtaatcccagcactttgggaggccaatgcaggcggatcacctgaggtcaggagttcaagaccagcctggccaacatgatgaaacctcatctctactaaaaatacaaaaattagctcgatgtggtggcaggcgcctgtgatcccagctactcaggaggctgagataggagtatcgcttgaacccaggaagcggaggttgcagtgagccgagattgcaccactgcactccagcctgggcgacaggctgtctgtctcaaaaaaaaaaaaaaaaaaaaaaaaaaagaattgggtttctctggctgggtatggtggctcatgcctgtaatccaagcactttgggaggccaggcggcggatcacctgaggtcaggagatcgagaccagcctggccaacatggtgaaaccccacctctactaaaaatacaaaaaaattagctgggcatggtgtcacatgcctgtaatcccagctacttgggaggctgaggcaggagaatckcttcaacctgggaggtggaggttgcagtgagctgagatcatgtcactgcactccagcctgggcaacagagtgagaccctgtctcaaaaacaaaaacaaacaagaattgggtttttcagcgattgccagtgagttcaagatgaaggcaaacttgtccgaaaactatcatctatctgtctaacatctatcatccatccatctgtcacctattatttgtttttctgtctttcttttggtggctcaggtacaattatagaattgaagagtgaaatggatgcaagtattcagtcccaccttctgactttctgagctctgtgctggacaatgcacctacttcataatgttcatttaaaagattgcttgtttttatttttttatttaaattttaattttttaaagatagggtctcactctgtcacccaggctggagtgcagtggtccttttccaattcgtactatagtttctttcagggaaaagaattatatagctggggaacacatatgagaagactttttgctatttagcctcttgtggcttttaatttacatttttaatttttgtgaggcaaggccaaggcagatgacttgaggtcaagagttcgagaacagcctggtttagttgaaaccgcgtctcaactaaaaaaatacaaaaattagccaggcatggtggcgtgcgcctgtaatcccagctacttgggaggctgaggcaggagaattgattgaacccgggaggtggaggttacagtgagctgaggtcgcaccactgcactccagcctgggcaacagagtgacactccgtctcaagaaaaaagaaaaatactgtgaggcaaaacaaatcattcatggtttgtcaatttatatttattttacaaagaacagtaaatgttccatctggcagtactaaaatgcctcgtacttaccagttactcaaaggttattctacctaaactgagagcaagctggccatatgagtaaactgaaaaatagaacaatgttacctaaggccaggtttatagacaagcttgccttcatcttgaactcactggcratctgagaaacccaattatttttttttgagatggaatctcactcttgttgcccaggctggagtgcagtggcaggatctcggctcactgcaacctccgcctcccgggttcaagtgattctcctgcctcagcctccccagtagctgggattacaggcgcctgccaccatgcctggctaatttttgtatttttagtagagatggggttttgccatgttagccaggcaggtcttgaactcctggcctcaggtgatccgcccgcctcgtcctcccaaagtgctgggattacaggcgtgagccactgcgcccggccgaaactcaattcttgaaagcagctttttgcattctctcaactcaagactgtccattgtaagtactgatgaaaagtgattgcctccttacaaaaggaaatttacttgccccaggctggatttaaatwttaatttttttaaagatagggtcttgctcaatctttcaggctggagtgcggtggcatgatcataactcactacagcctcaaactcctgggctaaagtgatcttcctgcctcagcctcccaaatagctaggaccgcaggtgtgcacaaccacactcagctaattaaaaaaaatttgtttgtagagacaggagtcttgctatgttgcccaggctggtcttgaactcctgacttcaaggagtccttcttgcctcagcctcccaaagtgctgggattacaggcatgagccaccatgtccagccagatttcttgtttttatttatttatttatttatttatttattttgagacaaagtctcactcttttgcccaggctggagtgcagtggtgcgatctcagctcactgcaacctctgcctcctgggttcaagcgattcttgtgcctcagcctcccaagcagctgggattacaggcacgcgctaccatgcctggctaatttttctttttctttttttgaaatggagtctcgatcagtctcccaggctggaatgcaatggcgtaatctcggctcactgcaacctccgcctcccaggttcaagcaactctcctgccacagcctcctcagtgctgggattgcaggtgcacgccaccacaccctgctaagttttgtatttttagtagagatggggtttcaccatgttggccaggctggtctccaactcgtgacctcaggtgatccgcccacctcagcctcccaaagtgctgggattacaggcatgagccactgtgcccagccaaagttgaatgtttttgctaaattttagggctcttataactctttgtatatttgaaaagctgatggccagcaatttccaaaattttgcacttttagatttgatatttccaatatctttaaatgttctcattctaccatttgagtcataattaaaagcattttaaaaagtaagatttgtggctgggcgcggtggctcatgcctgtaatcctagcacgttgggaggccgaggtgggtggatcatgtgaggtcaggagtttgagactggcctggacaacatggtgaaaccccgtctctgctaaaaatacaaaaaaatttggtgggtgtggtggcgggcacctgtaatcccagctactcaggaggctgaggcacaagaatctcttgaactggggaggtggaagttgcagtgagccaaggtcatgtcactgcactctagcctgggcaacagagggagactgtatttwaaaaaaaaaaaaaagtaagctttgccccaacagtttatagaatatgttaccaattttgtaatatacgttgtgtatgtgtgtatgtatacacatacatacatcatatatatacacatcatatatatatatatttagatagagacttattctgttgcccaggttggagtgcagtggcaccatctyggctcaccgcaagctccgcctcatgtgttcaagtgattctcctgcctcagcctcccaagtagctgggactataggtgtgtgccacaacacctggctaattttttttgtatgtttagtagagatggggtttcaccatgttggccaggctgttcttgaattcctgacctctcgtgatccacccagctcggcctcccaaagtgttgggattacaggcgtgagccatatatttatttatattatcatagtttatccatggaaggacagataggaaaccagtaackgcttccagggaaaagaactagctagctggggaacacagatgaaaagacttattgctacttaacctcttgtgacttttcaattttaaaccatgtgaatatactacctgatcaaaaattgagttaattaaaattattttttaaaacctccccttaaaaaggcattttaccttaattttatttttaagatttaacttctttccttgaaaaagctttgactttttaaggttttttaggtttctaggtaacattgttgtatttttcaccatttatttatatggccagcttgctctcagtttaggtagaataacctttgagtaacctggtaaataagcattttagtactgccagatggaacatttactgttctttgtaaaataaatacaaattgacaaaccatgaatgatttgttttgcctcagcaaattaaatattaccaacaattttttcagctcaaatttgatcactggaagaaggattatatacaagaacacttacgacaaccatttttggaagaatatttttgtctctttaaagattagatagtgcggccacgtgcggtggctcatgcctgtaatcccagcactttgggaggccgaggcgggtggatcatgaggtcaggagttcgagaccagtctggctagcatggtgaaaccccatgtctactaaaaatagaaaaaattagcccagcatggtggcacatgcatgtaatcccagctactcgggaggctgaggcaggagaattgcttgaacccaggaggcggaggtcgcagtgagccgagattgcaccactgcactccagcctgggtggcagagcaagactctgtctcaaaaaaaaaaaaaaaaaagatcagatagtgcttgggtcttctgaatataactctcttggtggaatgcccgtttcgttatattgtaagtgtttgccattgggtgaaattagcttttactggggattataaattcagagtggacctaatgatgggaccgtttgcatggtcacagaattttagcctaagagagtgttgaggtaccaacagcagagggctactgatggaatttccagtgaatttcagagtttaccctcatctaaaggatggcacccctagaattggaatccttactgaagtgtctctggattcctgattacaagttctaaatattgatacacttactgaaacatgaacattgagatcagagtccatgaggtgaaattttatgttgatttagagaagtttaacatgttccaagtctggctcagtggtgtatgcctgtagttccagctacttaggaggctgaggtggggggattgcttgagcccaggagttccaggctgcaatgagctatgatcgtgcttgtgaatagctactgcactctagcttgggcaacatagcaagatcccatctccaaaaatgtaaaaactttttaaaaaattccataaaacaaatctcttattccttgcccctgattttactttttgaatggagggtatagcatggcagggagggatgagcgagcagtggagctgagcaatagtatatctgtgaatgggagggccataacgctcagagcgaggcagcaactgagaaacgtgggggaggaggacctgaggtttgtgtgaagcctttccagaaaggatgacacttagatggagttttgaaggatgagtagaagaccagcaaggaggaaaggaagttttaggaaaaagtaggtggcatctataaaggtatagatatacggagattcactagttgaactggaggcagtttggtatggctggcactttggcacagagaagggtaattttaggcagggaagagatggtggaaaggaagatcactttgaaagtttgtaggaggccgggcgcaatggctcttgcctgtaatcccagcactttgggaggccgaggtgggtggatcacttgaggccaggagttcaagaccagcctggccaacatggcaaaaccccatctctactaaaaatacaaaaattagctgggcatggtggtgggcacctataatcccagctactcgggaggctgaggcaggagaattgcttgaatctgggaggcggaggtagtagtgagccaagctcgtgccactgcactccaacctgggcgacagagtgagactttgtctctaaataaataagtaagaaagtttataggagrcaggcaaaccacttgacagctgttaagatcgtccagacctaaaatgagggactggactaggggaagtccttgtatggatgaagaggaggagatagatttgaaagatatttagggggtggaattgacagcattttggagatatggggtgaagaacagaaaagacaaggatttgaaggcatttggatgaatgaaattgcataactcagagaacaattgaggaggaacagcttccgaaaagaaaatgagttcagtttgggacactgactttaaggtgtttataggacatasagcaggagatatctgataggcatttggagttgtcagttttgttggcactggtgtgtaggtactaatgagggcttgaaggtcargtttttatcttactcatctttctcctgcccagcattaatcacaataccttgtatttaggaagtgtatagtgtgagagtgaatagcctgtgttccttatgagacatgatctggaatgttggggcagtaattttccctctcaagacctgtgtttccctttctataaagtgatggagtagaactagatcagtggttctcaacaactgattttgcaacaacctactatgttgggctcatctgtgagttatggcaagtaatttttaataataaagagctgatatttcctcaccttttaaacaagagctgatttatatcactccttcttaatggcattccagtgtgttttcttgagtgtgagaggatggggtggtgttacagttagtttgctggagtttcttcttctttttttttttttgagatggagtctcgctctgtcacccaggctggagtgtggtggtgcgatctcagctcactgcaagctccgcctcctgggttcacgccattcttctgcctcaacctcccgagtagctgggactacaggtgcccgccaccacgcccagctaatttttttttttgtattttttagtagagacggggtttcaccacgttagccaggatggtcttgatctcctgacctcgtgatctgcccacctcggcctcccaaagtgctgggattacaggcgtaagccaccactcccagccttggagtttcttaactctggatataccaatgggagagtcacacataagtggaggtgcaaaaaaagattaagaatcactgtactaaatagtggttaaggacttgaaactgaaaatttctatttctgatttagagaagtttaaagtttagttatatctaggagttattctgattataaagtttttattttggcaatttcaggaactctattttaagaacctctcaaaacgaaacaagcaaatcatggagaagaatggaaataaccgaaagctgcgggtttgtgttgctacttgtaaccgtgcagattattctaaacttgccccgatcatgtttggcattaaaaccgaacytgagttctttgaacttgatgttgtggtacttggctctcacctgatagatgactatgggtaagatgaaagcattttcttattcttcattgcaacagtgtgctagaaggagcttgggttttgtagccatatgggcccagcttcaaattcctgttctgctgcttagtttttatgtggccttagagtagtcacttagcatctctgagcctcagtttcctcattatataatgtagtgaaaacttatattgtaaattattgtgaggaatggagatcrtgatatagagcatccatcacaatgatgccgcttagtagatgattgataaatggtagctataaataatattactgtttgttattagttgttacattcaaacaaatgccacttataaatacatattgtatgagtataataatgtgattccaygtaaactgttttgtgagctgtaatggcaatctttaaaactggtttataggccaacagcatataaagtagtagatatggaacaagattttaaaaatctaatctgcaaggtaaagtagagagttacattactgtcaccattgacatttattttgctgacattaggtttgttattaatcacaggctacatttaaaaagtgaaagttgggccgggcacggtggcacatgcctataatcccagcactctggggggctgaggtgggtggatcacctgaggtcaggaatttgagaccagcctggccaacatggtgaaaccctatctctacgaaaaatacaaaaaaaaaaaaaattagccagttgtggtggcgcatgcccgtagtcctagctactcgggaggctgaggcaggagaatcacttgaacccgggaggcggaggttgcaatgagctgagatcacaccactgcactccagcctgggcaacaagagtgagactccgtctcaaaaaaaaaaaaagcaaaggttgaataatctgagagaacaaggcgtattacatacatcttgatgtatgtaataaaaagtcatttagtgcacccttgtggcatgaatatattaatgcagtctccaaagaggatcacaaatacaatactgtatctgaaagaaccttgcgttaaaataaaattgtccttttcagactattctttaaaaacaaggtgggaattcgctactaggaaatacttaaagagtagagaagaaacttaatggatagctcagggatccacagatttttttttttttttttttttgagacggagttttgctcttgttgcccaggctggagtgcagtggcgtgatctcggctcactgcaacttccacctcccgggttcaagtgattctcctgccttagccttccgagtagctgggattacaggcatgcgccaccatgcccggctaattttgtatttttagtagagacggggtttctccatgttggtcaggctggtctcaaactcccaacctcaggtgatccacctgcctccgcctcccaaagtgctgggattacaggtgtgagccactgcgtccgtccagatttttttttaatataaaatgaattctggctatttaggagcatcctctcagtagaacagaaattttagctagagcctgagatgaaagtttgagtgggttcttttactgctctgagaaagctttgacaggaagactagtggaagagaggctctcagggaaatggtagtaggttttttatctgcctaccacagttaccaagggtggaagaatagtgtttatctgatgagaccgttaaataggaaatttgactagtacttaatgaaaatgcatgtttaaggtacattctaacacaagaaattggttgcttcttgggagaagaattggatgactgggagacaaaagtgagagacttttcaccatgaaatgttttcttaaagaaaaaaggtttggccaggcacggtggctcacacctgtaatcccagcactttgggaggacgaggcgggcggatcacgaggtcaagagattgagaccatcctggccaacatggtgaaaccctgtctctactaaaaatacaaaaattagctgggcgtgatggcacacgcctgtagtcccagctactcgggaggctgaggcaggagaatcgcttgaacctgggaggtggaggttgcagtgagtcaagatcgcaccactgcaccccagcctgggcgacagagcgagactctgtctcaaaaaaataaaaaaaagggtaaaaaacattttcccctaagtgtatataaaaagtgctgaccactgttaaaagtttagtctctttcttcctaataaaaaaattctctggctgggtgcagtcgctcacgcgtgtaatcccagcactttggtaggtcaaggtgggtggatcacctgaggtcaggagttcaagaccagcctggccaacatggcaaaaccccatctgtactaaaaatagaaaaattagctgggtgtggtggtacatgcctgtaatcccagctacgcaggaggctgaggcaggagaatcgcttgaacccgggaggcagaagttgcagtgagcctagatcgcgctactgcactccagcctgggcaacagagcaagacttcatctcaaaaacaaaaaaaaaaaaaaaaaaaagaatcttaatcaggctgtttacacttatggtctatgctttttatgtttgtaagttatacttcaatttatttattttaatgtttctcacttcagagttggtgttagattgcttttcttgcatgttacggctctgtgtttaagaacatgttcttatatctttatttctccccggctttagaaatacatatcgaatgattgaacaagatgactttgacattaacaccaggctacacacaattgtgaggggagaagatgaggcagccatggtggagtcagtaggcctggccctagtgaagctgccagatgtccttaatcgcctgaagcctgatatcatgattgttcatggagacaggtttgatgccctggctctggccacatctgctgccttgatgaacatccgaatccttcacattgaaggtggggaagtcagtgggaccattgatgactctatcagacatgccataacaaaactggctcattatcatgtgtgctgcacccgcagtgcagagcagcacctgatatccatgtgtgaggaccatgatcgcatccttttggcaggctgcccttcctatgacaaacttctctcagccaagaacaaagactacatgagcatyattcgcatgtggctaggtacgtatctcagactttagtcagtctaatggctgtttttgtcagaaaatgttccgtctatttcaatccttttggaaactattatggatagaatactctgttagcaatgagaaggccaaggttttagttcatagaccttgccctgtggtatgactttacctctctgaggtttaccttttctgtaaaataggcttagtggattgagttttaaaaatctctgctatatttatagaatggaatgcttttaatccattaaatatattagttataagaacgatcctaatatgtcaaaagggggagctataaaattataagtgtaatatgccatttcattttattttatttattttattttttgagatggagtcttgctctgttgcctaggctggagtgcagtggtgtgatcttggctcactgcatcctctgcctcccaggttcaagtgatgctcctgcctcagcctcccaagtatgtgggattgcaagcgtggaccaccatgaccggctaatttttctatttttaatttcaccacgttggccaggctggtctcgaactcctgacctcaagtgatccgcccaccttgggctcccaaagtgctgggattacaggtgtgagccactgcacccagctgtaatctgccattttactaaaaactgtaataatggaatggttaggaagtatgtacaccaagtcatttattatatttatttctggtgtgggattatgggtgtttttatgtttgattttctgaattttttttttgttttttgagacagagtcttgctctgtcatccaggttggagtgcagtggcacaatctcggctcactgcaacctccacctcccaggttcaagcgattctcctgcctcaacctcccgagtggctgggattactatgcctggctaatttcatatttttagtaaagacagggtttttccatgttggccaggctggtctcgaactcctgacctcaggtgatccgcccacctcagcctcccaaagtgctgggattacaagcgtgagccaccgtgcctggcctgattttctgaaattttttactacattggcaaaatggtcattttttttttttttttgagatggagtcttactctgttgcctagcctgtagtgcagtggctcagtctcggctcactgcaacctccacttcccgggttcaagcgattctcctgcctcagcctcctgagtagctggggttacaggcgcacaccaccacacctggctaatttttttttgtatttttagtagagacggggtttcactatgttggtcaggctggtctcaaactcytgacctcataatccgcccacctcggcctcccaaagtgctgagattacaggcatgagccaccgcgcctggctcatttttatttttaatgcttttcttatagaattgttggaatactcagattatgaatgttggaagcagtaagccrtaagtacttattaatataagggattatgatgattattaaaaagcaaaagtcatagttgtagccttagagtatatctttgtaaataagccctatgttccaaaatttttattgttcagtgctctagcttcctagaaattatcttttgctaatcagaggtaaaaaaatccaagtttacaaacagaatgtcagttggttaatttatagtaagagtactacctaggggacaaattaggactaataatctatttaggacctttcatttctaagaggcagatctattgaattataaaattaatgaacagaaaattgatttggttgggtcaggtatggtggcttaccctgtaatcccagcactttgggaggctgaagtgggagtattgcttgagcctaggagttacaaggccagcctgggcaacatagcaagacgctgtctctacaaaaaataagaaaattagctgggcgtggtgctgtgtgcatgtagtcctagttacctgggaggctgggatgggagggtcacttgagcctgagtagttgaggctacagtgatctgtgattacactgctgcactctagcctgggtgacagagtaagaccctgtctcaaacaaaacaaaacaaaaaaaacaaaaaacaataacaaaaaaaaaacacagaaagaaaaagaaaattgaataagcaaagagattttgtatatttttaatctagattacattacatcaggaaaggaattgggctttcctgctatataacgtactccattctacatatttctgttgttcagtctggagtgcagtggtgcagtcttgtcctcctgggctcaagtgatcctaccacctcagcctcctgagtagctgggactacaggcatgtaccaccatgcccagctaatttttaaaatttttttgtagagatggggtctcactattttgcccaggctagtcatgaattcctaggctcaagcaatcctcctgcctcggcctcccaaactgctgggtttataggcatgagccaccgcacctggcccattctaaatatttcttatgcttggacagatttgtaattatcaagggatcgtctagataatgctggtggaacaaccttctgtctcttcagtctctccttttagtatgcttccgatgaaacactcttggattctgttctaattataccattagctctctaggtattctggaaaacttgtatcactgaaaaacttgtaatgaatagaaaataataatgtgccagatgtggtggcacatgcctgtaatctctgtactttgagaggccaaagtgggcagatcacttgagcctaggggtttgagaacagcctgggcaacgtggtgaaactctgtctttacaaaaaatacaaaaatcagccgggtgtgatggtgtgtgcctgtagtcccagctactccggaggctgaagtgggaggattgcttgagtctgggagttcaagactgaagtgagccatgattgtgccactgcactccagcctcggtgacagaataagaccctgtctcaaaaaaacaaaacactagttttggccaggtgccagtggctcatgcctgtgaccctagcactttgggaggcccaggcaggtggatcacttgaggtcaggagttggagaccagcctggccaacatggtgaaaccccatttctagtaaaaatacaaaaattagccaggtgtgctggcacatgcctgtactcccagctactcaggaggctgaggcaggagaattgcttgaacccagggaggttgctgtgagccgagattgcaccactgcactccacactccagcctgggtgaagaagcgagactccatctcaaaaaaaaaaaaaaaaaaaaacaagcataaaacccaggccagatgcggtggctcacacctgtaatcccagcactttgggaggccacggcgggcagatcatgaggtcaagagattgagaccatcctggccaacatggtgaaaccccatctctactaaaaatacaaaaattagctgagcatggtggcgcacgcctgtagtcccaggtacttgggaggctgaggcagaagaattgcatgaaacccaggaggcggaggctgcagtgagccgagatcgcgccactgcactccaatctggcaacagagcgagactccgtctcaaaacaaaaaacagcaaataaccattagaaagcagaatgtagcaaaattgaattgtacttgtagggcttaaagtcctatttgggacaatttaagcagttctttatggaaagaaggacaacagaacagctaaaattgctttttttttttttggtctttaaaccagtgaaaaagaaaactcaagacaatgaggcagagccatccaccactgggcagtaatacattttatataaaacctgttcctgcttcttgatatgcaacttcttttttttttcttttttttgagacagagtcttgctctgttgccaaggctggagttctgtcacctaggctggagtgcattagcgcagtctcgactcactgcaacctctgcctcccaggtttaagcaatactcctgcctcagcctcctgagtagctgggactacaggcgcacaccaccacacctggctaatttttgtatttttagtagagatggggcttcatcatgttcgccaagttcgtctcgaactcctgacctcaggtgatccgccctcctcagccctccaaactgctgggattataggcatgagctaccgcacctggccttaatatggaacttctcatgctatcactctgcttacaggaagatagggttgggtaggccatatataacattgcagctttgtaaccagagtgttaatatataacaatcttaattttaaaattagcaatgttaaaaaggcatgttaaattcctaataatgaaaggcatatcacagtaaatataggactttacaacagaaaacaaaatgcctttatggaaaggatttatgaaagggctgaggctgctgaattatggatagatacaaagactggtaataatatcagaagtgccaggtggagaagcaggtgcaaactttgtatgaaatgtattcttgccagggatgagttgctctggctcattgtcttgcgttttacttttccctggtctaaaaagacttctagtttttgctactttgccatccttctttcataaagaaactgttgctgggcacagtggctcgcgcctgtaatcccagcactttgggaggccgaggcgggcagatcacaaggtcaggagatagagaccatcctggccaacatggtgaaaccccatctctactaaaaaatacaaagattagctaggcgtagtggcataggcctgtagtcccagctactcaggaggctgaggcaggagaattgcttgaacccacaaggtggaggttgtagtgagccaagatcgtgccactgcactccaacctgggcgacagagtgagactctgtcttaaaaaaaaaaaaaagtaaatgaaacaaaaagctggttctttgaaaagataaataaaactgttagaccattggcaagattaaccaagaaaagaagggagaaaatccaaataacctcactaagaaatgaaacaggagatattacaactgacactactgaaatacaaaagatcattcaaggctactatgaacaccttgacacacataaactagaaaacctagaagagatggacaaattcctggaaaaatacaaccctactagcttaaatcaggaagaattacataccctgaacaggtcaataacaagcagcaagatggaaatggtaatttaaaaattaccaacaaaaaaaattccatgaccagatggattcacagcagaattctaccagacattcaaagaagaattggtaccaatccttttgacactattctacaagatagaggaagaaggaaccctccctaatttattctgtgaagcccccatgaccctaataccaaaaccaggaaaggacataacaaaaaaaacaacaggccaatatccttgatgaacatagatgctaaaatccttaacaaaatactagctaatcaaatccaacaacatatcaaaaagataatccaccatgatcaagtgggtttcataccagggatgcagggatggtttaatgtatacaagtcagtaaatgtgatgcaccacataaacagaattaaaaatcacatgatcatttcagtagatgcagaaaaagcattaaacaaaatccagcatccctttatgattaaaactctcagcaaaatcagcatacaagggacataccttaatgtaataaaagccatctatgacaaacccacagctaatgtaatactgaatggggaaaagttgaaagcattccctctgagaattggaacaagacaaggatgcccactctcaccactcctcttcaacatggtactggaagtcttagccagagcaatcagacaagagaagaaaagggcatccaaatcagtaaagaggaagtcaaaccgtcactctttgctgacaatatgattatttaccttgaaaatcctaaggacacctccagaaagctcctagaacttataaaagaattcagcaaagtttctggatacaagattaatgtacacaaatcagtagctcttctatacaccaacagcgaccaagcggagaatcaaaccaagaactcaacccctattacaacagctgcaaaattaaattaaaataaaataaaataagtaaaataaaataataaaatgaaatataaaataaaataaaatacttaggaatatacctaaccaaggagtcaaaagacctctacaagggatattacaaaacactgctgaaagaaatcataggctgggtgcagtggctcacacctgtaatcccagcaatttgggaggccaaggcgggcagatcatttgagttcaggagtttgagactagcctggccaacatggtgaaaccctgactctactaaaaatacaaaaattagctgggcatggtgatgtgcacctgtagtcccagatacttgggaggccgaggcaggagaatcgcttgaacctgggaggcggaagttgcagtgagccgagatcgcaccattgcactgcagcctgagcaacaagagtgagactacatcaaaaagaaaaaaaaaagagagaaaaagaaagaaagatagaaagmaagaaatcatagacaacatgaacaaatggaaacacatcccatgctcatggatgggtagagctgatactgcgaaacacatcccatactcatggatgggtagagttgatattgcgagaatgaccatactgccaaaagcaatctacagattcaatgcaatccccatcaaaataccaccattattcttcacagaattaaaaaaataattctaaaattcatgtggaaccaaaaaagagcccatatagccaaagcaagagtaagcaaaaagaacaaatctggaggcatcacactacctgatttcaaactatactataaggccatagtcaccaaaacagcatgttactggtacaaaaataggcatatagaccaatggaacagaatagagaacccagaaataaacccaaatacttacagccaactgatcttcgacaaatcaaacaaaaatataaagtggggaatggacacctttttcaacaaatggtgctgggataattcgctggccacatgtaggagaatgaaactggatcctcatctctcaccttatacaaaaatcaactcaagatggattaaggactttaagatctgaaactataaaaattctagaagattacatgggaaaaccccttctagacattggcttaggcaaggatttcatgaccaagaacccaaaagcaaatacgataaaacaaagataaatagcctggacctaattaaactaaagagcttttgcacagcaaaaggaatagcagagtaaacagacaaccacagagtgggagaaaatcttcacaatctatacatctgacaaaagactaatatccagaatctacaatgaactcaaacaaatcagtaagaaaaagtcccataaaaaagtgggctaaggacatgaatagacaattctcaaaagaaaatatacaaatggccaacaaacatatgaaaaaatgctgaacatcactaatgatcagggaaatgcaaatcaaaaccataatgcgatgccgccttactcctgtaagaatggccataatcaaaaaatcaaaaaacagtagatgctggcgtggatgtggtgatcaggaacacttctacactgctggtgtgaatgtaaactagtacagccgctatggaaaactaccatttgatccagcaattccactactgggtatctacccagaggaaaagaagtcattatttgaaaaagatacttgcacacgcatgtttatagcagcacaattcacaattgcaaagtcatggaaccaaccaaatgcccattaatcaatgattggataaagaaacggtggtgtgwatatatatgtgtgtgtgtgtgtgtgtgtgtatctatatatatctatttatatctacatctatatatctatgtgtgtgtgtgtatctatatatatctacatctatatatctacatctatatctgtatctatgatggaatactatgcagccataaaaaggaatgaattaacagcatttgcagtgacctagatgagactggacactattattctaagtgaagtaactcaggaatggaaaaccaaacattgtatgctctcactgatatgtggaagctaagctatgaggatgcaaaggcctaagaatgatacagtggactttggggacttggggggaagagtaggagggggcgagggatagaagactacaaatatggtacagagtatactgctcaggtgatgggtgcaccaaaatctcacaaatcaccaccaaagaactaactcatgtaaccaaataccacctaataccccaataacttatggaaaaataaataaacttaattaaaaaaaaaagtaagtggagctcactttcagttttatgggataatataggccctattggtaaataccttgcgttgtttgacatagcactgtcaatctaaactttttaccttttaaatttttgctgaggaaccgtccttgggatcccagcctagggatgagcgaaactctcctagtcctttaacagagttagaaacacttgccacttgttgaatctggtaggtgatagtacaggaaagctcctgtgcattctaggaaatatgtttaatgcttgttcagcctcaaaatgccctgatatgcaacatattattattcattgatattgctgaatattcactaaaaacattagttagaaattgggaagagtcacattttttgagtgctttggaatagtttgggttttaaaacagtgaatttctagtgcctgctatttaaagttatgtttgtggcagcatgtctttgtaaaatgttaagtttgctgaatacttggatttgttgctgtaaattcttatcatttgactctaatttggatgccctgttcacaatttgacaaactgtttctatcgtagaatttttaaaagcacagacttagagtcttgctttcagaatttgcttctttctcttttaagattcttaactaatgaagcaatgtggtttgattttctttaaacaggtgatgakgtaaaatctaaagattacattgttgcactacagcaccctgtgaccactracattaagcattccataaaaatgtttgaattaacattggatgcacttatctcatttaacaagcggaccctagtcctgtttccaaatattgacgcaggtaattgaacttgaaaatgaaattatgccacctacttttcccaattttatgtttctattacttcttttaactgccttcctatcttgctcatcttatcattgaagggcactctattctgaaatgcattccaattttcaaaggattaccaattttgctataactcaaaaagtttgtaatgtttttgccaagtccagtagaaacttaataataaaaagtctgtctactgtctactttagtctcatgtttagtactaatattttccctccagtttccaccagttaagaaactgcagaagccaagagacataaatcttagaagttgaagtgaaagatggtcgggcacggtggctcatgcctgtaatcccagcactttgggaggccgaggcaggcagaacacttgaggtcaggagttcgagaccagcctggccaagatggtgaaaccctgtctctgctaaaatacaataattagccagccacagtggtgggcacctgtagtcccagctattcaggaggctgaggcaggagaatcacttgaacctggaaggtggaggttgcagtgagccgagatcatgccactgcacactagtctcagtgacagagtgagactccatctcaaaaaaaaaaaagttgaagtgaaagaatctctagaaaagtagtgattccactatccacagtaaaatagccactaatattttttcttgctttctttcatatttatgttagctataccttaaagtaatcttgagctgaagcagtttaaatctggagtccccagccagtcccaaccggttcatcctcaagcctgccctggctgatcacttgcttaccagtggatggtactatagattttggtactgctgagaccttaggcgagttaatgggggtgtgagatattaatgagaaatgtcagaacatagcctaacactgaagaatttccaaacactggttatctttagctgacaccactcattgttgagttcttaggcttttttttggtaaaggaggcagaacccattctctgcaatgtcaagatatcaccaacttactctgaaagaacccctgtcttagtattcccttgaagaatcttttctgttagggagaacaaagtaggatattagttggaaaaaaatttaagaatacccaacccagattttttccaggtaatgtatcaatatttcaaaaatgttaatatttattcttttctgacctttaaattttttataaatatgtgtaatgtaactatgtatcattctcgttcagcattcattgtcaatgatatattctgtttataatacactttcctggctgtatatactttagaattagaggtattttttttctatgaaagtaaagggtcccaggtatatctaagtcatggctgccacttgcctctaccctccacagggtttttgataagctatacacagggaacaataggaaaataagaatcaaggcatcactttatcattatctggcttagtgccctgttccccagtacaggactccctccggaaaatggattatcgaagccttaagccaaagaggggctttcaactgaatcgaaacctgaatcttggaatagtagtggtgccttctggtgtgccatgtactacagtttgagtatccctaatcaaaaaatctgraatctgaaatgctccaaaatctcaaactttttgagcaccaatatgacgctcaaaggaagcgtttattggagcagttggattttggatgttcagattggggatgctgatctggtaagtattacagaataacaaatatttcaaaatccaaaaaaacttgaaacccaaaatatttctggtcccaaccatgtcgaataagggatgctcaacctgtacaataattacagatgatgctctggcaagactgtatatagagagaagtggccaggccttctccagggaattagaccctgagtccatttacctaccttgcaacacaataaaagttaaaaaaattgagaaccatgcatgcacagctttggttaaatgagtggcacctgcccagtggtaagcatggtgtggtcagacctctgccttctaaccagtcaggttagcaattttcctccctaggtatggggtagttaggagggggtcagttgagaggcaagcagagggacattaaatattgcctccccttcatgtatctttaaatttttattaagtcatgcagttaaaatagaagccacagttatcagaatctatgtgtattttcttggagtttagttcatataaatgggagtgctatcccaccgagttcttgttagtgtaaaggtgagtgtagctgggcagaggctctctcatcagcttggtgtgtggagcctgasagggttccatttgggaactctcaggttaagagatacaggctgttggcctgtctttagcctcttaattgttgtttaaggtaaaggcttttactagggcattgataaaagttatttgctttgcctagttctgtttgaaaagtcccaactgctgctttttgagttcctagatgagtgaagcagaggacattttagatatccatcattcatgaaaaagccagtagttaaaattactatttccctaataactgatgtgaggtttttttagggagatttctttacgtgggctatacttgccaatgaaaatggtttctttatctcacaaaccatttaccaattggttcttttcattttcatagggagcaaagagatggttckagtgatgcggaagaagggcattgagcatcatcccaactttcgtgcagttaaacacgtcccatttgaccagtttatacagttggttgcccatgctggctgtatgattgggaacagcagctgwggggttcgagaagttggagcttttggaacacctgtgatcaacctgggaacacgtcagattggaagagaaacaggtatttacctttgctcatacttcaactgactaggctttatacatacgtgagttgttataaggtatgcatatatcagtactgagcatatattttgtgaacaagtgagtgaatgaggttaataaccagttgaagcctaaaatctatagtcgataaatagcacacagtgattaccaaatattttagatctctacttacattttattgtctttgtaatatcaattagcactaagtggttctttcttttttktttttgagatggagtctcgctctgtcgcccaggctggggtgcagtagcgtgatctcggctcactgcaagctccgcctcccaggttcacgccattctcctgcctcaggctcccaagtagctgggactacaggcgtcagccaccaagcccggctaattttttgtattttttagtagagacggggtttcactttgttagccaggatggtctcaatctcctgacctcgtgatccgcccacctcggcctcccaaagtgctgggattacaggcgtgagccaccgcgcccagcctaagtggtttttaattatggtctttcatggctgtgtttaagagagaatgtggttgaatgtttcatgaatatatgaatgctagtcttttattttctgggcctaatgtagaatcccttcagtcagtactttagagtatggtagttctaagtaaagtgccccttaagtataagtaggattattattaatgaatttgctaactgagctaggtcctgttattaacattagttcaagttctaatcctgtttacatgcagtggaatttaatggaagctgtaatggaaaagtgtgtatcattaaaggaaaaagaactggactagaaccaaggagatgagttctagctctgctctttctccagttcttcataattgccacctttctgttatatttagatcttcttcccttctcattcccagcatattactttactccccacttcatagagaaaatggaagccatgagatggaaattctttcaaattcctcaattcatttatttagaaaatatttagtaaacacctaccatgtactaggcactgggatttggcaataaactagaccaagaagagctgggctctcgtgtaacttacattctagtgggagaggagatagatgatagacatacacaaaagaaataagaaaaatatcaggaattctatatgctgtgcctgctgtaacacaaggtatatgatggactccattagattggttaaaggaaggcctctttaaggagatgacacctaagctgaaatctgaatgacaaggagtcagctatgtgaggatcagggagaggcagtggcaacagccagtgtgagggccgggaggtgaacttggtgtatttgagaaatggaagcgctattgtggctgtagagtagtgagcaagaggcagagtgatacaggtgatgttagagaaggaaacagatgcatgtaagccagggtaagtcatttggaattttttctaagtgtaatgggarggaatgacatgacaagagttgcattttggaaagatcactccggttgctaatatacagaatggaatgtcggkrgggggggcggggsggcaagaataaaagcagggagaccagtaagggggctgattcagttgctcagatgagagatgatagtggctttgatgaagtattagagatggaaaaaagttagatttgggtcttgttatagtacttgctgatgcttggatgcggaggtgaaaggaatcaacaaggaagcctagatttctgattgggcagtgatatgctgggaatgagaagggaagaagatgtaaatataacagaaaggtggcaattatgaagaattggagaaagagcagagctagaactaatctccttggttctagtccagttctttttcctttaatgatacacacttttccattacagcctagatttctgattgggcagcgatatggggacactgagggaggaacagatttggggagggattgaattaagagttctcttatagctatgtgaagtttgagatgcctattagatatcaaagcagacatggctagtaaacagctagatagttccaggaagagttagagttggagatagaaatttgagagtcattggtatagagatgatgcataattggttgtcagtttggctgctataacagagaccctaaataatagtggctgaaataagttaaatgttctttctttctcagtggatggcagctccacaatcatcagacttagcccccatctattttcttagtggttgctctagctattgcttgcaagtctctgttttagcctttggaagaaggaaaagagaagatgcctttcactttaaaggcaagacctgaaagttgcaaatctttcttctcacatccatcagaacttagtcacatggccacatctggctgcaaggcaagctgargaatatagtcttttttgtttgtttgtttgttttgtttttgtctgaaatgatactgttctgttgctcaggctggagtgcagtggtgtattcatagctcatcgtaaccttgaattcctgggctcaagttatcctctcactttagcctcctcagccatgcctggctaatgtttttacaaaatgttttgtagagacagggtcttgctttgttgtccaggcttgtcttaaactcctggtctcaagtgatccttcctaccttggcctcacaaagtcctggaattatggatgtgagccattgtgcccagtctgtgttttgtttgttttctttccttctttcttttccttccttccttctttctttgtctttctttctttctctttctctctctctctttctttcttttttttttttttttttagtgaagcagtgctgggggaggaggaactggttgtgatcaattagttgtaaacaccagccagaatataatctttggctggggatcagatgcctggctaaaaattctgtttctagtatgaagaaaagatattgaagataatggcaccagccatagatagtatttaaaacccaggccaggtgtggtggctcaacacctataatcccagtgctttgggaggccaaggtgggatgattgcttgaggctgggagttcgaccctagcttgggtcaagatagtgatattttatctctgcaaaaaaattttagcgtgaacccaggaggcggaacttgcagtgagccaagatcgcgccactgcactccagcctgggcaacagagcgagactccgtctcaaaaaaaaaaaaaaaaagatagtgatattttctctctacaaaaaaattttaaaattaggtggacctggtagcatgcgcctgtggtcctagttactcaggaggctgaggcgggaggatcacttgagcccaggagtttgttacagtgagctatgatcgtgccactacactccagccagggtgacagagcaagactccgtctcaaaaaaaaaaagacttgtaaatagggcagagaatggagcccaggaccaacctctggagcccttcaatctttagagttctggtgaagagggaagggccagcaaggaagactgaagaggaacaccagtgaggttggagggaaacaaggagagtgtgctatctataaagcccccaaaataaaatgttttaaggatggggtggtggatactgctgagttcatttaagatgtgaaaggacagccatgcacagtggctcacgcctgtaatcctagcactttgggaggccaaggcaggtggatcacttgaggtcaggagttcaagccagcctggctaacatggtgaaacgccatctctaaaaatacaaaaattagccaagcgtggtggtacacgcctgcaatcccagctactcaggaggctgaggcaggagaatcgtttgaacctgggaggtagaggttgcagtgagctgagattgtgccactgcacttcagcctgggcaacagagcaagactttgtctcaaaaaaaaaaaagtgaaaggagaattgaaccatatgccaacatggtctctgtactttttgccactacacttaaataaacgtatataaatgtgcatgcccatccatcctttccttcttaccttttttatagcagggtgtgggcatgggtgtgggtgtgggtgtctctcctgcctgtctactgcccatccttctacctgtgttttcaatcccaaccactcctgccttctcagggacctatccatgagtgatcttttctcatccttctttatttaacctcctcatcatttaaacatgcctaagcctctcacatcttaaaaacaaacaacacaaaacaactcctttcttgaccccacacctctctccagmtgttactcgtccactcttctcttcttagccaaacccattgaacagtgtggccattttcgctagatttactccctcatattggtcaggaaatgtctggagggaaagtgactgcctgaccagccaagtgaaccactggctgagtagatggaaggcagggcaggttgaaagagagtgaatctcatagatgactaggcaaatggtaagtggatgccaggttggtctaccttatttattttaataaacaaaaacttgatttgttctccttgggaataaaggaccctagggcccttaagtgtttgatgtactgaaatcttgccaagagtactttaaaaggtataragtagaaaagttgaattttccctaacaaaagacttaacctgaagtcagctggatttcaggtctaattatgagcatagtacactgataatttctttattctttggatattcccacttccaaatccttgtaatgtgtcactggttttacctaggggagaatgttcttcatgtccgggatgctgacacccaagacaaaatattgcaagcactgcaccttcagtttggtaaacagtacccttggtgagtataaaacattctttgttgagtgatttaaaaggggagctaccttcagtaccattttaaagctacaatcactgtttaatcatcctaacagagctttccttcttatgcctacgggcccctagttgctggggagacagggattgctaatatcatacccattattactgttccaaaggttccaatgtagaatacatattttatttcttttttttttttttttttttgagatggactcttgatctgttgcccaggatagagtgcagtggcgccatctcagctcactgcaacctccgcctcctgggttcaagcaattctcctgtctcagcctcccaagtagctgggattacaggtgcgcaccaccacgcctggctaatttttgtatttttagtagagatggggtttcaccatgttgggcaagctggtctcaaaactcctgacctcaggtgatccgcctgcctcagcctcccaaagcgctgggattacaggtgtgagtcactgcgcccagccttattttatttgtttctcttaattaatacaacacttttgctacacttatttaaccttctttggctttctataaatattagaaaataatgtaactgattttttttaaaaagtctagttcagctttttaattaattttgaccaccctcctttctgtttcaaatcgatgagatttccctgtatttgaatatttctttctgaaaataattttgttttctcagaaatataaagataaaaactaaaaaaagcaaaaaaatacaggcacttagttacaatgttgctgaagagatctagatattattttatataaaatttttttagttctgtataattatgatttatagtttttaacttttaattgacagataaaattgtatgtatttattgtgtacaacatgatgttctgaagtatgtatatcttgtggagatgttattttatttcttttttgttattgttggttgtttttttttttttttttttgagacggagtcttgctctgtcatccaggctggagtgcagtggtgcgatctcgactcactgcaacctccgcttccsgggttcaagcagttctcctgcctcaacctcctgagtagctgggattacaggcacccacaacgcctggctaatttttgtgtttttagtagagatggggtttcaccgtgttggccaggctgatcttgaactcctgacttcaggtgatccgccagcctcgacctcccaaagtgctaggattacaggtatgagccactgcacccagcctatttatttctttaaacatgatttttaaaattactttttgtagagatagagttgctatgtctgtgttgcccaggctggtctcaaactcttgggctcaagcaatcttcctgcctcagccccccaaagtgctgggattacaggtgtgagccactgtgcacggcaggaagatgtcactttaggaagaagcatgaattatttttacctgaagtctcagtttccattacattataccctcactaccacttaacatgtatggcagaagcatataatttaattgactttttgtatattgcagttcaaagatatatggggatggaaatgctgttccaaggattttgaagtttctcaaatctatckatcttcaagagccactgcaaaagaaattctgctttcctcctgtgaaggagaatatctctcaagatattgaccatattcttgaaactctaagtgccttggccgttgatcttggcgggacgaacctccgagttgcartagtcagcatgaaggtaaaataactcctaaactcctaactytatatcccatatgagcrattgattttttttttaagtatatatagttggaaggtaagactagaaacatacacaagagcttgtaatcatttgctgatagtattgacttgtggatcctttacaatgtttgtctcactattttactgatcattaacatttcaaagaagtaaattctttgggaatccaagacggtagacttgacagtgggaagacccctttaggcatcagatcgggcttttgccacccaaaagacctgaaattctatacttggtaacagcttggagtgtggagtatgctgattactatcactgcccaggtgaggggtatcagcaaatggtgaagggagctgcctcttctctagaatgtgatcagttgtgtggattttccattttgcatttttacagttctgctctttattgagtacagcataccttcaatctgttaaccaaaccatcacccagtgttgacaggtgagagaacattcataaaaataacaaactgttcatgttaaagtgatctctaatgacttagaataaacctactagaaaaatcttggtttgaaatagtgtgagtgtataaagcttccagagacgatgagaaatagcaaagattttaaatgtaaagttgtaggaaatttattaataccattaggtcaaataaggaaagcaaaacaaaacataattttctcaagaaaagccaagaggcctcccttataaatactcttttaaaaactaatagaaggctggatgcagtggcttacgcctgtaatcccagcactttgggaagtccaggtgggcagatcacttaaggtcaggagtttcagaccagcttggacaacatggtgaaaccctgtttctactaaaaatacaaaaaaaaaaaaaaaattagctgggcatggtggcaggcacctgtaatcccagctacttgggaggctgaggcaggagaatcgcttgaacccaggaggtggagattacagtgagccaagatcgcaccactgcactccagcctgggcaacagagtgagactccatctcaaaaaacaaaacaaaaactaatagaagaatagtttcttaacagaaagatgatttattccatatgaaaggccaacatctttttcaatggtgaaattctagaggcattcccattgaaatcaagaagaaaagaaagatgttttgtgcagcattatctcacataattttggaagttatgagggaataaaggaaggaatagcaaaaatggagattattgatagggtaaaacaaaaaacattattaatagacaaaaaaatgcttggctcccaccctggactggttaaattagagtctctggggatgggggccaggcatcgctcttcgttaaaagctgtccaggtgattctgatgcacagcgaagattgagaagcactactctagattttttattctcttaatttaaaaaaatttttttttagagacaaggtcttcctatgtttcccagactggactcaaggtcctgggcttaaatggtcctctgcctcagcctcccaagtataatagctaggaccacaggcacatgccactgtgcccagctctagatgtatttttgttttttgagactgagtcttgctctgtcgcccaggctggagtgcagtggcgtgatctcggctcactgcaacctctgcctcccgggctcaagtgatttttgtgcttcagcctcctgagtagatgggactacaggcttatgccagcatgcctggctaatttttgtattttttgtagagacagtggttcaccatgttgcccaggctggtcttgaactcctgggctcaagggatctgccagcctcgacctcccaaagtgctgggattacaggtgtgagcgaccgtgcctgacctagatttatttttaatgacaatcctagtgacagctctaaccctatatttgagatataaaaatccactaataacaaaataatataaatggaaagagagatcttattcagaacaacaacaaaaactcctaagaataactgaaaccaggaacgatgtaatctatataaagaaaattctaaaactttactgtaagacataaagtcttgaaaaaaatgccctggatggaagtgctgattatttttaagatgtcagtgttttcccaatttgatttataagatcaacataatctagtaaatatttcaatggtatttgttttacatttagtaaaattattgtaaatcacagtggaatttctcaaagtttaacattaaaagtacaaaagtcagttgtgcaaagaaaaaagataaagacaagtaatcaggagggactatccctgtttggtattaaaacatatcaaaaagcacagtaatgtgttttatttttttgagacagggtttcactctgtcgcccagactggagtgcagtggtatgatctcggcttactgcaacctctgcttcctgggttcaagcgattctccagcctcagcctctcaagtagctgagactacaggcgtgtgccaccacgcccagctaatttttgtattttttatagagatgggatttcctcttattgcgcaggctggtcttgaactcctgaggtcaaagtgatctacctgcctcggcctctcaaagtgctgggattacaggcgtgagccaccacggccggccatataataatttaaacaatgtggtatttctgccagccaggatggaaatttaccctaaggaaatagagtatccagaccatcactgaattcagttacaggagatgattaaagctcagctacttagttgcctcagtgtttttttgtttttgtttttgagaaagggtctcactctgttgcccaggctggagtgcagtggcgtgatctcagctcaccgcagcctgaacttcccaggctcaagaaatcctcccagcttagcctcccaagtagttgggactacaggcatgtgccaacatgcctggctaattttttgtagagaggaggtctcactgtacctcccaggctggttttaaactcctgggcccaagcgattctcccgccttggcctcccaaagtgccgggattacaggcgtgagccactatgcccggtcacctcagtaagcaagaaagttttgtcaacctgaaagagtaaactatggtcttttaatgaactaggctcaaattagcgaacattgaacttaagcttaagaaaggggcccggccgggggcagtggctcacgcctgtaatcccagcactttgggaggccgaggcaggcggattgcttgaggtcaggagtttgagaccagcctgggcagcatggtgaaaccccatctctactaaaaatacaaaaattagccgggcgtggtggcaggcacctgtaatcccagctacctgggaagctgaggaaggagaatcgcctgaacctgggaggtggaggttgcagtgagctgagatcgcgccatagcgctccagcctgggcaacagagcgagaggccatctcaaaaaaaaaaaaaagagaggggcccatcttgctgcctgtggagttgtcattgcttcaacagccccatattaggacagattacaggaactacttgagcttaccccagggctggyccagaccaggcagtgggtccttccccaagcagtcatctaagactgcggggccatcctatagcagtgtctaatttgtcatgaaaaagatcacaacactcacaatatgctgcttagctaagaccagtaagacggaacttgttgttttctcttttagggtgaaatagttaagaagtatactcagttcaatcctaaaacctatgaagagaggattaatttaatcctacagatgtgtgtggaagctgcagcagaagctgtaaaactgaactgcagaattttgggagtaggtaagattgtaaattataaatccaagaaatgctcattttaatgtacaaaatttactaacttgtgatgcatgcctgagcatcaagtcagtgtctgccctgtgcatagatggctctaggtgctgtctgtgggccccaagcatggggacttcctgggacaccaacaagcattaggagagaagcactgacagttctagaaatctttaaggtgctatggctttaattcacaactgtctaatatttccttgcagtccttggtaacgtttgtcttaggagatctggggtgaatgaatctgtgttcttaagacaagaaagtcagcatactttcctgagattgctcatcagcattatttccttgtgtttgtggtggagcgcaggcatttccacaggtggccgtgtaaatcctcgggaaggaattgtgctgcattcaaccaaactgatccaagagtggaactctgtggaccttaggacccccctttctgacactttgcatctccctgtgtgggtagacaatgatggcaactgtgctgccctggcggaaaggaaatktggccaaggaaagggactggaaaactttgttacacttatcacaggcacaggtaagaggggtagggggaggttggttcaggagctagaatgtatattggagcatgtcttcaacatggtcaggtggttacaactctgccttagccttcacttcctgcatgactagagccygaaggtsagccacatgtggccttttctgagcatgtgcccagccttagacatgcctgtggccttctaaattccaggaacttgtcagagctattcaaagctcttatttcccagagcttctyatttcccagcttttcctcccagtctttttggttagtgtgttggatgccccagctgttatcctttgccctagacagcacagactaatacattttaccttgaaatgtttttttttttttttttgagacggagtctcgctctgtcgcccaggctggagtgcagtggcgggatctcggctcactgcaagctccgcctcctgggttcacgccattctcctgcctcagcctcccaagtagctgggactacaggygcccgccactacgcccggctaattttttgtattttttagtagagacggggtttcaccgttttagccgggatggtctcgatctcctgacctcgtgatccrcccgcctcggcctcccaaagtgctgggattacaggcgtgagccaccgcgcccggccgaaatgtttttgataaacatccttcatgtaaccccctcagcactaggatagttcctagttagttaagatgaaagcaggccctttgaggtggtcctccagggaggtgacaggcaggtcaaaacaaacaaccacaattttttgaaaataagttcgtcctgccccgtcaggtactggtatccagtactgtttctgtacaccagtactgggagtgtggactgttgttcaaggtcaccaccaagctggagagtgggtgatgggaccagggtaggttacaacaccagaaagttctcttatcaagattcagctggttttgttttgtttttagacagggtctcaccatgttgcccaggctggtcttaaactgctgggctcgagggatcctcctgccttggtctcccaaagtgctgggattacaggcatgacccactgcacctggccctggtttttgtttttcttttttaaattaagcattcctctgtttgttgcaaactttggttagtttccagagttccaaaaaggttgattctgacatttttaccagttttttcctcactttagtggcagaatggacctttggagttccctgctctgtcatttttttatgacatcccaatttgttacttttgtttttttactctattttatttttgttgtatatattttaagtgtataacttgatttttaaatgaggaaacagacttagctaataagcggttaagccagcatctgatacagatatgtctaacttcaaaacttgtatgtgcttaaactctacattacaccactatccctttaagctcatgtacttatttatttatttatttaaagagtgagtctcactctgtcacccaggctggagtgcagtcgcacaatctcagctcactgcctcccagattcaagtgattcccctgcctcagcctcccaaatggctgagattacaggaatgtgccaccacacccggctaatttctgtatttttagtagagacaaggtttcaccatgttggtcaggctggtcttgaacttctggcttcaggtgatctgcccgcctcagcctcccaaagtgctgggattacaggggtgagccaccacacccagcctaagctcatgtactttagctcatgctcatcctcttttagttccagacacagttttagcaaacttggataccatttcctggctcagagcagtgactaagctgtaaatcagagggctaggggttgaggaataagtgcccaagaagtgacagatggcaagacaacccttaaaagcagagccttctcaggcacaataccctttactcctttgtaactgctaaacgccataacaaaagacagtcactgatatttataattattgaatcacagatttttagacatggcagcatcaaaaaaggcaaaatcattatttcatattttctgcttcaggaagcaggtagtgtgtgatacattttaaaagacttatcttgggtattcctcagagcagagcctgagacaaggatttaggtacaggtatggttttttggaggtgaccacaagaagcaggagggtgagtgggaagaatgaaacagagcaggaagaaagccattaaggatatattaacattattgaagttgacttgagggcaaagggggctgaactccactagcacctcctaagaagcctgcagaacagcatccagaattgtcctgtggatctgcyggctcctgccttgcctcggttgcaggttgcccctgggtgctgtgcctgcgtggctgagtaggctcttgcttcagtgttagagaaagccttggtgcagaaagatggacagtgtgtgctgggccagggggtctgctacccacaaggtgggcatgcatttttgctgcactgtccccacagctgtgtttgaaatcacagtgacccaagcagatgggtcacagggcatcagaggatctgctaaaaacatttccatccaaaatgctgccagagaatgctttgatgcctagtgggcttcagctgtctaragaagtatctatagaccctcacatgccaaagctctgctaaatagatgaggcgttgtgatatcatagttttctgtttcaggtaaagcaccctcagtgatttctatccctcgctgtaggaatcggtggtggaattatccatcagcatgaattgatccacggaagctccttctgtgctgcagaactgggccaccttgttstgtctctggatgrgcctgattgttcctgtggaagccatgggtgcaytgaagcatacgcctctggaatggccttgcagagggaggcaaaaaagctccatgatggttggtgtccctctctcgaggaattaagtaaccaaatagtagacaagtacttcaaagtggaaattccaaagacagctgaacactgaagccagaagtttcccccttttcacttcttagggaaagagcagggctccctcgcactaaaactgcacagtcttcttggctgacccatattgccactcttcctccccaggggtggtggtggacagaggtctagagttccaagacagcagggaagatttccttcagttttgttttctcagccagtatcacagggagggtacttaatacacattttaatgaagaaataaatggacaaaacatgttatgtatatatcacacatacatgcactgtatgtgtagtatatctgtgcttcatacataaaaacagtgtagatttttggcccccaaaaccaatttgtgagcatatgctgaaggaaaagagatggggagtggaggccgagagtgcaggagagaagtgtatagagccctacagtagggttctgaagaggtgggaagagatgagctgcaaagccaggcagagggtccacgagagggcatggcgagccgagatgatgggtgtatgggacaggaagcaaaaaggtaggggatcactgcctggtggtgccccctatgagagaggtaagaagtatgctcgtctgttggcagtgggggtagaagractgggaaggtggtgaaggtatagaaaagcgcagtcagagagaatgggtgagagctgtgagggcccaggggagacaggagaccaccagttgatgtctaggttgcagtttgcacagctggggatttttctccttcagggtccagatattctagcagattagtaggaggcagattgatctgagttggtgacgggcagaagacaaggactacagataaccacagaaatacctgctgcttactgagcatttactgtggccagcacttaactaaatactttatgtccatgatctcattcygttcctcaaataaccctgccaggggaggcactactggtctcatcttctaggaaggaggaatgtgtacaggtgaggtgacaggcatggggtcatgcagctgggagtggcagagctggcactgaccccaggcctgtgtctgttcctcagccactgtgcctcgctgccatagaacgcgtggcgctggcagatggcacagcattgtgtctgggatgagtaaggaaggagtgaatgtgggaggagggtgataatttggagaaaagaacacttcaaagactgtctgctactggaagtgagaagtgagggagccagaggggtaggaggctgtcgtcagacttgaggtttttccaggaagataggttctgggttatgtacaaccaattagcaagagggtagcaaaggctttaggggcagtgtatagagatgtttgtgaacgataagctttgcaattgtgaaaagaaaacaccgtcttcccatgtagggscttgctttccacaggcccagtggtgagcttggcctccccacagctcattagtgactgcttttccttctcactctgttcagaggacctgctcttggtggaagggatgtcagtgccaaaagatgaggctgtgggtgcgctccatctcatccaagctrygaaacttggcaatgcgaaggcccagagcatcctaagaacaggtgagcatgtggctgcaggtggctgtgctgcagggggtggcctcagatatcatatggcccagcccggccccagaagagaccctgcttccctagggacaggtgctttgcagtgtctgttcagaggtttctttcctaattactcagaggtaaaaagggaattgsattcaaggtatttggcagcattgcctttttcagcaggtggttggtttggtttgacaactataaaaatgctcctttcattttacaggaaatttagagaaatataggacagttgtaagaaaaaatatcacttagttttcccatttggaggtatcaactattaacatttccttcgagtctttctattcatttttttgcctagtggagatcatgtggtacaccyggctttttccacttgaggctgtcacatgatcattttctcatattaagaatcaaccgtgaactgcttttaaaacactgcctcccactgcatgccgtggatgttctttaacatttctgctgctggctcttttctgccttcctctttggtattttgattttggcttctctcagaaactcattttaatttttgtctccctatagctggaacagctttgggtcttggggttgtgaacatcctccataccatgaatccctcccttgtgatcctctccggagtcctggccagtcactatatccacattgtcaaagacgtcattcgccagcaggccttgtcctccgtgcaggacgtggatrtggtggtttcggatttggttgaccccgccctgctgggtgctgccagcayggttctggactacacaacacgcaggatctactagacctccaggaacagacatggaccttctctccagagctcctgagtggaatcaagttcttgtctttaggatgaccgtttcttaacaatcaaatctggtattgaactgcaggtgactttggcagagaaatgttttcacttttggtctcctcttccagagtcacctttccccactcctatttttgtagatgctattctttctgatgtcttcttactaggggtcattttagctcaaaccctgtaagttacagtcacaattttctgtgccaaagcagctacaataatagagaggaagccttcttagaactctgcttactaatgtattaataccactgagaccttcaggccttgcctgggatatcacttcatcctgaagtttgcattaataatccttccaggccgggcacagtggctcacgcctgtaatcccagcactttgggaggccgaggcgggcggatcacgaggtcaggagatcgagaccgccctggctaacatggtgaaacatggtgaaaccccgtctctactaaaaatacaaaaaattagctgggtgtggtggcgggtcccagctactcgggaggctgaggcaggagaatggcatgaaccagggaggcggagctggcagtgaactgagaccgcaccactgcactccagcctgggtgacagagcaagactccatctcaaaaawaataataatawataataataataataataataataataataatccttccagctgggcgcagtggctcacgcctgtaatcccaacattttgggaggccgagatgggcggatcacctgaggtcaggagttcaagaccagcctggccaacatggtgaaaccccatctctactaaaatacaaaaattagccgggcgtggtggcatgtgcctgtagtcccagctactcgggaggctgaggcaggagaattgcttgaacccgggaggcggaggttgcagtgagccgagatcatgccactgcactccaccctgggtgacagagcgagactccgtctacacacacacacacacacacacacacatccttcctcctctaaccccaaactaagatcacagaaggtgatccagtcagagaacagagggaaatcttaccaggaagggcttaagtacacttttttttaaaacagctttattgtttttaaagcctacaatttgataagccttgacatatgtatacctgtgaaagcatcaccacaatcaagacactggacatatctatcactcccccatctcagatatcccccctaatcctggataccatttgttgaaagatgttattactctagctgaacttacaagagactttagaccagggatctaaattacagtggccttagtgaccttgtccttatcttcttaggacagctgagaagccactgggacttagagcctttaaaaggagattaactgtcccaaaaggatctttgctactgaccagcagacacttcttccttcagtagcctttcatactgtgttgagtaacaccctagggtgtccattaaagttttgagttttacctagagcccagagccatgaatcaggattctgtctacatgattcgtgttttcattggtgtcaaaatacaaaagccaaagttctggctatgaattgttaacttggaagaaatactaactgccaccacttattaagtgcctactgtgtgccaggctctgaactaggtgcttcatatacattatcctaaattatctcaacatatgaggtaggtgttttaatttttattttatagaacttggtgtgtttgactrttaagctatggggctagagagagggtttgatcccaggtccctctstgcttttgctgctgagccacacaacctctcatttcaaaaacactttcaaaatgctaacatattctaattcactctaggccaccaaaaactttaatactaatatctgatttgtaaatgacttaatgtatccttgaccctatcagctgaatttaatgaaatattcctctctgctgtgaaattttaccagtatagtatttggtctagtgacaggtgttctatttttttgagacgggtctcactctgtcacccaggctggagtgcagtggctcaatgcaacctctgccccccaagttcaagtgattctcctgcctcagcctcttgagtagctgsgattacaggcacatgcaccacgcccggctgatttttttttgtatttttagtagacagggtttcaccatgttggccaggctggtcttgaactcctgacctcaggtgatccgcccgcctctgcctcccaaagtgctgggattacaggtgtaagccatcacacctggccctagtgacaggtttttatgggtacttttagatgatctaagaaatcatgtgcatatatctttcagatttytattttgggaaaatgaaggtttctacaacatattgtttcagtgttcaaataaactgaaggactcaacattacatttgaactatatccttcctagtgggttagtgtgaaaaagagtttggctgattcctaaaactctgccagccctgcagtaatctccagggcctggttattgttcagacattccatggtgattcctgggaaggaagcttggctgctcagtttctgagtctggggtgagataatgttctgggaagggacatctgttctttggtgtaatctctcatggtgaaatctgctctgtacatcagacaattgcattgctaccaagtttcataccaaatatttgaaaggatggtattgaatctaaaaccaaatattagtttttattaaactcatgggaaggctaatatattccaacgtaaattattacatatggttaagtaattgcatgttaatttattttaatgtaaatatttttgttactgttctgagccaaattctaaagaaaaaataaatacatttccttgttgaaatcctgttgtattttgttttgttcgtaactcattagccaaaagcattttccttcccagaagagatttaattgttgcactgcttacgttttgaaggttatataacttccttaaggcctctaatatcattgctttcttaaccaaaaaaagtctattaatagaaagcatggctgggcatggtgcctcatgcctgtaatcccagcactttgggaggctgaggcagaaagattgcttgaaccctagagttcgagaccagcctgggcaacatgccaaaaccccatctctacaaaacaatacaaaaaaaattagccaggcatggtgcagtctcagctactcaggaggctgaggtgggaggatcacctgagcccgggaagtggaggctgcagtaagttagttatgatcatgccattgcactctagcctgggcgacacagtgagaccctgtctcaaaaacaacaaaaacaaaacattgctatatataacattgaaaatttggcataaaaaagcaaagtagcccccaagaaagaggtttgaaactaagtgttaagcatttactgagtccctagacccactccctctttttatgaggccccatgtgggtctcatacaggcattagaaacaatcccaaattactattgctgtgtaacctcaaaactgaagagcttaaaacaacagtaattgtttcacgtcgtggtttctgtgggtcaggatttgggaaaggctcaaacttgacagttgtagctcaagagtatcctgcacttgtagttgtcagctggaatagcacgaggctggctggccaggcatctcccaatgtgtgtggttacagggtctctcaggtggcctctctgtgggctagtttgggcttcctcaccacatgggtagcttcaaaggtagaattttttatgaggcggctcagggccaccagctagttgctccaacaaatcaaccatcagcagcactgccttttatgacctagccttggaagtcatcccagcatcacttttgtcacattattcagtcacctctccatctagagaatgtcacagattttgttgacatttaaaattgccacctcccacctcaagaagcccagctggtgtgggaggcaagactggtccagacgatggcaccaagactaccaaaaataagctgccccaggtagatggccatgggagttcaggggaaggggggtggcctttgaactagttcttaaattggattttgacatttggaatgggattagcaggtcccgtaggaacaaaagtctgggaacaatgattgcttgattgtaataagatttgactaaagggggaggaataagcagaggccagaaatgtgggccaggtcaaggaaagcccaactaagcttggaaacggggaggtagcaggaaaagtaatgaaagctccttccagccaaaaataattaacattgaagagatagtggcctttccttcttggcaatggcaacacctaacccccatcctgagcatagtattacagtttacctcaatctccagtttggaagtaccaggtagttataagcagattactgaaatatagctttaataattgcttggaacatcacctaaaacgagccaggtactatgccaggttctgaagacagataatgaacttactggtgtctgaacaaagcacgggctcctggaaacacctgtggtagatcagcatggtccagtgcagctttctgcgaccatggacatgttctataacctgtgctatccgagtgccacctaaccacatatggctactgagcacatgaattgtgactaggactagaaatgtattttaaattcatttaaatagccacatgggcctggtgaatactgcactggacagcacaggtctagatgaaggattttacaagagaaatatgaaccaagtgcttgggatggcacagaacccaacatgtgctacaggactcaacagtaatggggctagccacacatgaatgccgtcctgactcaggcttactggccggatccaaaggagtcaaggtcttactagagtctacgtgccccacagactcctgccgaaatatactatccaagaccctaaactgagggacactggcaagcaagagcccatctgggagaaaacgactaggttggtgagaggattcacagctgtgtcttaggtagataatgagggggttaaccttcagccactaaactcccttctcaaatgaaaatgtccacaggatcccactctagatcccggtgctatcttagttcaaggcagggctgtgtgcccagtggctgtgcctcctcagccctagaaatttcaaggaaattcctcctggaaattccttccaacctcactccaaactacaacacatcttgaggtcaataaagaagcttcacataatacagtttgaaacagaaatttattctcagaataatgcacagaagcacargttgaggctactcttgggaagcttccctccccttcctcttcctcctctccctcctctctgaatgccagggagaacacagttgaaggaaggaaacrtgcaatcacaaacaatgaacaactctaaagrcaaaaargtttggtccaaaagaactcaacataattaatccaatgactgtgaagarcttcactgagtaggrttaagatattgcagatgtagtgtttccacwgggtggctcttcagtgcaccagcggggcctgcttgagggagatgaggactgagcgcatgcgggagacatctttggcctgcttgctagacttggggttaaagtcacacagccgggccacccgttcccactcagtgcctggggacgactcgtcaaygtcatttacaaaggcttcttctgctgccctggaagcaacaacaaaatatgttggtttatgcagaaccccctttgagcaacctggtggctgccttgctacacaagcaactgcctatttgtccctttcttaatgacattctggctttcccaagataacagcccctggcccaggtcagactcaggtagacacgtagctggctctcctaggcacagggtgcccagaccrctgtgtaaaatgttggaatacaggtgtttggttcaaggctcactatgtctctctgtctgtctctgctcctgtggagcattaataaaacaagtccttagccagctacacactgcttttattaataagaacaaagcagcaggctgatcaagaacttgagtagtttatgctgggctgtactgaatttcaaggaaatttagagacttctaaaaagcccacagatcattgcacaatagcctctagatttattcctaaggctggagagaaacggggcagatcaaaaggaattcaagacaaagctcccatgctagcaagcactagagactaaagccattctggaagggggtttgttaggacattctccagttcagccaaaagtttgccattttccctccagccaggtgccttggggccactcagggcacactggcaggagagccaacgtgagttgctttttggcaggatgctgctccaacattctttcacatcaaggtcagcccacccccagttcggaattaactggtgggagctacagccggaaaggacagcgctaagacacactatattcatctactccaacaagcatyacgggcaaagcaaaagcaatggagatgactggtctgtggggacggaggggtggcactatcacagggatggccgtggcaaacaccgctgaagcccagagccactacaayactgcgacttcatggcacacacagttaggggcagtgagaaaggtttacttaactgttctaggctgtagcaaggatggtttatgtttgtgcttaaaggtgaagagaagaaaagaaacgagagaaactttaagtcagatatagaaaatgagaatgagctcaatgcagatggtcagtaagctggacatgcccttgccactctatctgtgcttggggacgtgcagctggctttgctggccacccagctgcccagcaaaaccagactcgacctttccagtctccatttctactccagagagaatgtgcagaaatcaaatcaaacaccacctgtaagtccagcatttcacaagtctcactgcaaatgcatctgggggcccaggaaacccagttctatcttctaaggggatgaacatctcaaggtcataggccctgagaggctctacagacctgagctcatcgcccaccttccacaggttcctctcctcttccattccacccttacttctcatgtaaagccagccctaatttttaaggaggagacaatgagaactgtttccaactcttcagcaatactgctttgataaaagaaatccttaaaaaaaagaaaaaagaaaaaaagaaaaaaaaaagaataagaaaaacaccttctccagagaagatgcaggtttcttttgggggggtcagggggagaagcccaagtggcccgtatcaagacactttgactatcctgatctcaaagctgggggcttccctgtgctaggagacaggacatcagaagctgaccactaaatagcaatttctgacatgcaagaccacagaggaacaattatagacacccactggagacaaccccctctgctctggactcttctgcctgagggagaggcaaacgaccccacattgtttgaatgaaccaagtatggaaaatgctgccccacagctctgattttggcaatgcaaggtgctgctgctcactggctcctaacctcctgggactgccacctgctcccaggtggggaaacctccttcccacctgaggcaggcaggcaacagggcatggcagcagtgatggcagccaagagcaagagagcagagttcccccgagcctcaaaccgttcccagataagatcgcaaatgacacattttgaaagcgagttagctttcttccctccaaaaccccaaatatgaaaaatggccatcagaggatgcagggagtcacaaatctggaagattcatcaacagatcataccccgcttatcaattcttaggcagcccccaaagtgccaatttgaaataatttaaaaagcaaagcaacttgtgacataaaaggagcattaactctaaacaaaagtagaaagaatcagatgtagaaaaaggaattagttttgcaacatacacataaccaatcacgtcagcgaagggttgtttgtagaaagcttcatctgccaccctagacagcaagaggtccaaaaggcaggcaagcaggcaggaaaaaagagagaacattgagaagcagaaacatctaaaatccacaattgaggtacaactgtgctctgaggagctgctcccaaggctccttcctaacccccgtgaggcttccagcgctggagacttcagcaggcctggtttcccgctggccttcccacgtggggactgctccacgacagagcaagcactgccaacttcatccctttggctcaccccagcaacacgggcatttattaagcacccaatcatggactaagccctttcacatacattatgttgattcaatccttaactgttaacaacctatgaccctgactgttctcacccccactgtacagatgaggtaactgaggcttagagatgaacaacttgctcagctacaccacagtggcagcattcaggactcacaaccaaggcagcctggccctaagtccagggctctttctactgtatagtcatgcttcttccctgctgtatgtgcccagaaagccacgccaccttcctgtttcagttaatgcactgggcaggaatgctgccagacaccagatgcgctaggacccaaagccagttttatcttggattatctaactactgcttccccacactgtctgggtgggatacacttccagaatcctgggaacacatatcgtcattttaaaatctcaaccttacaggaaaaaacggctggaggtgagtggtctggtgggaagaacactggactaggatcctggccctggcttctgttgttcctgaatatggctctctctctactcaagaagcgggtacagtttc

SEQ ID NO: 95510 - DNA, 14402 bp, Homo sapiens
tccttattcatgttatggaacctcagggttatgcctgaatactggctctctcttcctcttgaaggaatgagctcaattgtttaatcaggcaatctacgttctctcagcaaccattttgtgccaggccttgtgctaggatgagagatacgggtgaaaagacagctcccttgaagaactcatggactaataggaatacaagggaatgatctattataatgcagtgtactgcaacaggagtagcacaaggagctatggatggcaataggaggggcccagacagacaggggaagtcagggacacctttttggtggaggtgacatttcagttgagcctttaattgggactaagaatcctacacctggcagtcccactgcatggggcctcatacaggattcttggctagaagttggggtactctcagttctcatggagaatgagaaaatctgaattggaggtgccatctggttatcctccctcagttgcacagcaccaccctcacctcaagactagtcacgaagccagggattcagacctcactgctgaacaccagctctcgagggttgtgacctcttgctggtgcctactctcagggacacttcttagcctcactttcctttccacgcctccttgcttagcctcaaaatatataatttttggtcttcaccactcatgactgctacctacccctttctcctgacccttgaagaacctttggcagcccttcttaggtacacagagagcattggtacaatagcaccaggaacacagagggaggtattaaggtaccaacgtggagacgtgagaggaagccctcctcctaccttccagcaccagagctatccaacctccttctcctcttcaggaccttcaataaatatgctccttaggagccaatcccattgtctgtacatctggccaatcatcttccctttccctcaccttagacacttcaagaaaacaaagcaaagttgggctttagtgggatgaggagaggagatgagaatccctgtggtcacagagaactcagtgagattcatgttcatcctcaaacaaaatttcatctataatcttcctgctcagaaaccactctcttgagtcatctctggcaggctgacaaagatggagtagatcctgggtaggaagagaactgaagacacttctggggtaatgagaaaaccctgaggaaaaagaaaatctaaggggtagaggtgaggacttccaggtggagataaagatacctgggggtggggagaggtaagttccccccaccccctcacctccatcaagggataggtaagaacacttcgggggagcttagaatttttttacttctcacttttaatcctgcatacctaggtctctacattggctggcgctgcccccattacctatgggactgtttccggattggggatgagtccagatgcttttgtggacacttgttgagagagcaccggatcatctcaggtaggggagaactgaccagcccctctcgagtgtggaggaataactgtactctgtcatgtcttgggaagtatgagagagagcatgtggctgggcacggtggctcacccctgtaatcccagcactttgggaggcggaggcgggtggatcaaaggtcaggagatcgagaccatcctggctaacacagtgaaacaccgtctctactaaaaaataaataaataaatacaaaaaatttagccaggcatggtggcacgcacctgtagtcccagctactcaggaggctgaggcaggagagtcacttgaagccaggaggcggaagttgcagtgaactgagatcatgccactgcactccagcctgggcgacagagcaaaactccatctcaaaaaaaaaaaaagcatgtctgcgtgcatagggggtggtggggatggaggatggggttggcatgagaaggcaaggtcctatcagattaaccctaccatccatccccaatcccacagacatatcggtgccctgcaagrtaagccagtgccgctgcttcatgttctgctttatcccatcacgcccagaggaggtgggtgagttctggctcaagagacgggccacctttgaccccaaggcctggagggcccaatgtcgctgcaaacacagccacgaagaacatgcagccactgggccccatccctgcaggcatcatggtaacttctagggcaagaggtgtattgggagcagggtaggtggggataggatgcaatctggggataatgatggagagcaggtatgagagccttgggcatgcrgtcactgaggaagagatgagaatgtggtcagctcctggggataccaccatttcctaaactcttcttggctgcacttttgccccaggctgttgctgyggctgttttgagtctaatttcctctgtgcggcctgtgaccggcgctgggaggaacacgagactttctytgacacccagaagacccggcaacgaggaggaaggcctcgcggtgaggcagaaacctgggacagggggccattccagggtctgtagtcagaaggccaggcaggaaggcactcccatcctcaaccatcccttccaggactagcgcgctccctcagcccacctccccaccacccacctacctgcatcccacatctgcactggttttcacccccaggagcagactatgtaccttttgcagagatggctgtgctccgagaagccatcctcagcaactctgacttcyaggccctgcagatacaggggccctctggccttcccagctcccaccctagtcccccggggctccctggttcacacggtctccagcctggcctcccttctgacccccatacctgaccctttcacctctgctctttcttcctccagggacagacactgtcagcaactggcacaggcctttgtgagtctggcccagatcagcaataaaagaggagtcattggaacctgacttggctctatatggggcaggtagatcccagcccagggagagactgcctaataacttagagttgacacctattagacacaggagaaagcctggatctggccatctgcctccatcacactcacattcaagctgcctgttgaaggaaagtggcttcaaggaagtcaagaagggaggaagtttcaagaaggatagagtgggaagtgatgttagatgcagttggggcaccaataagataaagactgaaaagtgtccattgggttttgcaattagaagatctttgggaacatcggagagtgcagtttcacactggtgcagtggaggcaggagtcaaacagcagtgagtttcaaggagtctcttaaagaagcttggatgaaaagtacaaaagtaaagtcagacaatatccagagggagttgtggagtcaaggaagtacttttgtaggaaggaaaaggggaagaggccagtagactaaaggaccttgaaggacccagaagagagagaagagatgcctggtgagacaagatcccagagatggaggaaagggatgaggtcaaagcagaggtgaagggattttctctggacaggagaaacaccacttcctatgaccaagacgaaggaagaggatggagccttcctagagtttcagggaacaagaacctgtggaagttcccctctgatggcttctatatgccctgtgaagtaggagataaggccaatggctggggtccaggggaagagggataagagtagggagcaggagacaagaagagaaaggggaaggtttgggaaggctaatgtagggaactggagaaaaacctcatcagtgggtagttcaggattcgggcacagttggaagtgagaacctagttagagaagcagagaatccaaatatttaatgggttgatgatgtgagggtgtcagggaggaagatcaggaaaactaagcaaaagaaggcatgaggatgtgaagggagcatacagcaccaatagggaaagaaagtgatgccaggaggcaaatgacagattgaaaaagggagcagtcaaaggaagagaagtctctaatgaggtacagtagcagacgtaggggcaggggttggagtacaagagacagtgttcagaggctgcagagcataacatctttcagatgagggcaagtgaaggtgataagtgcttgaagtagagaaaactgtgggccaaggatcaaaatcagtgaatgtgggaagtcacaagggagtccataggttcttatgggagtaggagattccagcactaatgggctctgtgaacccaggcaagtcactgtccctctttaggctgagtttctggacctgtaaaacaggaataacctctgtgttgcctactttctatgagaaccaaagaaataactaatttcaaagtgctttgtatccacctatcctccagactggcttccttcctcttcctagatcccagatccacttatctctcgcccttctccagggcaactctagggtctcccagtgtcccagaggcaccacagagaactgcagcctccggggcccagagaagaggccattctacatttcctcacaattaggggggccatctgttcctccaagggaaggaatgcaatctggactgctaggatccctggggaaaatcacagaatcaaatgtctgccctttagaggagaaaggattttctaacaataatatagctatacaaaagagattgttatatctctagaagcaaagttccccaacagtggttatatgccccatgataaccattcacctaaaactaattcaactaatagtcaacaatagagttaggattactatgataaactcattgaaggaaataataagcagccaatacaaactatatttacgtagactgtaaaaatatgaaaaattgattacacatgggttagtatcatatgcaatacatattacatattatgaaaaaaagacaggaaacaccaaatgttattcattcaacaattactgaccacctatatgtatcaggtcatgtgtttaaaaaaaaaaaaaagaaaaaaagaaaaaccaaagaaacagtggtaacttgtcctatgtgatatcagactaaaacttacctagcgtctgagaatattagtattttgtgaccccacgtttcttatgtcaaaaatatatattccagcagtgcaaacctgacttattggtgcctcatacctgtaatcccagcaccttgggaggccgaggcaggaggatcacgaggtcaggagatcgagaccatcctggctaacacggtgaaaccccgtctctaataaaaatacaaaaaattagccgggcgtggtggcgggtgcctgtagtcccagctactcgggaggctgaggcaggagaatggcgtgaactcgggaggcggagcttgcagtgagccgagatcgcgccactgcactccagcctgggcgacagagcgagactccgtctcaaaaaaaaaaaaaaagaaaaaagaaaaaaagaaaaaaaaagaaaacaccaggcaccgagctaactgtatcacacaccttttccgattagaaaagaacaatgaatacatactcctttgcttattataattcttgtgcggcaaatataggacactcttatctcctcctgctcaaaaaaaaaaaatgcaaaaaccacagactttttaatctatggagtgaatgcgttaacaagaacatagaattaaggaagaatttcccttagataagtacattaaaatctccaaaatgctcaagggactgaaactgcccttgtggagaaaatgctgcgcatcagccccgccagttaaaacaaacaaacaaaaacaaaaaaacacacctcatccccgttcacctttagccccaccccgggtggttcttggagccaataagcgccggatgccctcagagccccgccctcctcctggccaaagcggtgagagggtctaaaacagccctttctgcagcaggtgacggagccccgcccccttctccccgcgcaccaataggaaccagacctgaagaggacgaaccaagaacgaaaagaaccacccactcgggagccgcaacctagaagccagaattgtgtatcagattcaactaggagaaaatcccacctccaggctcyattaatccttccaatggagtggaagtttctctcacagagaaactagtaaggggatccaatgggaaaagaacgttcacacggactagaagacgaaaccaatggaatggaaaattgtcctcgcgttggtagaagcagccaatgagatgaaaagagcccgcctccaaagtggctgcagaggcaatggggtgaatcgtgctcagaggcgcgctccaatggggtagcagggctcgcccggccgccactaccccgcttccccgcgcccggagtccccacccacggccggccgcggagccgagtgctgacccgggtgagaggttcccgcggctcagggaagatggcggcagccgtggtgctggctgctgggttgcgcgcggcgcgcagagccgtggcggccacgggggtgcgcggggggcaggtgagaagtggcgcgggagcgagtagggggtcctgcgggctccgaagccatccggggccagggggtcccgaaggcgcgcagagccgcgcagagctcctgcctgtggcctctgcccctccgaggcacaagctccggggctgtgtggtgaggtcgaactggtggctccggagaacgagctggtgctgattcccgccctgcgcaggccggggcgccgaggtcgggacagggtcagtgcagcggctgccgccttctttccactgcctgcagcccagctggcccgatgccccctgcaggaaatgagctttctcttcttggagccagtgctctgccctcctcaggcttctggcctcctaatgagcactagtgttaacctctcttctgcacttgccagaagcggctcggaggtcagagaattcattccgtcccgttctcccccaacgtgatgcaatgacatcagccttctctgaatcccttacccgaagttccctggggctaggggagcagaggtcacttagctgaactcttacctccactcattcaagggacaagagttaaaattcacagagtcacatgtgacacccagatgaggggtcaactagtgtcaaacagggcgattgcattaaaacttaaataaaacaggcgacaaggcttaaagatcagaaaacaagtaacggaaataagtggaaatgtactaacaaggtgagagtggaaagagattcaagccatcgcaagagattatggaaaccatccctttattttatattagaagctgagagaaggaatttatctgaggtaattcagtggtatggtaaggtaggaactgagaccaaaatccccagtctctcattctagatcctttccctaaacagtgctatatttcgtggacacatgagcaggaatcaattgcactgctgaatcctgataataataccgcctgttatctaaccaggtccagcaccttctggccctaccctttgctgctggtgctctgaaattcaggaactttcctcctgggtgggaacgatgaataggttattagaaggacgaaattaacaactatcagagcccagcttctgccagctccctcctttgaatatggtcratccaccttcaggtccgaggagctgcaggtgtgactgatgggaatgaagtggccaaggcccagcaggcaactcctgggggagcagccccaaccatcttctcccggatcctggacaagagcctcccagctgacattctctatgaggaccagcaggtggggtgctcttaggacctatccccttaggaatgttgtagataccatccaacctgttgaagtaacgtggcctctggcctgtcacttcccccagtgtcttgtgttccgtgatgtggcccctcaggctcctgtgcacttcctggtcattcctaagaagcccattcctcggattagccaggctgaagaagaagaccagcaggtgggaagaacagggccagggtttggctgggaggagcccctggacccagctagaggtcttgctccctatgaatgaagccacctatgtccctccgctctctctatagcttctaggacacctactccttgtggccaagcagacagcaaaggctgagggcctgggagatggataccgacttggtgagtgacttttggcccttggtccctcacctatgaattctcattcctacttctcaatatgatcttcattcttcgacctctgccatgatcctgactccctaaccccaagctcaatttcagtgatcaacgatgggaagctgggtgcacaatctgtgtatcatctgcacattcatgtacttgggggccggcagctccagtggcctccaggttgaacctgccaactgattaaaggacaccagactctggatgcttggatggaaagggaaaaatggaccctgtgatgctaataaaactgttytcccttaattatgctctcctgtctttaatataaaattttataccacaaaggggaaagaaaactgattcagggctatgatgccccttgactggtctgagtgaaagacactgaggaggtccaacctgtggttaaatgttgcctgcagatatgtaagtcttcttgacaagtggtccaccctaggtcaagcttctagaaaagtaacagtaggaatgagcctaaatgagtaggaagaaactgaaagccaatcctggcccttcttcagaggtcaaaccaggttctaagggcgcttaggaggagggtggtcaatatgagggtcttttattagaggaggagtaatcacacccaaacaaaagcggctgccttttcactattctacgtctcaccattttgctcaagctagtttgtttattttcatccttaacatttgttaaagaccccactcacttttgagaatgaactaagcaaactaaggggaagctacttgcctctcagcaaacaccaagtaggctgtaatctaatgccacaaccctgtgcctgtttccaacatatccccataaagcatcatcttagaaaaccgcacgcaaagactgtttggacgtggagggcgaggtcttaagccagcggaaccctaaaaccccgtctgaggcggaatgccgccgggaccggaaagcggacctccctaacagcactaggctgaagacttccgccccgcagaggacttgcctccaccgccacctgcaagtccgcccagctgtacttctgcgcaggctccaggagttgtttgctgtctctatggcaacccagtagctggagtctgaagatggagaccaacgagtctacggagggatcgcggtcgcggtcgcggtgagagccgcagctctggctgcaggcataaggggacgaggaaggtcagctgacttcctctgctgcgcttttgacagccatgtcgtgtttgctttctttcagatctttagacatacagcccagctccgaaggactggggcccacttcggaaccgtttccttcttcagatgacagtcccaggtcggccctggcagctgcaaccgcagcagctgcagcggctgcatcagctgctgcagctactgcagccttcaccactgccaaagcagctgcattatctacaaagaccccagcgccctgttctgagttcatggagccgtcctctgaccccagccttcttggggagccctgtgcgggacccggctttacccacaatatagcccatgggagtcttggctttgagcccgtctatgtttcctgtattgctcaggacacttgcactacaactgaccatagttctaatcctggccctgttccaggctctagctctgggcctgttcttggttccagctcaggtgctggccatggctctggctctggctctggtcctggctgtggctctgtccctggctctggctctggtcctggtcctggctctggtcctggctctggtcctggtcatggctctggctctcatcctggtcctgcctctgggcctggtccagacactggccctgactctgagctcagcccctgtattcctccagggttcagaaacctggtggcagatcgggtccctaactatacctcctggagtcagcactgcccctgggagccccagaaacaaccaccttgggaatttttgcaagtcttagaaccgggtgcccgaggactatggaaacccccagacattaaagggaagcttatggtttgctatgaaactttgccgcggggccagtgcctcctctacaactgggaggaagaggtattaaagttttggcctgctcccttttcttgaaggctgccctcagtttcttaggggaggcagtagtttacatgagggtgggtaccagaagggatattatagtcattcaacttgggatccacagagagccaccaaccacctggatcaagtcccaagcatgcaggatggctctgagagttttttcttccgacacggacaccggggactgctgactatgcaactaaagtcacccatgccctccagcaccacccagaaagactcgtaccagccaccaggaaacgtctattggccacttcgaggtgtgaaatgtgagagggtaggccagaacgagcccattactcagagggaagaagaggaaggaatttctggtggggctgtggattctccagtggatataagggcggaaccccaaggttcttcttccttttctcaagttagtttcttctgggcctccttcttaaccagaccccaccttgcccaccccccaactctctcacagggaagcgtgaagccatgctggagatgctcctgcagcatcagatctggtaagggattgggtaaaggggaagagggatggggaggagaaaaattgggtgagaatggccttgacacccctcgggctacatagtaaagaggtgcaggcagaacaggaacccacaaggaagctcttcgaggttgagtctgtgacacaccatgactaccgaatggagctggcacaagcagggactcctgccccaacaaaggtgagaacccaccccccatcccccgccacttgcaccagctgggctctgacaggctgtggccaagtaccaagcccagaggttgagagagagggctgaaggccaggagttactcagtaccctccctcacagcctcacgactaccgccaggagcaacctgagaccttctggatacagagggcaccacagctgccggtgtgtgagggtgactaggtgttgggggcagagcggggcaggaaaggtagggcagagttgttttgttctggcttggggagagtgggatccatcctcatcctggcactcctccagggtgtcagtaacatcaggacattggacacaccattccggaagaactgcagcttctcaacaccagtacccttgtctctggggaaacttttgccctatgaacctgagaattacccctaccaattgggagaaatatcttcccttccctgtcccggaggaaggctgggtggtggaggggggagaatgactcctttctgaggggtgaggagggaagtggggtatggaatatggaatctatttctgtctgcactagagaggtcgggaggaagttaattctcactgtacttgaagaggctttacataaagggttctctctcatcccaagactgctaatttagtgattctgtgagtcactgtgtgcataccccataacctttccttgggattgcccctatcccacactatgacatcagaactttttttattattgttttatatttgaccaaaatattctggtttagatacagatatttacagaaagtagggaggaaggggaccaagccagagagggacaggtatatgtacagggctgagctgcagagggctacaacttccatataaggtaggtttttttgtggctgttttccattgcatatgaaaatgtccatttctggtgtgtgcagacatggtggccattgcccacccaggtaccagcagcagaagactatctgacttggaaagaatgggggtttacaggagtccaggaggtcctttccgctctcctaagagccagtatgttcgcatctttccttttccctggaagtgggagagtggacatgattcagatgcttcgatgttagtccctttgtctccctctctttccctatgattcccataatcactttcaccctccctttccatgcccccctccccatggcctgccatcaccttcatttccacatccccccgaagctctagctggaagcatcctagctcatctagggcatccttggtggtagaggagacatggatcttcagcgctggggtgggtggaatggggaggatggtggaatgaggaatcaaagaaaaggcaatcaaataattggtgatactgtatagcaccgtgcccgaccaaccatccctgggaagctcccaatgcatatctattaggaccaaaatatgcccaacctcccaatgcatatctattagaaccaaaatatgcccgaggatgcgacactaaggaactgtggtctctcagattaagaaattggagggattatgaaaagaagaaaagggcaagataaattgaggccaacagtggggttgagggctaatgtcttaccttgaccattagactccattcgagaagcagtgttcactgtgtctccaaaaagacaataacggggcatcttcaggccaacaaccccagcacagactggccctttgagaagaaacaggttgggagagtctgggaaaggtggagactagggctggagtgagagtcagccttaccagtatggacccctatgcgtagcctcagctggtcatggggtcggtggcggatgcgaaaggaagaaactgcatctagtaatgctagggccatacgagcaatttctggtgcatggcgttgaccatttcggcctgggaggccagataccaccatgtaagcatccccaatcgtctccacctgattgagagggggattaaaaggtcacctctatttatatccatggggatgggaaaaagtagagggagacaagcttgacaccatcattaatcatcctgacatgctggagaccagaatattgactagaaaataagtgccatggtcctgagtctaggggagaggagatgtctagggaatctttaagtcttctttctccacccagcacctggtgaatactcagtaaacatttgcggaatgaatgaacaccctgtctgcagcaggacatggacaaataggctctgccatcaggaaatgggaagcaagaaaacggtaactcaagaggacagaggctggtgaggaggtaaagcaggcccagtgaaatggacctgacagcccaaactgtcagagaggaggaaagcaggcatttgattttggtaattgtgccaaagctatgtaagagaataaatgccattgttttaaggaaatacacagtgaagtttttaggaaatacacactaagtatttagggataaagtagttatccctaaatagtagtctgccacatgccaaacaatgttaggtactttccatacaacgaatctattattcccatcttacagataaaacaactgaggctcagggagattctgtgacttacctaaggccacacagttagcaacaagccaatattcaaatccagatgatttttactcccaaggacaataaatccaactcaataacttcaacaaaaagttttactttttaaaatatattttccctcaccccactaaatcagtctggacccacatcctatatgattcttccatgtctggagaggactggagagaaatgttggataggctgtatttatactccaggaagacaggagctaaatctcatgatggttctgattagggaagtcaaaggattcacaagaaattcgactggagtgtacaattatagtgctggagctacatctgtctacaaagtacactccagcaccaggatgctgagtaccctggagggaaaactgatcatggggtgggtaaggtgtgtggggttcagggagactgagtttcaaagcgggtctctattaaagggtcttctattgaacagctctcaccttgtagacatcaaagttgtcaattatggcatcaaagcaggtatacaggtcattaagaagtgtcactacctaaaagggatagaaaagcagaggccctgagacttgtgcccaattttctaagaattcttaacccacaagccatcaaaagatgtgggaactctagaacaaactcatctttcctattatcaatgaggcttccccaggtccctacccacccaaccccacccgccacctctcacccatggctctcacctgcatgggggtgctctctgctgacaatgctgtgaagccaacaatgtcactgaagtagatggtaacactgtcaaaggcctcagcctgtacagtctctccccgttttaactgctctgccactgaactaggaagcaagggtgccgtatgagccaaactccaagagagcaggagtggaagagagagggaaagtgtatgtggctg

SEQ ID NO: 95511 - DNA, 29316 bp, Homo sapiens
ggtaataatgatgaagggtggtaataggaaaatagggaaactatctatgtacctaggaagattcttgggccaagtgtgagagggcagagaagaactggggccttcctgggcactcacagaggtgctggtccaggcccagatggagcagacaggtgaaatatggttcacgtggagcttgaatcatcaaggaaataaatgtatgtggttgcttctcctgacaattcttaaatttctctcttaggaatctttggccatctatgaaacaatttccatgggaaaatgacttgtttggactgtattttcacaaagctgatatttctggcccttagaatatgatacctgtttgtctaaaaaacatatatctattcaggtaagttggaaactgagatctgatttgaaaacattttgggctgggcgcggtggctcacgcctgtaatcccagcactttgggaggccgaggtgggcagatcacgaggtcaggagatcaagaccatcctggcaaacatggtgaaaccccgtctctactaaaaatacaaaaaaaaaaattagccgggcgtggtggcgggcgcctgtagttccagctactcgggaggctgaggcaagagaatggtattaacccgggaggcggagcttgcagtgagccgagaatgagccactgcactgtagcctgggcgacagtgtaagactctgtcaaaaaaaaaaatttttttttttaaataataaattaaaaaaaataaaaaagaaaatattttgaacttacaaagatgtatatgaattcaaagtaaaaacccttgaccctttaaacaatcacagcagcgcccaccgctgccccctttttttttgagatggagactcactctttcccccaggctggagtgcagaggtgcagtctcggctcactgcaacctccacctcccagattcaagcgattctcctacctcagcctcctgagtagctgggattacaggtgcctgccaccacgcccaggtaatttttgtatttttagtagagatggggttttgccatgttggccaggctgatcttgaactccttacctcaggagatctgcctgccttggcctcccaaagtgctgggattacaggcatgagtcaccatgcctggcccacagcagccctttgaggctgttgaatatctgtgagaagatgaactggatcttagatctacaaccatactgtgcactgctgcgtggctgggagggaagtaggagttggaggggaactggaggtttgacctaatttcaggattctgtctctcccttatggggctaaaataaagaatgcagaatttgagtaaagtctctatttgctttctatatactttgctacatttctttttctacattactttctccttttctattgagatgtgttgtgaagtgtatctttcctgccttatttgatctacctttctatggctgttctctgccctctgttggcaggttctcttggacctgtccgtctgtgtgcaggggacaattgcatggagtcaaagcccatttctgctagtcaggtcagcagagaagatattttgttttctggaattctgtaggcctgggaggcatgatctggtgtagaacaaacctgaggatccagattcagctgcacaaataggtttgttataaaacgtttaatgctgtcagtttggggcatcagagcctatcacgaaaattagcatgagcccgaatcccatggtggttgcagagctcaactagggtcttgaggcacctttggcctgagtgtaaccaggattaggatttcttttgaagaagggacagggcagcttggaaaccataggagattctagcagctggccaatctgatgctctgcagtttagttctggatcagaaataaggtgtttggggccgggcgtggtggcttacgcctgtaatcccagcactttgggaatctgaggcgagtggatcacttgaggtcaggagttcgagaccagctggccaacatggtgaaacgctgtctctactaaaaacaaaaattagctgggcatggtggcgggcgcctgtaatcccagctacttggaaggctgaggcaggagaatcacttgaacctgggagatggaggttgcagtgagccgagattgcgccactacattccagcctgagtaacagagtgagactctgtctcaaaaaaagaaaaaaaaaaaaaagaaaaagaaagagggtgttgattgaccctatccagaagaaattatagctggtatctgtttgtggattagaagaaggccatgacagtgctacaaagagaaagttggaccctagctggttgctgcttaggccagtagaatctagatttcctaggttttctatgtattgcagcatggtcaccaaatacagccaaaatattattgcccatatcaatgacagcagtgatagcttggatagtgggatatatacataaccgaagttctcatttatttaatattttcagctttccctcaaacatgaaaaaataaacaccaaaagcctttcactgtgtgttaataaaaaacctcattaggggatttatcttttatctccccactccttcccacttcccttttgtcttttaaattttatttttagtttttacttatgttttcttttcctttctttctttcttttttcttttgagatggagtcttgctctgtcgcacagtggcgcgatctctgctcactgcaatgtccgcctcccagattcaagcggttttcctgccccagcctcccaagtagctgggattacaggtgcccaccaccacgcccagctaatttttgtgtttttagtagagacgagatttcaccttgttggccagcctagtctcgaactcctgacctcaaacaatcctcctaccttggcctcctaaagtgctgggattacaggcgtgagccactgcaccaggctccttccacttcctttttttttttttttttttgagacagggtcttgctgtcacccaggctgcctctatcctctgggatcaagcgatccccccacctcagcctcccaagtagctgggaccacaggttcgtgccaccatatctgattgatttgtttggtttttaatagagattataggcattacaggcaagagccaccgtgcctggccccttcctactttctagttaactggccaactgggaggaaaagggaaaggcaagatgcttgaatgtttaatccctaacataatgaagaattgtccttaatgttcagaataatgacatatgatgcacttgtacttgcgtaggagtctgggtgacagtggtggctgatcctcactgagggctgcaggtgttccagagagactcgcctgggtttggtggctattatattgtaagcacagctttctacagtaagttccatgagtcagcaaaatatctataaagagcctctccttggagaccatgaaacctgcattttaatctctcttttgcaactaaaaagccatgtgggattgggggagaggagcaagtaaggacactgcgaccttcctctctgggatttggttttcaattatctttaaatgagagggctaaacaatatatttatatgatcctcttagccctgccattctgtaattctttcaggaattttgtcattttggatttgcttgtctcataaaacaatgtgtagttgcttaaaaatcaactattctatttggttgacttggtctaaagtatttctcatgttgtctcgtcattcttttgactgttcctttttttttttttgccttggccagataggacaaaattccttttcactgcagtattgggagcctggaactagagttaccaacccctctgcgttaaagaaggagctgtcctgaggcttccatctctactgggcttgaggcaagaacattgttagggacggcctgctcttggcctctgtgccccagggattgcaaatgcatgttcctcaaaggtaagggctgtatcattcggctttctttgtattcacaggtacagcttgtgctaggcagccggtgttcaataaatatcgtgcctaaggataaagtggcattgtccttaatttcccccaccaaaccactaggtgtcgccttcatctcagggaaaccatgcccgtcctcgccctatacactcccaccccactccagggctccaggagcgctcttagcttgtgatttctggagaaatagcttgaaggggggagagaaaccgtggctcttagcgcgggcagagaatgggcttatgtgcatgtcctttatgacagttggagaaaaatccccaaggtcccatagcagtccctctcagccaccatgagatcatccctcacaagctgttcttggggtcagattggcactccagatatgagggccctagggagagcttcctaagggaagctgggagcaaggtggaaccccaggagagcgtggatgggcttccactgcggggagtgtcccgccggtccgttacaggctttccccaggcgccagcctgcgctgtgcaggagacaaaagaaaatcgaggccctgactgagcagatggtgcggaggaagccgggcgggctgcggtgggcctctgaggacacgaggagggcagggggcatggagacagcggggggccgagagttgagtcccaagcaagaaggagcctcgtggactttctaaggactggtgggaagtgtacagcaggggcccctggctgctggaggggcccgtccagggagcgggcatggtccgcggtggagtaagccgcactgccgtcgggagggcgctatggtttgctaggtgagggggctggtgaggataccacacgtctggggatcctcgactgcttcctggagactggaaccactgagggactcagggagttcagaggggagacccaagaagaacgggctgagcgagggggagaggacaaaccctggggtcgctggcgtgtgtgagatggaaatggaaggaggggcggcagggggaccaggggcgtgggggagaccagggtaggccctgagagtgagggagcgcccgggaaccctgctggccggcgaggccttggtgcggagcccccaagtgctcaccggggtgggtttgggacctggcggtcccgagcgcccgggtggggggtgggggaaggcagccggcgccggagggtggggccgggagggaggaggagaggcagcgggggaggggcgggggcgggcggcctgcccgggggagtcgcactcggccgccggcgcagcgagcggagacgggccgggccgaggcgacctgacccggacgagcggcgcgcgcggggcccaggcggggggcgggaggaagcgccgggcagcgccggccgccagggcccaggagaagcggagcagagaggagcggggacacgggcggggccgccgtagctccggatgggaccagcgcccgggcccgttagtccaagcaggagctccgggagaatccttcacagggagatttacccctgccttcccctgccctccggcccaggcctcgcttcgctccccgcctgcccatgatcccagtccttccgcggcgcgggcaccctcccaccttacccccttggtcctatgtggcgcagcgccctcctgccctcccggccctttcagctgtgaggttcccccaggccgtttctttgtaccacccgccccccacccccaccccatcccagtcccagatccccttttccttctcagctttagatttatcaggcttcttcacctcgcactgtccccatcctggccgcaggccccctcggtccctccctccccctgccaccccgttctcagtcctcagtccttgccctaggctggtagcccactccttgcccgccccccgccttcctcccatctccccctcctctccccggcccccagcaccttctgcatcccagcctacctagcctactcctcctcttcctggccctcttccccaggctccaggctggggggtgctcgcgtctcccctgtaggccagagcagccccaagttctgggggcggtggggctgctgctttatccccatggcgctgccatcactyctgctgttggtggcagccctggcaggtggggtgcgtcctcccggggcgcggaacctgacgctggcggtggtgctgccagaacacaacctgagctatgcctgggcctggccacgggtgggacccgctgtggcactagctgtggaggctctgggccgggcactgcccgtggacctgcggtttgtcarctccgaactggaaggcgcctgctctgagtacctggcaccgctgakcgctgtggacctcaagctgtaccatgaccccgacctgctgttaggtcccggttgcgtgtaccctgctgcctctgtggcccgctttgcctcccactggcgccttcccctgctgactgcgggtgctgtggcctctggtttttcggctaagaatgaccattatcgtaccctggttcgcactggcccctctgctcccaagctgggtgagtttgtggtgacactacacgggcacttcaattggactgyccgtgctgccttgctgtacctggatgctcgcacagatgaccggcctcactacttcaccatcgagggcgtctttgaggccctgcagggcagcaacctcagtgtgcagcaccaggtgtatgcccgagagccagggggccccgagcaggccacccacttcatccgggccaacgggcgcagtgagtgtggcctgggctattttagggtcatgggaggagggtcgctgtgtccctaaagctcagcactggggaactgtagatggagataggcattgagcagctgtatgtggtggttgggatcaagaagcacacgtggacagagcacctgtgagagggccaaggcttcatcatgggagcttgtgaacaccctaggcagatgcaaacaaggaagaagagagcatgaggggtgaagccttgtatcaaggtggaatgtgaaaatgaggggatattaagtttcgggagcaatgtttgtgccctagagtagtgaatgtgattgatagccactctgaaatgtgccctgtctgtgatcagagctaccacccagactgggcgccaagaccccttggtggtgtaaaaataatgagggctccatgaacggactcagggctcagcagatttgggaaagacagataaagctcatactgagaaatctgtgctgtctgtgcctttgagcccagggaagggcagggaagagtcagggagcaggccggttgggtggggagcagcaagggaggctctgggaaagggaggggcttgagagtgacagctcccttcctctggggtctggacaggctctgacttctgccagatggtcyatatggccccagggtacttatggtggactccaagaggggtgggctggggagcatctgctttggggttgataggttagggcactctctttcttgctgaagagggacatcccagtgattcagagagggggctgtgtgggggacctggataccttctcagggtgctcctctgtcatgtacctgctcccagttgtgtatatctgcggccctctggagatgctgcatgagatcctgcttcaggcccagagggagaatctgaccaatggggattatgtcttcttttacctggatgtctttggggagagtctccgtgcaggccccacacgtgctacaggccggccctggcaggacaatcgcacccgggaacaggcccaggccctcagagaggcctttcaggtatcatttgagccaaatctgaaggaggagggggaagaggtgcttcgctggaaattctctctcacaagaccctaaagaaaccctaggaaccaggcaggaattgtgagccacaggagtaaaatgaacagaggcattctgagtctagtgtcaccctttcttacttctctacttttgtgactcttagtgtgcttgctgccaagactgactttggctgcctccaaaatcctaaaacactgactttcctaagtgccagtagtaggctatattgtgggggagaaaagttcaggaagagatctgatcctagcccttgggtgggcttccaccctttatggagaggtgaggcatcgttctggtacagtcagacaaagtttgagaaaggatatgattatgtgtcctggaacagacactaagaactttagtggctcagaggaggaagagtcagtgtgggctgtgtttagggaaggcttttacacaggaagtgagaccgtattgtgactttaatgatagatgtcatattcatagtcagagtgggagaggagatccaagcatcctgagcaaagagaaaaagataggaatgggcgtgtttgagagaccaagaagatactgacccgacaagaatgaggggttcacttaaaggagatacaggaaataaagttgcaaaggtagaatcagattaaggagagctctaagtcttaaggcactaggacttgaatttggggtccttgactttttgtgtgtgtgtgtgtgtgtgtgggagataattatacagtagtgacagaattcaggattagaagagggggagacctggggcagtgagaccaactgtaacagattagaagggggtgaggtgatatagcttgaactagtgtgatgatagcaggaatggaaagaaacgcatttcagatttcagaaaatttgtggggaatgttggcatgactctgttcatttcactcctgctcaaaactttcagtgacttgtgttctagagaataaaatcctgactccttattgtgacatttaagaccttctgcagtctgttctcaaaccactttttcagtcttacctcctggtaccctcatgctgagaactgcagcctaccaggcctctgagttcccccaaccccagggccttcctgcccctgtgcctttatgttctttttccttttgtctggaatgctcttccttccctcatcccaaatatctgcctctcaaaatcatacccatgaatcttcccgattcccccgccacttttttactaaccgtgcatataagtgtttcccgtgtatttatccatatccctccttttttccaagaaggattggaggtggcttatgggataaccttaaagtcctttaaactctgggattatttggttcgaagtagctgtgtataagggctggacctgggtggccattcttctccagtaaggttttatgtggctgtgattatatatttggttgcgactgacgagtgtgtgtctgactgagaatgacatagctgtttgcatgcctgagaatgagtctgtgactgtcacacttgaatatgggcagtggcagggcaggttttgtttatgccataatgttttcctaaaacaatcttctcacctttgtctgggtaatgcttccatattctttaagactcataccagttattttcctttctaggaaatgatcccagaatccctaagtgggactgaatttcctactcttttgcttaactccatctaccatagaactaaccatattattcagtctgtgtttgatttatttgaaggctgactcatttcattagtatttactgagcacctatcatgtccagtcactgtgctaggtactggtatacaagggagagcataacagactttgttcctgcctttttggagtttacatttggtaggatgggcaggcaataaataagtaagcaaataaatacaaatgtaggaacatattgtgatgtgttactaaaacataaagaggaaaggaatagagtgttatgaaaagagaagaacaaggggattgtacttcagctggtgtggactgcagaagatctgtgaccctctcagatgggagcactccataaccttcctggttatatcctttttctttttgagacagctctgttgcccaagttggagagcagtggtgtgatcacagctgctcactgcagtcttgacctcccaggctgaagcaatcctcccacttcagcctcccgagttgctgggactacaggcatatgacaccatgcccagataattttttattttttatagagatggggtcttatcatgttgcccaggctggtctcgaactcctgggctcaaatgatcttcttgccttggcctctcaaagtgctgggattacaggcatgagccactgcgccttgctggctgtattctatttgtggaagaaaagcctcactttcttctgtgagcattattgcccagccaagagtccccagcattaagggtagctagaggagggatctagtcatccaataatcagttatatcaattaactctcagttctccccctcactgtgggcattattcagacagagaaataaagagggaatctttgctgcaacacaagagaagggaactaggcaccaggaatatgctgatgggaaggtcaaggctttgggtaggtggggctgaggggtgataaggtgccccgccccccaccttccaatggggaagcaggggagagtctgagggaagttgggcagttagctacagccaagcaaggatgaaagagcacagagcctttctcccagagacactggccctctgaggtcccagaccaggccagcctggaaaaggtggcaatagaggaaaggaggccttgacacagatgcccacagcttttccaggagggtatcatgctcaaggaaaggccytagctcatgccgtatcgatactggctactagggagagagctctgaaatcaagtatgttgatatgatttttctctcccatttagccactagctgctccagggcagggatcatgctcatcttcatattccatatgtctagcatgtagtaggtgtttaacacatatttgctgaattgaattaggggtgtgttggggagagggggataggatgaggaattcacctagacaggagtagagctggcaagtaatgtaaactaggtgatcaaccaggatagggaagaaaagattgagtggaactaaataagcaatgaccaggctctgaggatccagaagcccaggctggtcaatggaggactacagggttagaaacccaggcagaggtcacaacctacatgaccagcatgagattgggttacacacagggagcaccagcggcaagaatggaagaaagcactaaaccaagggcttggagatcacttgtctcattaggccactgttgaccactctccagttggccagggcaagtctcagtgggcgggtccacagatagaggcaggtgcctcctgagggtgcacatttcctaggtgtgctcctggcacccacccaccactgcacccatttgtggcggactttgcttgttttttccacctggggtccactgtgaaatgggacacaattatcctccttcactttctctcaaacccctgagcaagcacagaaactgtttgaggttgggtttttttttttggtttggtttttcatttttgttttttggtactacaactacaactagtaaccacagcaaaaacagttctagcatagcagtttagggggacyatggggtcaaaactatttaaaaataatacaaagatcttatctgctttgtcacgcttgttcttttgtgattgtgtagggaagttttccagaggttacatggcatgatgatgtcatcacttggacagctatggaaggtgtgcttgtgtgttcttgcgttttcaaaatttatcagttttaatttctaagatggtcaatattgatagatatagtccacataaacaaactttatttggggtcctyaataatttttaagagtataaagcgattgtgagaccaaaagtttgataactgctagcctaacaaactagccaaacttaktgttgagaattagtgtttaaaatgtgttaaaaacctatcatcagcctttattgaaatataaattgtgttgaacctgatcttttctcgcccttttcctgactttttacattgcttgtcaacaatattctacctctttattttattcttggaacaggtgctactgaatgaactatttcaaccctttcctcaattcccttctctttttaaaaaaattttacctgagactgggagaatgttagaagtgtgtaatcaggcagctaaatgctctagtaagaataatgatatcttgaggcaagctgcagtctaatataatataatgaatgcatattagaaatcgactttattatttcctatctctaatgaattgatacataataggccatatgtgatgtgtctagtgcagcgtatctctatggtccacatgtactttctatgacaagaataaacaaaactgggagaaatgaccggattttaaattatcatttcacaaagtcatgtttcataaaatatattgaactgaagtctttccttgaagttgtgatgccagtttcctgttggagcagargttggtctcagtgactatgtggcctgaggcagggcctgagactgggaggtccagcagctcaggaaggggaaatgtgtgagactaatgggagccaagcaggcactttggtgagagacagagatgctgactcatgcgccagtgagatgtgtgcatgtctgagatcacatgtgtcatttgcttacctgtgaaatgtgtgtgggcatgtgactgtgtgtttgtccctgtgacacatctattactcagtaagcaggacagtgctgtttgtggtaggtgttccacacattaaatggatgagcacacagcttttcacaggtggaatcactgtctcaaagtatttccctcagttgtcatagggcctgaartctctstaattcactgggcggagacactgtgttcaagtggccgaaatgacaatgttagtattttactgatgacattaacagtgattaacatctcagagaggagctgttagtgggtgttgtccttgatcataagcagatacccagaaagcatgggacagaggagccgtgtgagctgtggtggcctggcaggaacctggatgctggaagggagctctggaagatgttgggctgggctttggggatggggttgactattatttgccagtttccaccttcccagaaccagtcctatctacctttcaggaggagtgccactccctcttcccagatgtatgcaacacaacacacacacacacacacacacacacamgcacacacacacgcagagagagagaggttagtagccctttcaaagccttcagactcacctgtgtatattttatatcatgtatattttaccaagtttccctgtcctgcatcttctcttcccataatgcctatcttgaatcctgttcactcttccccatatgctgctggtacagactgtattggtgatcacgtaccgagaacccccaaatcctgagtatcaggaattccagaatcgtctgctgataagagcccgggaagactttggtgtggagctgggcccttccctggtaagtagatctctcccttcctgagagtcaggtcaagctttggggaagggcttctctcccaaactcagcatcaagtcttggctgtggagcaagcccaactttggggggtctccgcttctgtccaggatttttccttctgccctatggagtagttaggaagggatggcactttaggaataagagggaagaaagcaaaccagaagagagaataggtagaagggagaccccagagagaggggaaggggccttgcaggacatttggagagtactgctgaagttgccacccccagatgaacctcatcgctggctgcttctatgatgggatcctgctatatgctgaagtcctgaatgagacaatacaggaaggaggcacccgggaggatggacttcgaattgtggaaaagatgcagggacgaagatatcacggtaatgaagaggggtcaatgggggtctgagggctgatgtcaggaatagagtgggctgaagaagaaacagatgtcaggatcaccacagctttagtggggrttagtgaatatggcagagttgcccacacctcaagatcggggaagggtagactctgagggagccgtaggcatgagtgagtgggagaggagcccasggtagacctcaaagaaaggacactcttttctgtcttaggtgtaactgggctggttgtcatggacaagaacaatgaccgagagactgactttgtcctctgggccatgggagacctggattctggggactttcaggtgatggaggaggaggcagggaagagagtgtggccctgyaaaatccagctttcaagggttcagtcggggcagaaccaaaactactagatgagggatttgttttctctgctggcactgcatcctggctgggtggtaggctggggagaaaagcagcgaaacagctggggtctggggaggaggctggtgggagcaggcctgtgggcccagctttttgcttccttacagcctgcagcccactactcgggagctgagaagcagatttggtggacgggacggcctattccctgggtgaagggggctcctccctcggacaatcccccctgtgcctttgacttggacgacccatcctgtgataaaagtgggtgtgtgcagggactgggagcagctttcctccctttgctttccattcatggcctccaccctcactgaccctccactcttaactgtgcttctgcctttacgtctgcatccctccctcctcatttcttcctactcccaaggagtctgtctatgcacctatgcaccccgttctccattctgccaagtccgcacacagtcttcctcagggtctctatttccccttcagctccactttcaaccctggcaattgtggctctgggcacaggaatcaccttcatcatgtttggtgtttccagcttcctaattttccggtgagttctgggtttcttgctgacctactccctgcccccattgccacacaacctctggctgaagccaggtggtccctataaygtgggatagggtagtaggtttcttaatttgctggttgtctcttagatccaacagcgtcttcctctctagcctttctctttagttgtcgcttagcctaggtgtttgttccacttttggtcctagactggatatactaactagtgtttttcagtggggttaagatcaaaggtgaattttccattggtcttcttttaggaaagaaytttcacccccagtctctgtgtttgttagtgagcatagggcatgtgccagatatgccgagaatgcagccttatcttccagccctgtctctcaggtgtaacagttgcagcttcaggagctgcagggaagcccctgcaaccctgctgttggcttgggggtggcaggattcggcttgccagtcaactgaggtgtgcagtccttacagaaagctgatgctggagaaggagctggctagcatgttgtggcgtattcgctgggaagaactgcagtttggcaactcagagcgttatcacaaaggtgcaggcagtcgcctcacactgtcgctggtgagcccttgtctcagctgttcctctgcctccctctgagttcctgtcccttcttaccctggatctctcccagcacattggcttgtaatgatagcmcctgcactaccaccatcatctaatgttcctttcatccttccgcctccatgttgcccttggccccagcggggatccagttacggctcgctcatgacagcccatgggaaataccagatctttgccaacaccggtcacttcaaggtgaacagtcatttgcttgttctggtccccaccatttcatcctgtctcatccccatctgccacctctgcccctgaacctctgtccctcatacccsactctctgtgcccagctgagctcctgggtgcttccactgctctctagcatttccttgtacccagaacttctgatattcactttcctttcccctttcactcccaccatcagggaaatgttgtcgccatcaaacatgtgaataagaagcgcattgagctgacccggcaggttctgtttgaactcaaacatgtatgtaacagaggatggactctaacatgtatgtaatggaggagtggggaaaactatgaaatagtaaaattggctagatgggcaaggggttgatttataaatgattttaaaatcgtagatacaactaagagaaaggtcctcttatgtagtggtaagtttctgtatctaatttttaactctttcaattttcttatccttcccattgtttttttctgccagatgagagatgttcagttcaaccatctcactcgcttcattggcgcctgcatagaccctcccaacatttgcattgtcactgaataytgtcctcgtgggagtttacaggtgagggataggtgtaggagattatggcaggggtgggaaggatagacccaaagttatactgactctatgctgggtgatagctggtgggaccaggacagacagtctattccatgtcacttaccaggatattctagaaaatgacagcatcaacttggactggatgtttcgttattcactcattaatgaccttgttaaggtgagtcttccccactccttaaaagttcatccactttaaatcacttccactgttctttgattgtggtttttctccttctagtcctctgaagtcctgttctctcatctccccttattcccatggtctggtaataatgggtaaacaaggagtctggggcttataactgggacagtgagttttacctgccacaaggagtcctgtgcctgtagagagtttctatctttctgtcttaaatatctcaggtctctttccatcatctcttttacctctaagaactcataaaatgagtggagtctctgaacatatttttttttttttgagacggagtctcgctctgtcgcccaggctggagtgcagtggcgggatctcggctcactgcaagctccgcctcccgggttcacgccattctcctgcctcagcctcccaagtagctgggactacaggcgcccgccactacgcccggctaatttttttgtatttttagtagagacggggtttcaccgttttagccgggatggtctcgatctcttgacctcgtgatccgcccgcctcggcctcccaaagtgctgggattacaggcgtgagccaccgcgcccggcctgaacatatttatctcttgtttttcctctcattattttactctccgaacatatttatctcctgtttttcctctcattattttactctctgaccaatatttggcatgtctgcccttttgttcagaaaactgaaatttaaaaaaggaacatttactagtagaactaagagaaaccaaggaagattgtactaaaaacctttggtactcttctgttatactaggttttagctatgttcaaatgactcagaggcccatggatttgtggagcataaaatagaatcttgcatgagttggacaggttttctgaaataagtctcatagccaatgagcatcccagtggatcaccccacactgtatctgaaactagctttggttttctgctgaattctcatgaagttatttaaaaagtatttttttgtgtgtgaaaatttgctatcaaatgagagataaaaatattagtaaagccaatgtcatgctcaactagaggtgtgatgataaacataagacacgactcttgagagaacagtgatttggtggaaaagtgatttacaacaaagccagaagcctaatcctgtgattgttgaaggcatcctttgcacagtttccacacaagtaaattcacaacttcagagattcccaaaagttttgttgataccaaaataaataaaaaggaagaattcatagagattagagttatgaattaagtccagagctaaacatttagacagaaatgttttttgttagcatattraaccttgtatcctctttctgtctcacctgaactgacttgggtggctcctagggtttcatttttggggagcatcattaagactttttttttttttttctgagacagggtcttattctgtcacccaggctagagtgtagtggctaggtcactgctcactgcagcttcgacctcctgggctcaagtgattctcccatcttagcctcctgagtagctgggaccacagcgtgtgctgcagtgcccggctcatttttatatttttggtagaggtggggtttcgccatgttgctgaggctggtcttgaactgctgggctcaagcaatctgccagccttggcctcccaaagtgctgggattacaggcatgagccactgagcccggcctttaagactgtctttcagctcctcggaggcaaaggtttttccctctctggacccacagagccagcagttttaggcttctgcactggcttagcagattttgtccattttccaggtttatgatgttctgcactttctctctgatccagcattccctctagtagatcttgttcctcctctaccccgacttgcccacctccctctagtagatcttattcctcctctaccccgacctgcccacctccctctagtagatcttgttcytcctctaccccgacctgcccacctccctctagtagatcttgttcctcctctaccccgacctgcccacctccctctagtagatcttgttcctcctctaccccgacctgcccacctccctctagtagatcttgttcctcctctaccccgacctgcccacctccctctagtagatcttgttcctcctctaccccgacctgcccacctccctctagtagatcttgttcctcctctaccccgacttgcccacctacgcctggttatgcattaaagtttacaactggtcttccttggtatatccagctactcttgatacctgggtctcaagtcatgtcttcctaattagyagccaggtatctgaggccaccatgggwgttatatcattttggtcttcacccaagttctgttctcttcactaatcaagaagattgactgccctctccagggtagtcatttgtagctccacttatccctctttttaagcattttccctgtccctggtggctgggtgcctgtgtcctgcttatgayaccaggaacagatgactcttctgttcttcctgcttccttgggtggaaactgcaaaggatgccttccaaaatcagcttattatttttgtggacccaagatctgtagacagctagccagtgcccatctcatggagagagggtattctaagccagatatgatccaatcccatgacttgatctgtaccctgcagggcatggcctttctccacaacagcattatttcatcgcatgggagtctcaagtcctccaactgtgtggtggatagtcgttttgtgctcaaratcacagactatggcctggccagcttccgatcaactgctgaacctgatgacagccatgccctctatgccagtgaggcccacccccacaacccactttttatattgctcctctttccacctagggatggtgggagagggaggtggagtgacagtaatatagggatgagcccaggtgggcttgggggtgccccatttcgggggacctggccagccggtttcctcttttcagagaagctgtggactgccccagaactgctcagtgggaaccccttgccaaccacaggcatgcagaaggctgacgtctatagctttgggatcatcctgcaggagatagcacttcgcagtggtcctttctacttggagggcctggacctcagccccaaaggtaagagtcaatccactacccacagcctcttcttcctgggggaactctgttcttcatccaaacctttgatcaccctcagagattgtccagaaggtacgaaatggtcagcggccatatttccggccaagcattgaccggacccaactgaatgaagagctagttttgctgatggagcgatgttgggctsaggacccagctgagcggccagactttggacagattaagggcttcattcggcgctttaacaagtgagagggcattatggggcaggggcttcccagggatagaagactcattagtcctagtgcatgaagtggggcaggtgggaccagagggtgggttggataggaagtcctgggaatcttcakaatcttagagcaagtgccttatcctggcctccctctagggagggtggcaccagcatattggacaacctcctgctgcgcatggaacagtatgccaataacttggagaagctggtggaggaacgcacacaggcctatctggaggaaaaacgcaaggctgaagctctgctctaccaaatcctaccccagtgagactttgtcccccttcctgtattttcttttgggattctgctctgttgggctctgcctcatcaggcacctgagaactcgcctccccaccctcagaaccctgctggccacagggagcacccctgcttatagattatttgctgtcattctgtctccacatcagctatgctgccttcttactggctgcccatcccttcttcttaagaccctgctctaccacacccttgcttcagcaagtgtatgtaaaacagtcccaacttgagacagctcccatgcacagggattcccctcaaamccccccgccacttgtgtgccttaccttgcattagactgtaatgtcttcccagccactttcctccctcccacctgaaaagcctagctttcttgttacagctcatctctgctgcagccacatacactttccctctctcttccactcctgctctcttggagtttggctcatacggcacccttgcttcctagttcagtggcagagcagttaaaacggggagagactgtacaggctgaggcctttgacagtgttaccatctacttcagtgacattgttggcttcacagcattgtcagcagagagcacccccatgcaggtgagagccatgggtgagaggtggcgggtggggttgggtgggtagggacctggggaagcctcattgataataggaaagatgagtttgttctagagttcccacatcttttgatggcttgtgggttaagaattcttagaaaattgggcacaagtctcagggcctctgcttttctatcccttttaggtagtgacacttcttaatgacctgtatacctgctttgatgccataattgacaactttgatgtctacaaggtgagagctgttcaatagaagaccctttaatagagacccgctttgaaactcagtctccctgaaccccacacaccttacccaccccatgatcagttttccctccagggtactcagcatcctggtgctggagtgtacttygtagacagatgtagctccagcactataattgtacactccagtcgaatttcttgtgaatcctttgacttccctaatcagaaccatcatgagatttagctcctrtcttcctggagtataaatacagcctatccaacatttctctccagtcctctccagacatggaagaatcatataggatgtgggtccagactgatttagtggggtgagggaaaatatattttaaaaagtaaaactttttgttgaagttattgagttggatttattgtccttgggagtaaaaatcatctggatttgaatattggcttgttgctaactgtgtggccttaggtaagtcacagaatctccctgagcctcagttgttttatctgtaagatgggaataatagattcgttgtatggaaagtacctaacattgtttggcatgtggcagactactatttagggataactactttatccctaaatacttagtgtgtatttcctaaaaacttcactgtgtatttccttaaaacaatggcatttattctcttacatagctttggcacaattaccaaaatcaaatgcctgctttcctcctctctgacagtttgggctgtcaggtccatttcactgggcctgctttacctcctcaccagcctctgtcctcttgagttaccgttttcttgcttcccatttcctgatggcagagcctatttgtccatgtcctgctgcagacagggtgttcattcattccgcaaatgtttactgagtattcaccaggtgctgggtggagaaagaagacttaaagattccstagacatctcctctcccctagactcaggaccatggcacttattttctagtcaatattctggtctccagcatgtcaggatgattaatgatggtgtcaagcttgtctccctctactttttcccatccccatggatataaatagaggtgaccttttaatccccctctcaatcaggtggagacgattggggatgcttacatggtggtatctggcctcccaggccgaaatggtcaacgccatgcaccagaaattgctcgtatggccctagcattactagatgcagtttcttcctttcgcatccgccaccgaccccatgaccagctgaggctacgcataggggtccatactggtaaggctgactctcactccagccctagtctccacctttcccagactctcccaacctgtttcttctcaaagggccagtctgtgctggggttgttggcctgaagatgccccgttattgtctttttggagacacagtgaacactgcttctcgaatggagtctaatggtcaaggtaagacattagccctcaaccccactgttggcctcaatttatcttgcccttttcttcttttcataatccctccaatttcttaatctgagagaccacagttccttagtgtcgcatcctcgggcatattttggttctaatagatatgcattgggaggttgggcatattttggtcctaatagatatgcattgggagcttcccagggatggttggtcgggcacggtgctatacagtatcaccaattatttgattgccttttctttgattcctcattccaycatcctccccattccacccaccccagcgctgaagatccatgtctcctctaccaccaaggatgccctagatgagctaggatgcttccagctagagcttcggggggatgtggaaatgaaggtgatggcaggccatggggaggggggcatggaaagggagggtgaaagtgattatgggaatcatagggaaagagagggagacaargggactaacatcgaagcatctgaatcatgtccactctcccacttccagggaaaaggaaagatgcgaacatactggctcttaggagagcggaaaggacctcctggactcctgtaaacccccattctttccaagtcagatagtcttctgctgctggtacctgggtgggcaatggccaccatgtctgcacacaccagaaatggacattttcatatgcaatggaaaacagccacaaaaaaacctaccttatatggaagttgtagccctctgcagctcagccctgtacatatacctgtccctctctggcttggtccccttcctccctactttctgtaaatatctgtatctaaaccagaatattttggtcaaatataaaacaataataaaaaaagttctgatgtcatagtgtgggataggggcaatcccaaggaaaggttatggggtatgcacacagtgactcacagaatcactaaattagcagtcttgggatgagagagaaccctttatgtaaagcctcttcaagtacagtgagaattaacttcctcccgacctctctagtgcagacagaaatagattccatattccataccccacttccctcctcacccctcagaaaggagtcattctcccccctccaccacccagccttcctccgggacagggaagggaagatatttctcccaattggtaggggtaattctcaggttcatagggcaaaagtttccccagagacaagggtactggtgttgagaagctgcagttcttccggaatggtgtgtccaatgtcctgatgttactgacaccctggaggagtgccaggatgaggatggatcccactctccccaagccagaacaaaacaactctgccctacctttcctgccccgctctgcccccaacacctagtcaccctcacacaccggcagctgtggtgccctctgtatccagaaggtctcaggttgctcctggcggtagtcgtgaggctgtgagggagggtactgagtaactcctggccttcagccctctctctcaacctctgggcttggtacttggccacagcctgtcagagcccagctggtgcaagtggcgggggatggggggtgggttctcacctttgttggggcaggagtccctgcttgtgccagctccattcggtagtcatggtgtgtcacagactcaacctcgaagagcttccttgtgggttcctgttctgcctgcacctctttactatgtagcccgaggggtgtcaaggccattctcacccaatttttctcctccccatccctcttcccctttacccaatcccttaccagatctgatgctgcaggagcatctccagcatggcttcacgcttccctgtgagagagttggggggtgggcaaggtggggtctggttaagaaggaggcccagaagaaactaacttgagaaaaggaagaagaaccttggggttccgcccttatatccactggagaatccacagccccaccagaaattccttcctcttcttccctctgagtaatgggctcgttctggcctaccctctcacatttcacacctcgaagtggccaatagacgtttcctggtggctggtacgagtctttctgggtggtgctggagggcatgggtgactttagttgcatagtcagcagtccccggtgtccgtgtcrgaagaaaaaactctcagagccatcctgcatgcttgggacttgatccaggtggttggtggctctctgtggatcccaagttgaatgactataatatcccttctggtacccaccctcatgtaaactactgcctcccctaagaaactgagggcagccttcaagaaaagggagcaggccaaaactttaatacctcttcctcccagttgtagaggaggcactggccccgyggcaaagtttcatagcaaaccataagcttccctttaatgtctgggggtttccatagtcctcgggcacccggttctaagacttgcaaaaattcccaaggtggttgtttctggggctcccaggggcagtgctgactccaggaggtatagttagggacccgatctgccaccaggtttctgaaccctggaggaatacaggggctgagctcagagtcagggccagtgtctggaccaggcccagaggcaggaccaggatgagagccagagccatgaccaggaccagagccaggaccagagccaggaccaggaccagagccagagccagggacagagccacagccaggaccagagccagagccagagccatggccagcacctgagctggaaccaagaacaggcccagagctagagcctggaacagggccaggattagaactatggtcagttgtagtgcaagtgtcctgagcaatacaggaaacatagacgggctcaaagccaagactcccatgggctatattgtgggtaaagccgggtcccgcacagggctccccaagaaggctggggtcagaggacggctccatgaactcagaacagggcgctggggtctttgtagataatgcagctgctttggcagtggtgaaggctgcagtagctgcagcagctgatgcagccgctgcagctgctgcggttgcagctgccagggccgacctgggactgtcatctgaagaaggaaacggttccgaagtgggccccagtccttcggagctgggctgtatgtctaaagatctgaaagaaagcaaacacgacatggctgtcaaaagcgcagcagaggaagtcagctgaccttcctcgtccccttatgcctgcagccagagctgcggctctcaccgcgaccgcgaccgcgatccctccgtagactcgttggtctccatcttcagactccagctactgggttgccatagagacagcaaacaactcctggagcctgcgcagaagtacagctgggcggacttgcaggtggcggtggaggcaagtcctctgcggggcggaagtcttcagcctagtgctgttagggaggtccgctttccggtcccggcggcattccgcctcagacggggttttagggttccgctggcttaagacctcgccctccacgtccaaacagtctttgcgtgcggttttctaagatgatgctttatggggatatgttggaaacaggcacagggttgtggcattagattacagcctacttggtgtttgctgagaggcaagtagcttccccttagtttgcttagttcattctcaaaagtgagtggggtctttaacaaatgttaaggatgaaaataaacaaactagcttgagcaaaatggtgagacgtagaatagtgaaaaggcagccgcttttgtttgggtgtgattactcctcctctaataaaagaccctcatattgaccaccctcctcctaagcgcccttagaacctggtttgacctctgaagaagggccaggattggctttcagtttcttcctactcatttaggctcattcctactgttacttttctagaagcttgacctagggtggaccacttgtcaagaagacttacatatctgcaggcaacatttaaccacaggttggacctcctcagtgtctttcactcagaccagtcaaggggcatcatagccctgaatcagttttctttcccctttgtggtataaaattttatattaaagacaggagagcataattaagggaraacagttttattagcatcacagggtccatttttccctttccatccaagcatccagagtctggtgtcctttaatcagttggcaggttcaacctggaggccactggagctgccggcccccaagtacatgaatgtgcagatgatacacagattgtgcacccagcttcccatcgttgatcactgaaattgagcttggggttagggagtcaggatcatggcagaggtcgaagaatgaagatcatattgagaagtaggaatgagaattcataggtgagggaccaagggccaaaagtcactcaccaagtcggtatccatctcccaggccctcagcctttgctgtctgcttggccacaaggagtaggtgtcctagaagctatagagagagcggagggacataggtggcttcattcatagggagcaagacctctagctgggtccaggggctcctcccagccaaaccctggccctgttcttcccacctgctggtcttcttcttcagcctggctaatccgaggaatgggcttcttaggaatgaccaggaagtgcacaggagcctgaggggccacatcacggaacacaagacactgggggaagtgacaggccagaggccacgttacttcaacaggttggatggtatctacaacattcctaaggggataggtcctaagagcaccccacctgctggtcctcatagagaatgtcagctgggaggctcttgtccaggatccgggagaagatggttggggctgctcccccaggagttgcctgctgggccttggccacttcattcccatcagtcacacctgcagctcctcggacctgaaggtggatcgaccatattcaaaggagggagctggcagaagctgggctctgatagttgttaatttcgtccttctaataacctattcatcgttcccacccaggaggaaagttcctgaatttcagagcaccagcagcaaagggtagggccagaaggtgctggacctggttagataacaggcggtattattatcaggattcagcagtgcaattgattcctgctcatgtgtccacgaaatatagcactgtttagggaaaggatctagaatgagagactggggattttggtctcagttcctaccttaccataccactgaattacctcagataaattccttctctcagcttctaatataaaataaagggatggtttccataatctcttgcgatggcttgaatctctttccactctcaccttgttagtacatttccacttatttccgttacttgttttctgatctttaagccttgtcgcctgttttatttaagttttaatgcaatcgccctgtttgacactagttgacccctcatctgggtgtcacatgtgactctgtgaattttaactcttgtcccttgaatgagtggaggtaagagttcagctaagtgacctctgctcccctagccccagggaacttcgggtaagggattcagagaaggctgatgtcattgcatcacgttgggggagaacgggacggaatgaattctctgacctccgagccgcttctggcaagtgcagaagagaggttaacactagtgctcattaggaggccagaagcctgaggagggcagagcactggctccaagaagagaaagctcatttcctgcagggggcatcgggccagctgggctgcaggcagtggaaagaaggcggcagccgctgcactgaccctgtcccgacctcggcgccccggcctgcgcagggcgggaatcagcaccagctcgttctccggagccaccagttcgacctcaccacacagccccggagcttgtgcctcggaggggcagaggccacaggcaggagctctgcgcggctctgcgcgccttcgggaccccctggccccggatggcttcggagcccgcaggaccccctactcgctcccgcgccacttctcacctgccccccgcgcacccccgtggccgccacggctctgcgcgccgcgcgcaacccagcagccagcaccacggctgccgccatcttccctgagccgcgggaacctctcacccgggtcagcactcggctccgcggccggccgtgggtggggactccgggcgcggggaagcggggtagtggcggccgggcgagccctgctaccccattggagcgcgcctctgagcacgattcaccccattgcctctgcagccactttggaggcgggctcttttcatctcattggctgcttctaccaacgcgaggacaattttccattccattggtttcgtcttctagtccgtgtgaacgttcttttcccattggatccccttactagtttctctgtgagagaaacttccactccattggaaggattaatrgagcctggaggtgggattttctcctagttgaatctgatacacaattctggcttctaggttgcggctcccgagtgggtggttcttttcgttcttggttcgtcctcttcaggtctggttcctattggtgcgcggggagaagggggcggggctccgycacctgctgcagaaagggctgttttagaccctctcaccgctttggccaggaggagggcggggctctgagggcatccggcgcttattggctccaagaaccacccggggtggggctaaaggtgaacggggatgaggtgtgtttttttgtttttgtttgtttgttttaactggcggggctgatgcgcagcattttctccacaagggcagtttcagtcccttgagcattttggagattttaatgtacttatctaagggaaattcttcc

SEQ ID NO: 95512 - DNA, 98560 bp, Homo sapiens
cctcagggccattgtaaggaagaatgttttgccttcatcagaccacaggtttcaactctgacactcagctgtgtgactgtgggccagtaccttccacatgagtcaattacctcatctggaaagtcagaataacattccctacctcacagggctcttgtgaggcttaaagaaaatgtgtgcttcaagtgctgagctcagggcctgcagccagcaagagctcagacagattagctattgtttccatgtttaggttttttttttgtttttttgtttgttttgttttgttttgttttccgagacagggtctcactctgctgcccaggctggagtgtagtgagccatcatggctcactgctgcctcaacttcccgggctcaagtgatcctcccacctcagcctcttgagtagctgggactacaggtgcacgccaccatgcctggctaattttttttttttttcgtagagacaggacttcaccatgtttcccaggctggtcttgaactactaagctcaagcaatccacccatcttggcctcccaaaatgttgggattataggcgtgagccaccacacccagccaggaactttaatctttttttttttttgagacagagtttcgcttttattgctcaggctggagtgcaatggtatggtctcagctcaccgcaaccttcgcctcccaggttcaagtgattctcccacctcagcctcccttagtagctgggattacaggtgccccccatcaaatctggctaattttgtatttttagtagagacggagtttcaccatgttggccaggctggtctcaaactcctgaccttaggtgatccacccgtcttggcctcccaaagtgctgggattacaggcgtgagccaccacaaccggccgaacttcaatcttaataggtgggtttggtctcttatttaggtaacagacttggtcaccctccccattccacagacacggtcactgaggcccagaaaagtggctttcccaagatcacccaactcagagtggcagagctacagtattcattcactcattgtatattcaatgcctgctttgtgccagagctaggtgcccaggacagggctgtgtacaaacagatagaaatccctgccctcaggactgggcatggtggctcatgcctgtaatcccagcactttgggaggccaaggcgggcggatcacctgaagtcaggagttcgagaccagcctggccaacatggcaaaacctcatctctactaaaagtacaaaaaaattagcagggcatggtggtgtgtacgtgtaatcccagctacttgggaggctgaggcaggagaatcacttgaacccggggtggaggggaggttgcagtgagctgagatcatgccactgcactccagcctgggtgacagagtgagattccatctcaaaaaaaagacatccctgcccttagccgggcatggtggcatgcacttgtagtctcagctattccggagactgagtcaggaggatcgcttgggcccaggattttaaacccaggggtctcttaaaaaaaaaaaaaaaagccaggggtggtggcttatgcctgtaatcccagcactttgggaggctgaggcaggtggatcacctgatgtcaggagtttgagaccagcctggccaatatagtgaaaccctgtctctactaaaaaatagaaaaattagctgggtgtggtggtgcgcacctgtagtcccagctactccagaggctgaggcaggacaattgctggaacccgggaggcagaggttgcagtgagccgagatcacgtcactgcactctagcctgggcgacagagcaagactccgtctcaaaaaacaaacaaacaaaaaatctctgccctggtgaagttccccttataggggataggggatggacagggaatgacactatacaaaataaataagtgcactaaatacatttgttaaatgatatggccaatggagagaaataaagttgggagaggcccatggcgagcatggggaagtcagcatgttcaacagggtggagaggtggaacttgagcagaacccagaggaggtgaggagggtactgggaggaaatgcggggaagagcaacccaggcggaggacatagcacatgaaaatgccctgtggtgggtgtatacctggggtgtttaggacctctggaggccagctggaaggcaggggtttgtgctctgtggacactgtggacactgaggggcagtgaggccctgccagcaccaacatccttgctggtgtttcccaggctggcctaggctgtggacaactgggttcaggtaacttcactcccgtgccctcttcccagcaagtagtaggtccttggggaaggggcttcttccaaagctcagggcagatgggagtggggagggaactcgtgatcagggcacacatctccagatgacctctcccctgccccagttcccaccctggctaccctcttgttcctggagccaccaggggtagaatgagggcaatcaggcctgagtctatgaagtgggtgctgggcattgcggccacagcccctcaccaccttcctggttttaaagcactcccagtgacaatatggtttctgataacctgcagtacctgctgtctggggagcagctctggccacccatcctggcccctgcccacccatctcctcccaggaactctggcaggtccctgagctgtcagccagctctcctggcccccagtggtgtcctaaatcccagcagcatgtccatgagtgtgaccttaaccaccagatctcaattatatagaaaggagagaaacatttttttctttctttttttttggagacagggtctcactctcrtcacttaggctggagtacagtggcacaatcacagctccctgaagtctctctctcctgggctcaagtgatcctgccgctttagtttcccgagtagctgggagtacaggcacgtgcaccacacccggctaatttttttttggtatttttttttgtagagatggggttttgccatgttgcccaggcttgtctcgaattcctgggctcatgcaatctgcctgccttggcctcccagagtgctgagattacaggcatgaaccactgcgcctggcctggacattttcttagaacccactgtatgccaggcacttttgtacgagttattacctctaatcctcacaacagcctcactcgagatattatactcaagagatattctatgatataaatattattatgttttatgaacagaaaatagattcagagtagggaaaggtttaggttttacccaaaggcacccaataaacacatgttaattttagcactaaaaccccattttaatgattgctgggagtttctgcagcctgattcataattcaggagccagggaggtggggttagagaaaagagaggccatcaggaggtttgccctgggagctgttccatgataaatggtttcctatatctgaagagctcaatcaaggggcaaagagagataaccctgaaggtagaaaggaacttttgtttgttaaagcttcaggaagggtgactttgggttaatgggtatcatgactttgggttaatggacccctgtccatcagtggagcgggcgacctcaagaggtggggaacctctcatcactggcggcacgtaagcagaaccaacttttccatttgcccaagatgccacagaaggaatgtttcagtgagggaggttggcctggataatttctctacaagctctcagacttgggaacttttgaaaggctcaggcaagtacttgtgccccaaagtatctttggcagggttttttatttttatttttttagatggaatctctgtcgcccaggctggagtgcagtggtgcaatctcggctcactgcaacctccacctcccaggttcaagtgattctcctgcctcagcctccttagtagctaggatcacaggtgtgcaccaccatgcctggctaatttttgtatttttagtagagacggggtttcaccatgctggccaggctggtctcgaactcctgacctcgtgatctgcccgccttggcctcccaaagtgctgggattccaggcgtgagccaccatgcccagcctggcccaggctggagtgcagtggcgcgatctcggctcactgcagcctccacctcctgggttcaagcaattctcctgactcagcctcctgagtagctgggattacaagtgtgcaccaccatgcctagctaatttttgtatttttagtggagacggggtttcactgtgttggtcaggctggtcttgaactcctgacctcatgatccgcctgcctcggcctcccaaagtgctgggattccaggtgtgagccaggcaggaggtttttatctgacttgtttcaagctgcaagtctgtctcctgggtggggtgtttgcttttcacagaggaagggtggcccaggttgggtaggctggagtagaggatcggactgcatcagttctggtgtgacctcttacggttgccttactttgttctcagataaagcaaacgcacaaaaatttgttttctgggcttaacaaaacaggagtgaccagttaggtcagaagactggaacatcagtgaagtggatgtgtggtaggcggaggggaaagacttgctagaagccctcccgctgcggggggctccttcagaaatggctctgcctctagcagctctgcctggacactgagcagggaaagggtcccgacactcattagtaacagtggtaagtcagagaaccagccctgagcctgtgtccccagccctgccgggggccaatgcctactgagcacttcccacaggccagttcctgggtgatgagttttaccaacatgtatttcccttttacttttgaggaaaatgaaggtgggctcagtcacagagatagtgcatgctccaaagccagtgtctttcctgtctcctcggttggcctgccccatcctagcgatgttgtgaagattgggactacctctaaagcagcacacagtggctgctcagtaaatgctcaacactggtaggtgctgtgggccaaggtggagagaaacgggccatctggagcaggaagcagctgactgcagaagtcctgtctgggcccccagcagtctgggtgactgagcaaatcttggaacctctcagtctatttccccatattacataacacctggctacaaaagggcttttttcttttttgagagggagtctcgctctgtcgcgcaggctggcatgcaatggcaccatctccgctcactgcaacctccacctcctgggttcaagcgattctcctgcctcagcctcctgagtagctgggattacaggtgcgcgcaccacacccggctattttttgtatttttaatagagacggggtttcaccgtgttagtcacgctggtctcgaactgccgacctctggtgatccgcccacctcggcctcccaaagtgctgggattacaggcatgagccaccacacccggcctacaaaaggggttcttctgggacccgatcgtctaaactcttctccatttgaccccctccatcactactccacagctcaccggtcttttctctgttccttaggtgcccgtcctgtctccaggcctttgtacataccattcgtcttgccttgtttgccctgccctcacacttggcacatctggcacctcccctgcacattctaagacagcatccttccgtaccatttgacccaccccgttttttccaccacagtactcatccatattataaccctttattcacattttgtcttttatctcagtcaggaggaagcgagggcgggggactctgtgttgttccctaccgtaccctcagcgcacagtctggttcagaaaatactcgagagtgaatgagagaatgaatgaaggaaaaaatgagtggaggaggggtctttggccgagctaaagagcctgggcgccgcgggggcgggaagctctaggcagtgctcgtcgcgcaccgcccccagagtaaagcgaatttcagaagagggcgtggggccctgggcgtgtggggccctgggcgtgtgtgacccgggccaagtccaagtccgcaggaggctgcgcgggaagctgcttatagctacgacccgcggcccccggcctctagccccaccgccgccaggcaagggcagggacgccaggtcagttacaggctcgggtgcggcagccggcgaccaaaggcactgggcgggaggccggatccaaggggatactgctacgtagctgcagcggaaccggcaggctctgcggcgaaacacactgggacttgtagttctcggctcctctagacgctgtcgcgagcccccagataaagaggcacttcgcggtgacrgggaactacatttcccagaaggccggaatatgttgggggtcaccgggaaagcgccccgactggcggcacttacccggctctataggtccggttccgggggcgcgtggctgcagcggggcccgcgtggtgcctcctgaggcggcccccggatgaagagatctgggaacccgggagccgaggtaacgaacagctcggtggcagggcctgactgctgcggaggcctcggcaatattgattttagacaggtactgaccgcaccggaccgccgcggaaactgggagagggatctgcaaggcccgaggggcgtgaaggcttgcggcgcctcaaacgctgcggggcggggccgccagttcccaggcaatgggggcgtggcgtggcgggggtgggggagccgcgtgcgggagcgccggctggtgtctgtgtgtgtgcgtgtgcgcgcgcgtgtaaacctcagattgcgtgtgtcagagacgggggcgttcctgagctcgtctgattgtgtgcctgtgtgtggccctgagattgtgtgagactcagaggttgtccgtgttagtctttgggattgtgtctcactgaaattatgtgatgctctgagagtgtgccggagagtgagtgtgagtgtgtatgaccgaggctgtgtgtgactgagcgtgggcgagggtgaaggaggccgattatatgtttgggagtgtgttgtgtggcccctgctcccgtccatcccccagggtcaggaggccagcttttgcccagaggcaagagagtggtggggaccctgcctgtctcccagccggccctgggcaggctgcagaccaccacccagccgtttcggggccataatgggtgcgaccggccccagaagctgggggcctggcttgcctgctgaggctgccctctgcagagtcctaggccagagagtgcctgtcctggcatctccccaggctcccaattccaatggattccaatttccaacctctcttgcattctcccttctatcaaagcttcctcttagatgctccatttacctttttcatcacccactcttcatgaagcctgtaaggcacatctctgccccaarcagcttctaatccagttctttcgctcccttcattccttactcacatgtgcatttattcactcactgatccagccagtattgattcagggccggctgagggcctcgtgtcactcagaagtttaagggcacttctgtcactgagctttcattctagggagggagattgtaggcctggaaagccagagagttctctgaaggagctaayaccagttagtgttttgaagagtagctgatgggaaggcgggattgaaatcccaagagagcctgttgccgtatctgcgagggagggacctgggatctgagagccgaaaggtcagtcagtggggcaagattccccagaggagggaggcagttgcgaagccctccaggaggcacaggaggagatgggccgctggccctgagggagcgcaggaccgttggccagatgggtgctcagcagaggacaggaagaagactattactttagtaaactgtccattgaattacaacatgcagtcagatgagtgatgggtcctacccctacagctcctgcattttcaccaggtgaacctgtatctgttaatcctcagatcaagatggggggtcatgatcacctccaggggctgccctcagaagccaccgtgtagaagggtgggtgggggagccatgtagaagggggggcagaatgcaagggggcagtgtccctttgcagacccatctaggggcctgccccagggcctgccagtgggcaggggagactaaccgggtgtgtgaggggtgggcttctctgctctttctcctttctccccagggctgtgcagctggagagagctggggctggggttcgggtcagggtgacccttgttgactaacattctgcttttcttctgctgtccttgttggtgcagttaagcttcctgttgccaagggatttttcttaaagaaagaargaaagaaacatacaacatacaacattacatatttgcttatgtggtagctctactccctcctcaatcaaaatctccggttttaaaatatgtcagtccctggcctgggagagttgcaaggtttttgttcaccccatgggcgtctgagctgcaggatctccggtgctagccctgtgctgctgtgctgtccagtagaaacatcgtgtgccacatgcataatttaaacctttctagtagccatgttaaattagtgagaagaaatggaaaatagcaaagaaatagaaaaataattttgacaatatattttattgttaccaaaatatatatcagacatattttgtcctgtggcattccaagcttgtggcactgcctgtgaccagtggctgccatgtcataccaaacagtgctgctctgggtaccatgccctccaccagctcttttctgggcctgcttcagcaggtacagaatcttgcttttgtttttaaaaaaaaaaaaaaaaaaatcagctgttggggctgggcacggtggctcacgcctgtaatcccagcactctgggaggccaaagcaggtggatcacctgaggtcgggagtttgagaccagcctgaccaacatggagaaatcccatctctactaaaaatataaaaagttagccaggcgtggcggcacatgcctgtaatcccagctactcgggaggctgaggcaggagaatcacttgaaccccgtaggtggaggttgcagtgagctgatatcacgccattgcactccagcctgggctagaagagcgaaactctgtctcaaaacaaaaacaaacaacccaaagaatcagccattgggctgaggagttagggtgaggagtgtgcccgctgcagccccactgactaaggcccttttgctccttgttgccctccctgtcaggattctggagccttgctcctcagctgggcagctgcctgaaggcagtggggtggcagatggatgagagcagggtctgcatcttgctgtccacaggcmggggcacctccaggatycagaagatgactccagtagggcctaggggtgcgggcacccaggctggcagagcacacygaggtcctcagagcaagggcacatgcccaggtctcaggtcccttttccatagcgaatcacctgctcaccagagcgggtgagtgatgatgtctccagcttggtgttggtgtcaagaagaatggggacagtgagggggttatggtgaagaccagaatgagatgaggggtgtaaagctttatgaagtatcgagtgcagcccacctaagggtggtcctcaagaaggcaaagcccttgtattcagaaggctgagagacctggggcaggggacacaggtccctgtgtgtaatatgggcacccgagtaagaccctggaggcaaagctccgatggccgatgcggggtatcttgactgcctttcagggaaaaatgtttgcctttatccaaaatcgtttccaaaaatcttttgattgtattactttagttgaaataaacattaggccgttatattagatgagttactctgtggtgttttcaaggccgtacattttgtcttcagtaattttggcatcagccaagacagagcagggttgaggctttccgtggctgctcatcaaaacaatgacagaaactcttggagcttgtttcccctgcctctgttgagatgacactgtttttcctcattaagctgtaaatatgaattccattgatgttttgaatgttgaactagctctggattcctggggtgatctctggctggtcctaacatattatcctttgtatatattgctggatttgatttgctctaatttttggggggatcttctttctttatctggtttcatttgatttaattaatttatttattttaagacagagtctcgctctgttgctcaggcatgtactcaggaatgcagtggcgtgataccagctcattgcaacctccgcctcccgagttcaagcaattcccccacctcaggctcccgagtagctgggattacaggtgcacctaccaccacacctggtttttgttttgttttgttttgttttttgtatttttagtagcgacagggttgttggccaggctggtctcaaactcctgaccttaagtgatccacccaccttggcctcccaaaatgctgggattacaggcggtgagccactgcacccggcctggttttagtgttagggtaatacagtgagttgggaagtattgcctccctcttccatattctggaagagattgtgtggaattggaattattttttccttaaatgttaggcagaattcatccaggaaaccatctgggctcaaggctttctttttttaggtttttaagccataaattcaaatcctttaaaagataaaggattatttcttgaatgaattttgacagttgtgtcttgcaaggatcggttcatttcatctaagttacttaatttgtgttattcatagtattcccttattattactttaatgtttgtgaggtcagtagagaagtccccccttttatttctgatattgatattttgtgtcttttctctttttttcttggtcaggctggctggaggtttctcagttttattgggaaaataaattttccccaaagaaccagctttgggtgtaatttttttttctctattgttttcctgttttcaatttgattgatttttgcttatctttaattttttgtcctgcctcctttgggtttaactcattcctctttctctaatttctttctttctttttttgagacggagtcttcctctgttgcccaggctggaatgcagtggtgcaatctcggctcactgcaacctccgtctcccgggttcaagcaattctcctgcctcagcctcccaagtagctaggattacaggcgccctccaccacgcctggttaatttttgtatatttagtagagatggggtttcaccatgttggccgggctggtcttgaactcctgacctcaagtaatctgcctgcttcagcctcccaaagtactgggattataggcatgagccactgcgcccagccactctttctgtaatttcttaagggcaaagcttatattcctgacctgggacttttcttccttactaatagaagccctgccttagccgcatcccacagggtttcatgtgttctattctcattttcattcagttcaaaatgtttctagatttcccaagacttcccatttggccctcgcgtgcattctttccacgatcgctttctgtgactgatttcgagtttaattctgtggtggtttgggagcatactgtgtatgctttctattcgtttaaatttaaggtttgtttggtggccccaagtgtgatctgttttggtgacaccagagactgcaggctgttcccaaggctgccatgtgctgtggtcaggtccagccactggatggcgctgctcaggtcagctgcgtcctcccgattttccacctgcgtttttttttttctttctttctttctttctttctttctttctttctttctttctttctttctttctttctttctttctttctttttctttctttctttctttccttccttctttttctttttctttctttctttttctctttctttttctttctttctttctcattagattttttttaatgggtctcaaaaatctgtgacaattttttttttttttttgagacggagtctcgctctgtcgcccaggctgaagtgcagtggcgccatcttgggtcactgcaagctccacctcccgggttcacgccattctcctgcttcagcctcccgagtagctgggactacaggcgcctgccaccacgcccagctaatttttttaattttttagtagagacggggtttcaccgtgttagccaggatgatctcgatctcctgacttcatgatacgcccgcctcagcctctcaaagtgctgggattacaggcatgactcaccgcgcccggcccgacaaatttttggtcaagttgtttccattcaaaagtactgattttaaaaactaataacttaaaactgccacaggcaaaaaagaaaaccaaagtggtccacaaaacattttcctttccttctaaaggttttatgatgcattgttatcattaaccagtcttttactactaaatttaaatggtcaattgaaacaaacagttctgagacgttcttcaccactgattaagagcggggtggcaggtattagggataatattcatttagccttctgagctttctgggcagacttggtgaccttgccagctccagcagccttcttgtccactgctttgattctctcagtcactgagaggaccatggagggccctaacaagaactgtggatttgtcttttccaccctttagttctgtcagcttttgcttcatacctcacctcacttctttttgttgttgttgtttgtttttgagatggattctcgctctgtcgcccaggctggagtgcagtggcatgacctcagctcactgcaacctccgcctcccaggttcatgcgattctcctgcctcagcctccagagtagctgggattacaggcgcctgccaccacgcccggctaatttttgtatgtttagtggagacggggtttcaccatatcggctaggctagtcttgaactcctgacctcaggtgatccacctgtcttggcctcccaaagtgctgggattacaggcgtgagccaccgcgcctggccactcacctcagttcttaatctgaagagtgggcatgcctcgcagggttgtcaccaggactcgatgacacagttgtcacagccagcgtctgtctagccatgccccccgccaggcactgcgctgagtgctttccttgcactttctcatttaatcctcctggcgtcccatggcacctctaccattcccacctcccaggctaggaagcggtgctcagcgaggggagatggctgcccgccgtggcacgggcgtccttgtctcatcagcactctgttctgcctcctgcaagtcccttgccagagcttggcagctggttcacttccgagtgaaggttggctggcttattgttactattgtcttcaaaatacaatgtgtatttacacagagacacagtagcacctagcaggttctgtcctgggccctggaaggtaaaggtaaagaaaaggaagatggctgggcttggtggctcacacttgtagtttcagtactttgggaggaggccgaggtgggagactcacttgagcccaggagttccagaccaaactgggcaatgtggtgagactccatgtctacaaaataaaaaaaaattagccaggtttgggccgggtgcggtggctcacgcctgtaatccctcggcactttgggaggccgaggcrggcggatcatgaggtcaggagatcgagaccatcctggctaacacggtgaaaccctgtctctactaaaaatacaaaaaaatagctgggcatggtggcgggcgcctgtagtcccagctacttaggaggctgaggcaggagaatgrcgtgaacccgggaggtggagcttgcagtgagcagagatcgcgccactgtactccagcctgggtgatagagtgagactccatctcaaaaaaaaaggaaagaaaaaagaaaatggggtgaagctcacaaccagcagargagtgagaagaggcagcccagcgtggaggcgagcagggccttgagaagcaccgtcttacccgtgggccccacacccacccctgctggagcacgtgagctgtcagtgccttttgagtttggtgcaggtcacacttgttaattgaagaatgaatgacatttcaccctcctgaaaggagttatggatctagggaactggagcagctgcctgccatttcgttttactgtgggatctagagaccacagtcgcattgtgacattctaacttccacccctcctgccatgaggtggtttttgctgcccagggcttgcctgacctcagattccagcatcggggtcttcccaggagggtccctccagagagtgaatggtgagagagggacctgtattagttgacattaagcagacagagtagaggggccgccagcctcggccctgagtgggccctgtacttttacatctgttcttgcttctgtgcagaaggtaacctcaggtggcctgtctcatcacccccattccactcaagggaaacctgggcttagattggtcatgggaggcttgccatggtccctcacggtgggtggtgaagctcccagctcagacagtggctgccaaaggccagagtcctctgagccaggtggcctcttatgtggaaaaacagggttagggggctggcttaatatgaaatggcttctcctcttctaccagagaataaactttttaaaaaatatttttattttattttattttttgagatgaagtttcactcttgttgcccaggctggagtgcagtggcgtgatctcggctcactgcaatctccacttcctgggttgaagcgattctcctgcttcagcctctccagtagctgggattacaggtgcctgccaccacgtctggctatttttgtatttttagtagagaccgagtgtcaccatgttgtccaggctggtctcgaactcctgaccatcaggtgatctgcctgctttggcctcccagaatgctgggattacaggcgtgagccactgggcacggccagagaataaacttcttctttttttttttttttgagatggagtctcgctctgtcatccaggctggagtgcagtggcatgatctcggctcactgcaacctctgcctcccaggttcaagtgattcttctgcctcagcctccccagtagctgggactacagtcgtgcaccaccatgtccagctaatttttgtatttttagtagaaacggggtttcaccatattggccaggctgatctctgactcctggccttgtgatccgcctgcctaggcctcccaaagtgctgggattacgggggtgagccatcgcgcccggcccagagaataaacttagaggaaaaagactctggcacactcatccttatgtctttgtgccaggcacagggctctaacccaaagttgccctaaataaacgttacccgagtcagcttatggtgccagggcatgagggcagctctgggggcagtgggggctgcagcgctgcaggcagattctgcaggggtgatggatcccaggaggacctgtcccctctccagcagcccccacccattcccctgccctttgttgtgtgtggtgtgtggcctggaatcgatgtgactttgcctgtccaggcctgctgtttgtccatgtgtcacaatgtgacatgttgacccactgcagatcattccctgaccacagagcgctgctcccgagaaccctgcacccctcaatggagtaaattaccataaagcctcttccttacccatgctttggggtgttaacagctgaggctattcgtcggtgacctgtgggactcgagctattcctgcagctcagcagacctcctggcygtggtgggtagctcctttcctttagtcagattccgaggcctctgcaacctggagccttggagtgggggttccattagaattactgggtagcagaaagccgggacctctgttgtatgaaggaggttggggctgggagtggatgggagaccgccctttggtcacaggtgtgaaggggaggccatcaagggagactctgacacccggaggcagagcctggatgtgggacccaggactctcctactctgctcacgtctgacctggatttttggttcttttttgccaatccagtttcaggagggaggtccaccctcctgaggggggttttggaaatgacagctatgagaaagggactatcatgtctctgagtggggatcggggagctgggaggggcttccctctgctgcctagaattccactctgaaccattagtcattctttccagcgaagcaggtgcttctccgggcaacataaatcctcctcaaggtgactgaagtgaccggatggacaccaccaccctcctgagacaggctgacctgaggccattgggacctgggcacaggagggagaggggggagggggtggatacgttccagctttgaccagttcagccctaattgggagactcaggtggatgtcagctgctgctgggttcccccagtgttagttgcttaatctttcagtgctcagtttccgtccttcatcttggctcccacagaaggtgaaaaaagcatatttcttgctcactttcccagtttccttgggtttcaagacccaraagcactcacttttatccttgtcccatttttatggggctttctgtctggtagggctggccttgctcaggctggctctgctcctcactgcctggggtctggaggctttgctcttttatctggaaagtaggctaacaacaaggctttacttttagggtggctgagagtatggccagagataggtctgcgctcactgacaggtcctgtgttttcttagatcccctagagtgagggcctccttagtggagctcagctaaggtgactaacatcgagttgaattccttatgagaggcagcatttcccccagggcccagtggggaagtagtagagagatcatttacactcaggaagatgcacctctcttagctgtagagttgaaggggcgccagtgatatgggaagtgtttttcctggccctggaaaatgccctctgtcccttcctggccccaggctcagtgtccctaggcctttcctgctttcccctttcccctagctgagcggggctctgctctgtgactcacactctgccctttctcctctttggcttggctaacagcatgctggtccataggtaagggtccatggggagggctctgggggaagtccaaaggcaggaggccactgaggtcctttgctgtgccctggggagcaaccggcaaagccagggttggaggagggagtggattaggtggttgtgtaagaggcggaataacagatgggccacgggaggattggtaatgggaatgaggcaagggaggggtagggtgaggccaggttttggctgggggctgaatggggaatggggagtgggagggatgggtgaaaactggccgctggcccactcatagggtctgctgtgcacatgcagggagataactcactcttggtgcacttcgtaagtgccaggcatgaccaaagccacgactcttccctgagccagctttccaccctccccccaccaggctgtcaagggacagggccttggaattggatgcgtgttttttgtttttgttttttttttgagacggagtctcgttctgtcacccaggctggagtgcagtgggacaatcttggctcactgcaacctccgcctcccaggttcaagccattcttctgcctcagcctcccgagtagctgggcctataggcgtgcgccaccatgcctggctaatttttgtatttttagtggagatggggtttcaccacattggccaggctggtctcaaactcctgaccctgtgatctgcctgcctagcctcccaaagtgctgggattacaggccaccatgcctagactggaggtgcttaatagatgttatcatcaagctgaagataaggccaggcctcaggttaagccccaggttctagaagctttggggctgcatcacaggccttccctcccctcccttcccctcccttcagggcaggacagcctgctctgagcctggcccagttgtccttcatgagcggccagtgtctgctctggggagtgtgggcctaggctcacagccccaggcgttgggaggcacctgctggagcgccaggccttgttggctgcaggcgctgggcaggcactgcgcagttcccagaggctgtggccacagctaggcaagtggtgcttccctgggttccttcttcccgccatttgcggagtggcttttcttagtcatttgtttactgatgcccacacctgctgccgtggccactctttcactcagctattctgtctacagattccagtagcagtgcacctttggtcctatgtcagctcattcatcccttaggaggggcctgcattggagcattttgtttgtttgtttgttttcagatgaagtgttgctctgtcacccagtggagtgcagtggcgcatcttggctcactgcaactcccacctcccgggttcaagtaattctcctgcctcagcctcctgagtagctgggattataggcatgcaccaccacgcccagctaatttttgtgtttttagtagagacggggtttcactatgttggccaggctggtctcaaactcctgacctcaggtgatccgcccacctcggcctcccaaagtgctgggattataggcatgagccaccacgcccggcctagagcatttaacatctgcttagccctgcccttggccctacagtgagatgattgtttgcacctcagggatgcaggctgatcaggtggggaggccacacgtgggaaggatggcaggccatagcagaagatggctttatactgatagacgtctgagggacatcccatggtcacaccctgcaagtgacctggtagcaggcagagttatgtcaggagactgtcgtttggggaagcaaggattggagtggaggctgcgcttgccccccagggctggctgaccctgggcagaagcaccatctcctccccaccgcttccccaaaatgtgggagatcaaagcgctctttgaaggaatttactgtatttccaaatgcaatagaacaaaacacaccattatgggaaagatcacagctctgatggactttacacttattttttttattttttgtttttaattttttaaaaaaatktttattattatactttaagttctggggtacatgtgcagaacatggaggtttgtacataggtatacatttgccatggtggtttgctgcatccatcaacccatcatctaccttaggtattcctcctaatgctatccttcccctagccccccgccccctgacaggcctcggtgtgatgttcccctccttgtgtccaaaaatgtggaacgcttcatgaatttgtatgtgtcacccttgtgcaggggccatactaatcttctctgtattgttccaattttagtatatgtgctgctgaagcgagcacaactttacacttattttataatttagtatttttaaaaaattttgagttgcatgtggagagacaccataatatttttcagtgcattttagaaaaagttttttattttaatttatttttaaattaattaattgtttattttttgagacagggttgcccaggctggagtgcaagtggcacgatcacagctcactacagcctcgaacacctgggctcaagcgatcctcttgccttggcctcccaagtaactggaactacgcccagctagtttttacatttttgtagagacagggtctcactatgttgcctagactggtctcaaactcctggcctcaagtgattctcccaccttggcctcccaaagtgagcccaggagttcaaggttgcagtgagctatgaacgcgccactgcattccagcctgggtggcagagggagactctgtctcaaaaaaaaaaaaaattgtaaaatctgaatatttgatactatattttatgttgttttctagaaatttctgtctaggtgctgaatcatgcagcctgctcttctactcagccgtgtgtttcagaacgtttcacagtgctgtgtgtagacctcgtgcttttttttttttttttttgagacggagtctcactctgttgcccaggctggagtgcagtggcgcgatctctgctcactgcaagctccgcctcccaggttcatgccattctcctgcctcagtctcctgagtagctgggactacaggcgcccgccaccatgcccggctaattttttgtatttttagtagagatggggtttcaccgtgttagccaggatggtcttgatctcctgacctcgtgatccgcccgcctcggcctcccaaagtgctgggattacaggcatgagccaccgcgcccggccgacctagtgcttttaactgctgtagtttarctgctgtaggaatgggccgtgggttttttttttttttcttcatttctttggttgctggacacctaagttgtttgtcattgttcctgacgttttcatgcaagatgatggcggggcgggggcagtgtccacgtgccccccgtatgcgggtggcgtggccgggatgtgggcacacactttttcagtttaccccgccccactcacaccctcgtgtgcactcaagattgtcccctgtcgagtgtgggcgaggagaggcacaccactattgttttaatttgcttttacctgattcctggtaggttgagcatctcttcacatttatctcagctgcttgggtttcctctggggcctctgagaaccctcatccaggagggtctcggtcacaccagggttggtgtcacctcccttcagggtgccaggcacccctcttcagaggtgctgatttcctcatctggcatccaggcacatttctgcggccgccctcccaggacatgacacagctcattaggtttcagctttttatcttcccttttatgagactacactgtrgtaacctttgccggacttggatgttcccaggcctcccagtgtgttcccagagggtaactttttctccgactcctgggggctcacaggccctgctgtgtctgggtggtgctgatgctagctctgtccctgcaggcagacttctgcgttatgacccggctgctgggctacgtggaccccctggatccyagctttgtggctgccgtcatcaccatcaccttcaatccgctctactggaatgtggtaagtgatgtgcctgacactgtccagacgggagtatcycactgctyggtgagccccacatgcaggggatcgcggtggttgctgctggctggccagacagacagacagctctgctcttccctcccgtgtctgtcgctggctggtgtggagtactaggcgcttcctgccgtcttgccttggggatccagcagccattgggctgcccaggctggcgtcaggatggtccaggactgtaggggtggccctcctaccctcacaagaacctgcaggagaacgctgccatggtggggctgccattggtcacatgtgcctggcagtctggtggccttctcatgcatgaagtgggttgcccaggaagtaggggctctcttccctctctgccatgtcacacagtaaagccacttgcttgtgaatctcccacccctcgtgtgttccacaaacatggttatttttcccacatgaggcttcctgcaaaacggcctgcgcattccggacctaggcgagctgggtggcaggagcaagccggcatgagttgaaaggaagccaccagcgtggcaccagctcgtgatgggtgccaggggatgtttgggtgcccgggcaccagcaccgaggggtgggtggactgcatgggaagtgggctctgggcccttcgaggaaagtgtgggaggggagggccgtcagttccttctgcagcctttctgagatgcctcccacacctcccagactgtggggtgaagctcttggggttcctggcccgctctcccaaggctgtctctggggggtgcttctgggctgcttcccggggatcctgctgggggagtgggtggtcctggggctcagcgggggttgggcttgctgatgcagagccctgagcgtcctgtgatcacccccgaggctaatctgcagagtaaggccaagatcagcgtcagcagcacattgttccagacagttttcatttaaggtgaacccttgatcccagggcagaacaggacatgtttttcatttagtttatgacttgagatttttctccatctggtgagagaagtgggtgggggccagcctgctcatgtcaaagacagtgcattccaaagaatgccctgttcctgctgtcctgaacatgctggacacactccgaggatggatgctctggcggcccacaagggaggggcttcgaggggaggtccagaggtgggagtgagactggcgagcttggtgtagccaaacacaggcctcccggacacccctttctcctgagaagccttggctgggctggggagcacctgtactctcagccacaccgtccccagctggccccarcctcctgacatgggcctctggagccagggctgcagccgmagtgcctggccatcctggcgtttcctcccactgcctggcctgcatgcttcctctctcctttcacctttgcacacacccagcatgccagagatatgaggtggtkaagggtgaggagggtgtttggaggctgaaaaatggtcctgcaaagacgtccacatcctgtgaaggtctcttatatggcacacacacaaggatctttgcagacgtgatgaagtcaaggagcttgagctggggagatggccctgagttacccaggtgggccctaagtgccattgtgtgtgtccttttaacaatggagtggcacagggacattgaaacacaggagtgtctcttgtcaccatggaggcagaggctggagtgaccaagccactagccaaggaaggccaggcccaccagaagctggaagaagcaaaaaatggagtctcccccagagcctmtggtggaagcacagcccagtcggcaccttgattttggcccagtggtaactrattggggattgctgttgttttcagcccctaagttggcrgtcatttgttacagcagccacaggaagcgaggccagggtatttaaaaagccaaagacccctgctggaagacgttgtgggcctaacctttggagtgttgggtgtgccacgctcttggctgtccacagtccttctctgagggagatgttgggctcttacagccggaggaggtccctgccctctggcttcctgcaggcctgacgttgaccagcagtcattgaggtacatatgggtctcccagcactgggagcttggctggctgaatgcatagcaggtcctgaggacgcttttatttatgcacaagccccctcaggtcacttcccactagcctagccaacagtgtgtttttaaagtgaagttcattgtgaaggttctcagtggctcatgaatggcagagtggttaagatgcagtaagatttggccgggcgcggtggcccacgcctgtaatcccagcactttgggaggctgaggtgggtggatcacctgaggtcaggagttcgagaccarcctggccaacatagtgaaacctcatctctactaaaaatacaaaaatttagccggatgtgatggtgtacgcctgtagtcccagctactcgggaggctggggcaggagaatctcttgaacccaggaggcggaggttgcagtgagccgagatggcaccactgtactccagcctgggtaacagagtgagactctgtctttaaaaaaaaaaaaaaaaaaaaagatgcagtaagatttggaagacagcatgtgtctgtgtgtttggcatacgggtttttttttttttttttttttggtcataagcttttgattagtctcattttgagatagtttttcactggaacagtttgtggtcattggtgggagagggagtgagctcttcaaagtggtttcaaaaggagaaaagttaagaaacatgttgcagttccgtgggctgctgccggggagagtatccggacggcatctggartgggatgacgaggcccagctctgtgatgccagaagcccagtgggtggatcagttgagccaaggagttggagaycatcctggggaacatggcaaaaccctgccactacaaaaaatacaaaaattagccgtgtgtggtggtgtgcacctgtagtcccagctactgggttggctgaggtaggagaatcacttgaacccaggaggtcgaggctgcagtgagctgtgatcacactactgcactccagcctgggcaacagagcaagaccctgtcttaaaaaacaaaaacaaagacaggccaacaggccacaaccagggaagcacttaaataacttaatagttatcaatgcagttgtccctgggtatccataggagattggttccagttccccgtggataccaaaatcggcagatgctcaggtccctgatgggaaacaatgttgtattcgagtataacgtatgcccaccctcccatrtactttacatcatctctagattacttatcatacccaagacagtgtacatgctgggtagttacactgtattattttttatgttattactttttgtttttatttttttcctgaatttttctttttttttttttttgagacagcatctcactctgtttcccaggctggagtgcagtggcatgatcttggcttactgcaacctctgcctctcaggttcaagcgattcccctgcctcagcctcccaagtagctgggattacggggacctgccaccaagcccagctaacttttttgtagttttagtagagatggggtttcaccatcttggccaggccttgtgatccacctgactcggcctcccaaagtgctgggattataggcatgagccaccgcgccaggccttttttttctttttgagacagagtcttgctctgttgcccaggctggagtgcagtggcacgatctcgactcactgcaacctccacctcccaggttcaagtggttctcctgcctcagcctcctgagtagctgggattataggcatgcaccactgtgcctgactaatttttgtatttttagtagagacagggtttcaccatgttggcaaggctggtgtcgaactcctgacctcaggtgatctgcccgcgttggcctcccaaagtgctgggattacaggcatgagccaccacgcctggctcttgaatatttttatctgcagttgctgcggagggctggctggtggtggcgggactcatgctcaggtgttgtgcccagtgcatgtcatgcagtatttcaatgaatcttcacagcaaatgctgttaatatcccctttggagactgaagcttgaagaggttcattcatacattcttcaaatgtttattgagcatctactgtgygctgggcaccatcccggcccctggccctcacgcagcagcttcagtggtgaatgaatgtatagcactgccggtgacacagcaggcaaggggagggacagacaggggtggtggtcagggaaggcctctctgatgggtgtcctttcaccagaaacctgattctcatgcaggagggccctcaggtgtctggggaagagcattctgtcaggaaaacacaagtgcaaaagtcctggggcactcttgagtgtcctcggaggttttaagggacagctgccgctggagccaggcagagggagaatggaggagcaggacggagaggtggctggggacggtggtgcaggccttgcgggccatggggagagacattccctggactctgagctgggagccattgcagaggtggcatgatctgagtcagagtttcaaggtcactgcaccaaggacagaggagaagagrcaaaggtggagctgagaggccagcaggccccagatggcagcttgaccacagtgggactggcggaggtgggagcagtgatcagggagagctgagagaggyggcttggccagcccatggttgggcctgagtgacccgtgggaggcaaggccgttggctgccctggggcaaccgtgggaggagaggcttgtggaggaagagctcggttttgcctgtgtcmgacacggatgtccttgggctccagacagtgtgagaaggccaggcatggtggctcacgcctataatcccaagcactttgggaggccaaggcaggcggatcgcttgagcccaggagttcgaaaccagcccgggcaacgtggtgaaatgtcatctctgtaaaaatacaaaatttagccaggtgtggtggtgagcaccggctactgggaaggctgaggtgggtgggtcacttgagctctgggggtcgaggctgccatgagttgtgctcaagccactgaactccagtttgggtggcagagtgagaccctgtatcagaaaaaaaaaaaaacccaaaacaaaacagactgtgtgtgagtctggactcctggggagctgggggcactggagaggggccttggccccaggcccactgtgtgcctttctgggctgtggctctagggagtgttttcccagcattgggctggggtgctgcccgcttctgctcatcagcacccactccgtcccttccctcttccctcccaggcttcctaggtgagccacctgctcccacccctccctccacctggccagctggcatctcctccactctgttggaacatttcttcccaaggcctcctcctgctcttccttgttcagaccatgggaggctttcccggccttctctttctgggtctttgggggagttcacactgcggaccctcactcttcctggagaccggccttcctgtgcgccacgatgcttttctggctctcttcctgctgttcttgtgaattctgcttcctccacctgatgttcatttgctcagcgaatagtcaccgagaacctgccatgcaccaggcactgtgtgtgtcctcagagagtgaatgacctctgtccttccagagcacagatatgtttgtaatgaacactgtgataagggctcaggaaacaaagatcaaggtgtcacagagggactgacaggcttttccctctgtcatctgagtctcagtctgtggcctggactcctcagggcttcaggaccttgggtccaggcactgtggccctacgtgggagtctccagtctccaaagggagcccctgccaagacctccccaatgttctgttctttccctatcactccagatgccagggcagtggtccaaggaccagcatggactccctcttctcacctgcccccggatctgtaccctcgcggactcyacctggcttcrtgccatcacccccgccagatcaccagcagcagctgcttgcagccagtctccccactgctcctctctagccacccttgagggccatgctcagaggtccccaggttttccaggaaatggaacttttcccctgtcccgggaggcccttctggcaggcgtcctcccacctgtatcctcagtcatcccaggtcttgggcctttctgggtgatctggcttctcttgtgcaaggctgcccacagacctttgttaccgcagcttggagtggtccttgtcaggtgtcccctccctcatrcctcctcaccctgccctctctgactcagggttgctgacttttggggccatccctggcactacaggtgtccagcaatgtccccggcctctgcccactagatgtcagtagtaccccaagcccaggccatctgagtggtttccagacattgcctgatgtcccttgagggccatggctgcctgggcgttctgagtacctacccctcagcacagcctgccatacctgctgtcactgtttgtctctcactgtccccttcccaggagcatcctaagagagttgaagcggagcctgctctgcttctgtgtccccaatcctggcatgtgcagtgctccgggtggcagctgctgcctgaccttctgtgtcaaggagggtagggcacctgttgtagctcagtgcctgtgcccagcaccatgcctggcagaaatggatgtccaggcagtgtttattggctttgtgagcgtggattgcccattgactggttttctgcagtggcacctggtggacaaggtgaggctccattgtgccaggttctatgcacaccccgactctgtgaaataaagcactgcatggaggtaaagagcagcagtcatttgtagcaggctcagcgattcctggcatcccagtgaagataagataggcagcctgtgccactccagctcccagagcccccctgcttgccctgccctgccatgccctgtgttgtcccgagggagccagcatgggaggcacagcagctgccttgagcagttatttacaagagcaaagtgtgcacatgctttggtattttaactttattgaagaccagttgcatgtaaccaacatcaaagctgctggagacatagcaagttggaaccctacttccaacctagaaggatttctaggcagagttgcctgtgtctgacttcccttcctcactgggaccccgtaaacctgaaggggagctgtaaggaatcctgccaagacggcagatgcacacggggtcacgccggtttcctccagccttgggagggtgcttcctggtgcctttgtttgtccccttccaagccctgcgtggccaccctgctttctgctctccctgggtgcctggctctcatgtgcaggtctttgcttggggacacccaagtccatcctcaaggtcagtgtgcagctcctcccctctgaggcccctctctcccacagtgcaccctgcccaagacctctcgctccattgggccgggggtggctcctgcacatgtgctccagrgaggaaaggcatttgacaggtcagctgcagacaggtgttctgacactcactgtcaaccagaccaaagccccagcccttggccctgcagaggatacctatagaggggcagcaggccttatgtctgtatcaggacgctgacctgtccctctggccggggactttcctgcttttagcctgagagtctctttccctggaacccaagtcagtcctgggcagaacaggacagttggccactgtagtctggagagttgtttgggaagaggcagcttttcctttctgggaggtgagagtccacttgctgcgctgggccgctggctgggcctggggtttcctgggcctggatgtttgacctgctggctggtactggcagcagctgcaccccagggtggccagacggtaggtggcgctgtgggcaaggtgaggtgtgcttctcctggctcctgggaggaggaagaggaggaggaggagaaggaagaaaaggtgtgggtgctcctgcctcacctcagtcacctcctcacctgcagctccctcacctgcctaccacccttagtgtgagtttgctgctgctgctgcctcagtttccattttcagatccccagccagcggtctatggctcgtttctgagtgccccaagggatccctccaggtgccgggaaagccgaccttgtaggtgctatgggatcagcccaggccctgtacccttgtcattcacatccccttcctgggcatcggtttctccatttgtaaagtgaggacgctcagctgaggccccatctagctctgaaatgctgcaatccctgcgctttaccaagtcctggctctggggcagctctgtgccgggacgggaccctgccctcctgggctggcactggattaacaaggtcagattggacattagatgttacatagaaaaatcagcatttggttaataagaaagctcacaacttattaaccaaggagttacggagagagcataaccaggtaatgcgtggggagacagggtcgtgggggctggaggaggtgatggtgggccataggcagggcagcacttggcccacgtgggctttttggaggagtcataggggcagggtgggcaggagttgaggccaaggaaagggatatgagtgtagacaaaaggtggactacaggtgggcctggggcttgtgagggaggaccccaagtgcatacctgcaatctggactgtctgctcaaggatggtggcakgtgtgtgtgtgtgtakgtgtgtgagtgtgtgcatgtgtgtgagtgtgtgtgtgtcagaagttaggatgggggcatgagccaaactgtctgagacccttgcttccatctggctcagaaatctggctcccagggcatggccgcatatccagtgggctccaagccagtgtttctggaccagaaagcgtcgtcctctgccagggcctcttgcacttgygggaaagctgagctgagctgggcttactggcggagcctgtggcacaagaagggtttttctttgagcagagccagctggctcatcaggcctgactgagaccttggctctaggagcacagctcttgtctcttcagaccagtgtcacctaagatactgtggccctcctagctctcccccgctcctgtctgggctgtgctcacagctggactcctgcagaacgaatggcaggtctagcttcagctccatggctggggacagtcagtgccttgtccccagtgcccacgctcactcccctggccccttgatgttgggtctcaagtgcaagccgttccacggcacatgagtgtgggatctttcagagccaggcagtggacgtgggcttttagctggcaacagccctgctgcccctggggcactgcctgcctctgaatggcagctgagctgggcagcagcattactctgtgtgcygctggcactggcctggtggggagcctctgctatcaggctagggctaactttagaattgtggtgcctgagcaacgtggtgacaaagtgtacaacaaggtrtctcgaactgggtcagctcacagcctgtgccaggatggctgggagtgacatggacaggaacaaaagggaggggagagggagcrcactcccacctggagcctggcaggcaggatccccactgagccgatctcttccactgagccggcccatccctccctgtaggttcctcatactccagagatggctgggtgggacccaagcgtgtcttccctggatgatttatttttggttctggcatttacagcatgatgaaggctattggacactgctagtgtgagcagaatcaccctaaccgaaaggcagcgtgcggccctgggcagtagggtttggtgtagacatctctcgggatccctcccacactgaggagaggaggcaggggacccaggctgccttagttactttcccttttcttaggcattcccagtaggttgggcctcctacttccacctttctgtggacccggctggtggccttcaggctaagcatggctggtgaggttcgttcgcgacctgcccccctgcgcccagttgggtgcatctcctgaaacttatctcccagagcttgggccacctgagccaccactgttctgcagacgcgttcttctccgtacttcagtgcctttgcactttctgcttcctccccttcgccagctttcccgccttcacctggctgccttggctcttccagcctggcttccctgagccctggctctgtgcagacatggctgggccctcctccctgtgccttcctgaaccctgcggcagtgctgagccctagccccgggaactgaggttgaaagtgtgtgttttgcctcctgcctagactgagagctcttggaaactaggggtggggtctgaggcacctgtggatgtcccgggcctggcctggtgctgtgaggcatggatggtgaagggtgccctctttcctggaggaggaaccctgaggcgtccccaggaagccatgcaaccaggcacactcacccccaactctactgggatcacgcacaacccgcttggctgttccccactttctcatgccttctttctctccctgtaaaactccctgccaggccccaggcctgcactgtcaggaactgagatgcagcccagcggggctgtgttatttgctttaccccattcctgggtcttctttggaggctgaatgaaattccatggacaatttccaaggcatgagtttttgtgtcatttcactgctaacctacttggtgacccaaaacaaaacccttcccttgagtctggaggagcagcctctgccccactttgctcagaggtgcaacaaggccttcaggagggaatgggtgtaaaagggtttgggctccaaggagaagcagctgcgggagctgcctggctgctccatctccagaagagctcttgcatgagtggaaacacccaggcctgcctctttcagccactgctcccagctttaggccaagcactttcacttagccccagaaactcttgcctagaaaattctcatggcctctagggatacatcttggagagtacttctgtagctggcggcccctttctctccagaagtgcggagtcagcctgggagggacagcttgagactcaggagctgatggatgtgctcatttgtggccaatgccacagggccacacagtggcagctggtgttgggctctccagtgtcacggatgctgctgccagggttcatcagttgccctagaggcagccctgttcctgccacctgtcctgactccccgccctccccatttcctgccaggcgtggcacagtgagacttaggtgggctcagataggagacggtaagtgctaggctgcccactgggcctcccggttcagaagatgctgggctgagaacactgagcttctgttccaggggagtttcccttgtttgtgttactgctggaccttgagatgattccattattttattcaaaaaaggggacactggcctgatgcagaggtgtggtctctctcctgcaggtgttggtggctggtgagcctgggctggctgtggggacccttcgcttacaggcaaggtgtgccctgggcagtgggcagagatctcaagagaagctgaaatgggggcagagcagcctgactcaaaggtcctgggggaagggggatggagaatctggttgcctgatgggaagtagccaattaggagggtcctgaggatggacgcagagggtgggaggtggagcctgcagagattccccagccacagttttcaaaaccagctgttgtctcgcaaggcactggcaggcaggcgcagggctctgcaggtgtgcaagaggttccaggcagctgctgggctcaccctcctaggaagacatttgtcccaccatcccatgctgaaaatgacccaaggcagggaccccacccggtgtgtgcagtgcaggggtgtgtgttcctggaggcctttctcccaaggccctccctggccagggcacccctaccaggctgagtcccacctgtccagctgacgtcacagcctcttgcttgaattggcatgggcggtgggtgtgagcccctctggtgaggacagcgttggcagctgctaggcactgtcccccttgggcagctgtgggagcagagggaagagagactgggggtacccgccttcccagatggagcgggctgctcatgggacttagctggagtttccaaggagactgaggtttgggggtttctgtgagctggccggatgttgctgaagtgcctctgccctctctggcctctgtgcccttattatgtgtaattctgttctgcaccgccctgctgtgtaaacttggcaagttctggtcccctctcctgcttrtagtttcctgggctaaaatcaaaggaggtaaattatctcccaaggtcctttccattctggatcctctgttaatccaagggagatggggaagagggcttggaaacagctggatttggggatgaagattccactgggggcagaggggaggcagccccccacccaagccccatactccatctccattcctcactccctgccaggagtggaatgtgggcaggtaagagtcccagaggggtaagagccattggtgggaagcaactgtgggaccagtgccgccaccayggcccaaggacctggtgttcgatgccgcatccttccggtggcgtctgtggctcttctccttccccctgacccacccatgcctccgccctggggctggtgggattgctctcaaaaccaccttagccaagagggctccttcccaagactcaggaggaagaacataggggacagccaggcctaaaggggctgggcaggggctctagagaattaaagctgcccaggccacagccccgccctgtgagggcctcacaagccctgtgcaggccgagtgctagagactcccctcttccaggagccagtgccctcctggggaggcgggcagactgtgccccactcctgggtgaggtgggtggggctgtgctggagctggctgccctagtggcctcagacctggccatgtgcgttcttagaaaggcgtttggtctttcctctaagatgagcatagcgtcccttcctcagggttggctgaggagcttggtgtggacagccgggctccaggcacacagcggycccagtacacctgtcgctttgcctgccacccgcttacggtagcagcatggttgtaataaagcaataaagccagcgtggatgggcgatgttgctattgctattaatgatctttgctcatgaaatttttagtcgcctttctggccttcctctatctcaggccaaaactgccccttcttcctaaggggcaccctgtgcttcttgctgcagaatcctggggcttcccccttcgcatttccgtggaactcagagatggtacctccctgcgaggtggggctgagagggggcccctgcggatgcggttattggaagggctgaggggtcagaggccaggtttggccccaccaatggctggcaccaataacaacacccatgtagaccaggtgtctgcccagaagccccatgtacctgaggtcaggaagcctccctgggaggtggaggtgctgttaaggagcagctggtgggaacccccaacgtgcttctctccgagggcctcaggggctcttagtctgccggctcctcaggctggggcttcctgcacccctagcgcccaccctccaactctcccctgctgctgagacagatcttggagcctcggccaggctgtcctagtcacaaggtaagtgtccaaggcaggcgtcagagtcaccagcagccacttgaggcctccttccctttgaattgagaggcatggaaaagggagcgtctgcgaggaaaggatggctgcatgcaggttccttgtcaggtgggtggggacgtgggacatgcctgacatcagagaagccacatggggcagggggatggggaaatggcctcctctgggcaagggtctggtgggacctgggggcatttctctctctttttttttcttgagacagactcttgctctgtcacccaggctggagtgcagtggtgcgatctccactcactgcaagctctgcctcccaggttcaagaaattctcccacctcagcctcccaagtagctgggactaccrgtgtgtgccaccatgcccggctaatttttgcaattttagtagagacaaggtttcaccatgttggccaggctggtctcaaactcctgacctcaagtgatctgcctgtctcagcctctcaaagtgctgggattacaggtgagccaccgtgcccggccaggggcaattgtctgctcgaaggcacatgttccccaacagcctttgagcgtgggatcaagggagtgcagctgtcttgaggggcgggacagcccgtggcgagggacagtgccctccccatcaggagctcagtgctaaccgtgcctccactgtgactgtcacggtggtcagcctcatagtcatcatcaacactcctgccactgtcgtggctgccgctgcagtgagctcagtgcctgagacacaacacatggatccagcggatccgatctgccttaaggggcagcactggtgttacagaagcagcagctgaaggcccgagaagtcacttgacttgtcagggcctcggccgtgtgtgcagagctggtcccgccctgtgcttcatgccccctatgcctctcactgcctggtacatggatgcatcatggcaggaaagtggaaaaacagccccgagctgcagcacggccgactccaatgggccggaacgccagccttgctggcaggaagaggccctccaagcgcctctcgtggatccggcccagatccggtcctgaggcccctcccaccrgagcctggggtgccctcacatgccctgcgccaacttcgcaacagcccagcttcccggctgctgtgtgccctgcctgtgtcaatattatgactggacttcctgtgggtcaggccgcacgtggggcgtccgcgtgaggtagccacgtggaagtggtacccccatgtccttgagcccactggagtctgtcccccttgccatcctcgggagcccggtgcggttgtgcccccctcatatctctgggcctctcagcacacaggtctrtcctgcctttgatagcaagacggaccygggcaaggttcctggcttctccgagccttggtattctcatctgtgacccaggcacagctgcctggctcactgttgcaagggccgggatggtgcctggagtgggtggtgcctggagccagctcagcgtcagtgaccctcgtctgttccctcttcctacctccagycttaccgtccgcttccccctcgggcagccaccccagggcatctgttgtggaactgctctgtgggttttgtccttgatacctttccaggcttcttcaggttgggctcaggcagggactcagggggacttagcttccagcttgcagcctcaccgcttgggttccggctgtggctggccattcactgtgctaagcttcgtgccttggcgttcttaactgtgaaagagggttacctgtaggttccacctcctgggtcgtgtgaggatgtgacacactccgtgtgcagcacagggagccaggcagagttgaagcctgaaaaatgtgagctgggagtggctgttgtcctctgggccctgccccacggtgcccagtgaatgtttgatgactgtggtgtgtgtgggtcctgcccatcatgtgagactccctggaacctgaggcaaataggatttgagtgtggggtctggaggaagggaggagagaggggagaggaaggcgcggccggggtccttgctatcttcagtcacactgcacacattgctgactcctagacgtgtgtcaggccaggcccagggttcagggatcccagggcccaggggatggttggttaaaggcagtcttgggagcgggaaggacaagcggaagctcaggcagcgtgtaggtgagggtggggtgaggtggaggtggggaggagtgtcgaggggaggctggacaccctgcccctgtggctagggcagcagggagcctgtgtagacaygcagctggtgtggacgcgaagggtggcttggttgggacctgtcacccggtcaccatgctgctccttggctaggcagggctattcctcaagggccagtttggttaaaaggtgatgatgtctgcacagatgtggctccaaattccaccatccccaggggcccgcgcccccattcccggttctctaacccctccccggggccggtgtggtgaagacagcacagcttctgggccccaggcagcccctgttgctccttagctatgtggctttggataggttacctgcctacccttttctggataggtacctctgtctccttttccgataacctctgccacagcctctgctgtggcatttggtgatgaaatgagaccatgtgtgccaagagctggtccaggacctggccccggctggcgagtggcggggatggggcggccccttggtgtctgctcctgcctcccaggcgggcagctcggcctggcccagggcacatttctcctgcacccaggcatgttcttgcctctggtgtccccgaggctggggcctacagcctttccatcgtacttggcacactggaggcctccctgtctgccttcacccgatgcctgccttgaccatgtgatggtcaaggagtgcacagtgtacagcacatggggtgctgtgcaaaggacatgccccagccaggtcaccggggatctttctggccaggtcaggccgtggcttcgctgtgactgtcttggagactgggtcttggcgggcctggtggaggccttaggtggggtagagtagccggtaggcctcagaggctttgtccacctctgacttcccagcactcaggtggggcccactcaggccaggaagagcaccgggccactcgcagccgtgcagcggggctccagccccagtcacaccactgattggcctgggcttgccgtttcactgctctgaaccataggttccccactcagaaactgggagggcgtggggctgcatggtgggccttttctgcccccacacttctgttgccatcctgttctcgggctcccctctgtgcctagggtttcctgggaatcctggcccagactcactgataaccacaaatgcccacccaatccagaggccacaattcctccacccctacttggacgtcccttaccagccagaactggccttcatctggccccaccagcctttggcacctctgaggactcacaggcccgtttcaaggagctcagtgctggactgcctctgacccctgtccctctccacaggtgcccaggctctggctggcccccttcacagcgggttcccttccccgacaggcctctgaggggcaggcacccgctttaaacaggctgcctggcttccagtcctgttctgcctgcctcgagcaggtcagttagcctctgtgagcctcagtttcctcttctgtgaaatgggtacagtggtgttgatctcattggcaaggcttgcatgggaagtcctaacgtagtgttccttcagaccccactgcctccagccctccccagggtccccttttctgaagtcctatgtcttggagccaggcgtggagaaggggctgggaccagcctcgccagcacacttgctagctgtgcagccccggcgggtcataccgggcctctgggactcagtttccttgtctgtaaaaatgggggggagcgtaagaagctgcgacggggtgaagtgagcagagacgaggtctgatttggattttgtgaaggtttctgcaaccatggcagggatgcagagagagcagggttgggatgggatgcattttggaaatggtgaaggacttgctgatggaaacctttccaatcagacttgctaagaattctttcgtgcttctcttaggaccctggttgggtgggctgaccttggagtggtgcttcctgctaggtggtgggggcaggctctgggaggggtgtcggctggaagggaccttgttatagtgtacatggagcacctgaggcctaggagggctcagaaatcactacaaacccgttgtcaagccaggctccggtccactctgctgccctttctttttgtttttttttttttttttcgtgagactggttctcactctgcctgggcaggagtgcagtagcgccatctctgctcactgcaacctctgcctcctgggctcaggcgatcctcccatttcagcccaagtagctgggaatacagccacacgtcaccatgcctggctaattttttttgttttttgttttttttttttgagatagagtttcactcttgttgcccaggttggagtacaatggcacgatctcagctcactgcaacccctgcctcccaggttcaagcaattctcctgcctcagcctcccaagtagctgggattacaggcgtgtgccaccacacccagctaattttttgtatttgtagtagagacagtgtttcaccatgttggccaggctggtttcgaactcttgacctcaggtgttccacctgcctcagcctcccaaagccctgggattgcaggcatgagccaccacgcccagccctaatttttaaatttgtgtgtgtgtgtgtgtgtgtttgtatgtgtgtggagacgggagtctcgccatgttgcccaggctggtctcaaactcctgggctccagcgattctgccgcctcaccctcccaaagtgctgggactgtaagcatacgctcctgtgcccagcctccactgccctttctttccgtgcctccagctggctcctctgactgtcctgcagcaggaagctactgcaggtgccaagctcttggggttctggtgtttagcccagccagccaagcatggttctgtccctagctagtccctggccctccctggccattcgcttagagatgccatttcctcctagtaaaccctggggagggtgaggccggcttgaagctcagcttggcagccatgggctccaggagccagtattttccctcgggaacacctgacagtcccggacgcctggctctacatggaactgggagagtggcctgtcattgtcaccagcccctgcaatgtccccctctactccttggtgctggcttgggcccaccccatttcagtcctgctgagctttgccttggttctttattcattcagcaaacatctcctgggcatttgccccaatggaaagtactgttctgggcgctgtgggcttttggccatgagcaggaagttgactccggaggctgcagggacctgcttaggcatcctcattaccgcctgggtcccagagcgagccaggagcctctgaggcagcrggggcttctcaaccacacacctggctctcctcctccaagactttctgcgtgcaccagcatcttccattttgtgtttcctgtctgtttaccatgtgtaattttgtcagcatgtcacgtycctttcataatgaagcaagggacaaagaaacaagggccagtggagcccagtacagggtggccagaggtgtcggctctatgtaggtctgctgctctggtgtgtccctgcgtgagggtcaggctggggaggtggcggcaagaatcagccaggcaggaaagactaacaggctgcccagaggccgggagccggtgcatgggtggtagtggttgggggcattgctgagtgcagaggctccgggggaaaagccaggggttaagggatgccaggcaggcatctgacctgggactgaatcctctggcagcaacctagaagcagctcagcaaggtgagggagatttgaggcatcagaggcaaattatgtcctcttagagcccctgcggatctgccaagactgagggcttctctgtctcttttctgcatcctgtgcttggctgaagatgagaaccttgctttcccactgagaggcagtgggccacagcactgcgggagccacgrcatctgcagacgcatttgatttccccattaatagcaaagctcccactccaaggatcttccagcagacaaagggcattttaaccttcctctcagtcccagttgcttggagtggctcatgtggcctctctgaaggagggaggaggcttcagacagccccatgcatgttcagaggcaacagaaatttgcaggaagggccaggcgcagcggctcacacctgtaatcccagcactttgggaggctgaggcaggtggatcatctgaggtcaggagtttgagaccagcctggccaacatggtgaaaccccctctctactaaaaatacaaaaaacagccaggtgtggtggcacgtgcctgtaatcccagctactcgggaggctgaggcaggggaacctcttgaacccaggaagcgggagttgcagtgagccaagatcatcccattgcattctggcttgggcgacagagcgagactccgtctaaaaaaaaaaaaaagtgagagagagagagcaggaaggaaggaaggaaggctcycatgcagaaggctccggccttggctgagcatccagtttgctgggtacctgggccaggcccttctctcttgggcaatgagactcccaatgacagctgcctcgcagggctgctctgagagtcagaagacctgttcctgagttttagggatgctcagttgagcaggacctggccctgttctctggagctcatggtctgggggacaccccctcacctgcctctggactctctggcgtccatccagccacttcagtgcgacgtgtgactgctgcttgtgcccttccccaggagtggctgtgttccgctcatcatggaggcctggtgcccggcacagtgcgcagcacttcaaggcctcagagcatgtttccttaaagccacatcatctgtgaaaggagcggagcattcaagcctgctggctcttcccaggcagagggagacctggaggagaagcccagggacccacgcatccccctccttctatgggagccactctgcctgccccacccagatgccatattcagaggatgggaggcagaaaaacaggtggcttccgccccagagggcgagcatttgcttctgtgtgatcggagggcagcacaggggctggctgggccctgggatsatcgtgacaggctttagtggtctgggtggatgggccgtggtcagagccgatgtgaccaaattggctttcaggggagcccaggccaccttctgagtggaacccaagcaccagcataggtcctggaggggccaaaggaaaagggaggttcagactcactcaggtgtgaatgctgcccctgcccaggtagggacatggcacccccaccctcttctgtgatgcaggcctagaggtggcagttctggaaagttcctcctcaccttgcaggggaaactgttgaggtggagggcacttgtccagggcagcacactgtgacaggtgggagccgaggctcgggaggtgggccgggctgagctgtgacaggtgctggtgagcatctcctccgcttccccgtgctctggccgtagcagaaagtgtcccactgctgtctccaggcagctctggctcttccctaattcggccccatccctccgtgtcgcccttcttcttgggggtgggtacagtgctctgcagagctccatggcttcccagctgggtgacatggacaagccatgtcctcactctgggctccagtttcctcctctgttaaatgggcatagtgggagtacctgcttgtaggatcatcgtgagaatccagtgagttggtccctctgcagggtttagagctgtgcccattagtgctcatgcatgtgtgtgtggtcactctggtgcccatccgcatccccagtggaggccgtgcatggccttgaatgagtagctatgtgctccctttcacttctgtgctgtgggacctttaaaaaaatctgctggccgggcgcgatggctcgtgcctgtaatcctagcactttgggaggccgaggtgggtggatcacctgaagtcaggagtttgagatcagcctgaccaacatggtgaaaccctgtctctactaaaaatacaaaaattagccaggagtggtggcgggcacctgtaatcccagctactcgggaggctgaggcaggagaactgcttgaagccgggaggcagaggttgtagtgagccaagatcctgtcactacactccagcctgggagacagagcgagacactctgtctcaaaaaattaaaaataaaaataataaaaattttaaaaatctgctgaattcactctggccgtcactgatgaaaccttgcagggaagcggctccgttgcctcagcctgtgccgctcgcagctcacgtttgctggcttaaaagcagccagagcagggaggcaagctgcccacgctgttggccgcgcactctgccttccgaacacgttcctgtactgcttgccgtgcacggagggccacgttcatgcctttggggccacgacagctctctctagagtaggacatgggaggggggctgtgaacatctggggcagcatcttctcttcatggattgtcaggaactgcacccttgtttaccgagggacagaggccagcctcccactgccttgtggctgaggggagggggccgggtctctaacgctgtcttctttgtactgaaaaccaaacaccttctctgcacaaggtatgtctgtgagagaaacagacaagaggacagaacggagcaggtgctgaaagggttgctgttggctgcaggatcccggctaccaggccccgagcctggcctctgctggccttcacagccagttcctgctcacgggccaggtctcaggtccagtgcctcctcccgcagaagcctccagaccctcctgcccagaggagccccccaccccacccctggctgggtgtgctctgggtgggagggctgtgactgccgggcagcggggagggagggcgagtggttcccccaagtgcggctcctctcctgtcgtggcagggacatggcagctttcaggacaggcagaggacatagtagggaactgaggagagttgtccagagaagtttctagatttggctcagctttccacgtagggtacagacctggaagggaccgtctggccacatctgactgccaagtgctgccggggagaacctgctgaaggtgctggacgtggctgtcctgcgagaaggccacgcgtgggagctgaactgagcagggggtgctgggtcaggttagtgctggccattgggtggacgcgggcccatcgtgggcttgtgagccactgtgggcttaaaaagtgcagagttggggggatccagagtgaggggctggagcacaatttcatgtgaggggtcattctgggacagtggcaccacaagcagacccgggtggccgctggtaagggcctgtgtgtgtggttgcctacgctctttccatctcttgtcggcttctcacagcctccacagaagacagggatagttacagggaggacagggaaagtccgaagtgtgcaggcgccctgcatccccgcagccaagttctgggcggacactgccctgagccaggacggtgaggtgggacgccttccccacccagctgccagatcacccctcctggagggtggggtggggccctgacaccttgttctttgtccctgccccaaactttggggcctgaatagaggaaggcagtgacattaacttcttcctggccatggatacaggtccctgaggacaccgtgtgtggggacagcaaagccttcctaatcccccagccggccaggcaccttcacacctaaatggaaacctgcatgctggtttccatgaagaaaaggttgcgattggggtttctgggaggccagtgaggggttgggactctacagaggagagtggactcacggggcgctgggccgccctccagccaaggctcctggcctgggggaaagggggcaagggatgagggatgcagggagcagtgtgttcagaaaaggttgttycctgagcacagatttgacacctcttcactgtcagcgctgagacacgcccctgccctggggagctcagaaagtcaggtgcgggatccagtggcctaattttagatcttgggtctccatgtcgaaacgacagcagagtgattaaaaaagaaaacgacagcatggccttgcccccttgttaattatggatcaagcacatttccatgagaggggcatctccacgcagggccaccgtggccgcatttctgcagcctgcaggtctccgtggcacccacaccccccaaccgggaatgggggtggactccccaccgccctgatggggcttgggtgcgccgcgggtgaggagcagcgtctcacccacagaggtgtctcctcacggggatcagcaccgggtcagggatgggagggacggtggtggccgtttcaggcaaggcccttattagacatgagaatcccaaatggcagatgaaatacccatttacccaggaccctcgggaggaacccattttgcatcagagaattctccagtattcagtgaaacttttttttttttgagtcagagtctccctctgtcgcccaggctggagtgcagtggtgagatctcggctcactgccacctccgcctcctgggttcaagcaattctcctgcctcagcctccctagtagctgggattacaggtatgcgctaccatgcccggctaatttttgtattttttgtagagacaacctccacctcccaggttcaagtgattctcctgcctcagcctaccaagtagctgggattacaggcacgcaccaccgtgcctgactaatttttgtatttttagtagagacggggtttcgccatgttggccaggctggtctcgaacccctgacctaggtgatctgcccgcctcggcctcccaaagtgcaaggattacaggcatgagccaatgcgcccagccttcagtggaactttaaatgcctgaagtttttttgtatcgtctctttaaaaaattaaccgtccgtctcagtctcaggtaggttccctgccctcctccatccaaccgtgtcatggtgacgaggggtcgctgaccagcagctcaccagagctgggacacacggccctcatgccctgcgctggtggccgagggtgctacactttttcaggactctccttgttcagtgtttctggcccctccttccagtgtcacattgctgcttatggtgcctggtgcctgtcccgtgcccctcctgttttgctgctgcttatctgctgttcggggcatcctgtgacaggccagttggaatcctacgtagagtgaaagcatctcagccccagacaggcccgaccactcccacgccagcttgtcttctcatcagggactgggctgggctgctgtggaggcctgcaagcccgcgccagcttctccaccctgctgggcctcagaggcgcctgtcagctccagctcaccaccgtgtgtggccctctgccccttgcctctgggacaggtttagtctgcagttattatgttcaaaattttaaaattttaagcagttaacactgatgcgtgatgaaaattccaacagcacaaaaaggcagatagtgacaatgtgccccttgaatccctttcccctgaacccctttccggtgtcttgggtcccttcctgagatgttctctgcagccttctgcatggcgttcaacatcatttccttcatcaacagtcgaggattacggtcccataataacaacagtaattaacgtttattagcatttcccaggtgctgacctttgcacccgttctcccactgatggtcatttggtttatttccaacttttcctactatgcacagtgctaaattaaaccacctgataccaccaatctgcacacgtgggcaggtacatgcaagatctgcagcagggtctggaataacgtcctttagttacaacgttgatgataaaaagttgattcccttctgcacccactgcctgtgtggagtttgtgtgctctcacgactccgtgggctttctctgtactctgctttctttcacatctccgagatgtgcacattcagtgaactggacatctaagtggtcccagtctgaccaggtgtgggtgcgagtgtgtcctgtgatggaacggcgtcctgtccaggctttgtgccctgggagaggctctagccacctgcgaccttgaactagaataagcgggctggaaaatgaatgaatacaagtaattgtcaactaaaaactgttgaagtctacaacaatcacacaaatgcatgacaataaatgatgggatccgaatgcagcctgagcccgacacttctgttcttgtttggttttgaactgtgtggtggtaggaggtgctgtggcataccctcgatagctgcggggagtggggggaaggggggtcctgaagcagaccgttcaggtgtggcttgtgcacacaccccttgacacccaagtgccacaggggaccccaaattccgtcccagctgtgcatctgcaaagctcaaatggactcttgtttcaaattcgacctaatcggtggcacagaaaagctgtgaagatcgtccccagagaaaccgagcggcagcaggccctggaacaggcagagattgtgctgttctgtcctgtccctccctttgggtgacagagaaccacgaacgtctgtgtcctcagagggtcacgggacacrttccagaggkgggtggtggggagcacagtgagcacagaacatggtattttcaatccaggctgtactggcgaggagagagagtctctgtgcccagccctgctgatcccccccgctatcagggaggaactgttttcagggacagtctcaccaccctgtgaagaaggatccatttccgtcagcaccctgcctttcatgctcctccctgctgttgagcagcgtgtgctccctccctgcgcccacgctgcccaccccctgttggcatggcctctggaagctgcggacttgcagggactgaatgtgtgtgcaggtacagagtggcccagacgaggacgtgcctcccgtctgctgggctgaaaagctgtggcagccccagacccgcctgaaaagcactgcttttgcccaagaggatggacagattgtcacagctatagttatcataagtggcctgtggctttgtgaggtattagcctcagggagctgagtggagacacacaggcctgccctgtgctgtttttgcaactttcctgaaaatctaaaagtgttctaaaataaaaggtaaaaaatgccacggttggctgggcacagtggcccatgactgtaatcccagcattttgtgaggttgagtgaggcaggtggattgcttgggcacaggagtttggaagcagcctgggcaacatagcaagaccccatctctacaaaaaaatataaaagtcacacctgtgatcccagcactttgggaggctgaggcgggtggatcacgaggtcaggagtttgagaccagtctggccaatatggtgaaaccccatctctactaaaaatacaaaaattagccaggtgtggtggcatgtgcctgtagtcccagctactcaggaggctgaggcagaagaatcacgtgaacccgggaggcggaggttgcagtgagccaagattgtgccactgcactccagcctgggcgacagagtgagactccgtctcaaaaataaayaaataaataaataaaaattttgttaaaaagggcatggtggcacatgcctgtagtcccagctatttgggagtctgaggtgggaggatcatctgagcccagggaggtcaaggctgcagtgagctgtgattgtgccactgtactccaatctgggttaccttgtctcaaaaaaaaaaagaattccatggctgcttgtcactgcagagggttggtctcacagcctggtcagggtcctgctgaggagatgtggcctggtcactgtgccttctggacacacaccacctagtgtggacacttgccaccctccacacactgcccagacaggctctacctcctgtccttcaagacctgtactcggccggactcggcggctcacgcctgtaatcccagcactttgggaggccgaggcgggcggatcacctgaggtcaggagttcaagaccagcctcaacatggagaaaccccatctctactaaaaatgcaaacttagccaggcgtggtggtgcatgcctgtaatcccagctactcaggaggctgaggcaggagaattgcttgaacctgggaggcagaggttgcggtgagccgagatcgtgccattgcactccagcctgggcaacaagagcgaaactgcgtctcaaaaaaaaaagacctgtgctcaccgtgaagccgtcacagactctggtatgaatttagccacagacttgatgttctgatgcctcgaggagcttctgggtccctcaagggcccaggtgacatgatctccagtgcagcctagagctttggaatccctcttcctcccccagacccctggtctccagaagacccctaggagcccagggaccattctagaatggcatgttgtatacacgctgtccctccccactggatggtcagccctcaggggcagcacggcttggcccagcctacccagcccagggcattcaagctttggcctcacctagagccaggctggacgccagcagggctgtgtgcagcttggccagctttggagctcccatctgtggactgccgccatgacaatagctacctcaaagtgttcttgaggaccaaaggaagtcattccttcccctcgagggaggctggaacctaatgggtatcccgggaggtggggggaggttcggatagaacatcccgctgctgtgcgtgcagcagagtggctgccatcagatttctttggggtggcctgcgcactggctctgatttgatgacgttctctgtgttttccaattttcttcttgctctttagctccttccttctggcttctccatcttcacatttcccacagaattcagttgtgatttagattttccatgcccctcactagcgtgttctggctcctgtcatgcagacaccttacacttaaataccaagtccgagataaacctgctttcagttcacgggcgcttggaggtcctgggagttctgtccttgagcatgaggaaggagatgcacagggtagggccctgtggctgtgccccagacaggaggaggaggacgaggaggatgaggaggaggaggaggaggaagaggagggaggctttccagacacacaggcagggctgggggagccatgcaggagataagccaggctgaacttgggacttttgcacacaatgcttctctgcctggaaggcccttctttctgtgttctgtgtggtgtctgcttttcatcctgcacgccacagtgtgaaggtcacctccctgactgccctcgctccaggttattctttctcccagcaccctgttctttggcgagcgcatctctggcatcatcacacagagtccatgcggcacagacaggaggcccccttgggcagaggccctgaacgcctcgcctgcttgccctagtgccccagggcctggcacttggcagccctccatagctacctgaagaacagatctgtgtgtggagaggggtcgggagctctgcactttgggaggactatggctggcatttgcttgcagttggggctggtttgcaaatatttctctctgcctcagcaggtgagaaatagcacctcggagctccttgcctgttcaattatttccgattgaattaattatcctgcagtaacagcggagctgctaatagggaacattgggtgccccccaggcggagcatgtggctcgagagcacgcctggagctggagaccagtgggcagcccagctcttcgggggcgcaggccccctggagctcttctgacgatgggcagcttcatcctgcagtcaccagtgcatgcagaggtccagccacggccacctctttcttttctgtcctttaaatggagagggtcagcacgtagcaaatgaaccaactttgctttgactgcagctgtgaagataatgaggcagccttggttgtcatctaaactcagcaatggtcgagagctatttgggatttcctggcctgcttccaaattgcaagccctgttgggctactaatgccccaccttgtcccagcctctctttggccataggctaggccagccccagggtggacagggaggctccccagggtcggacgaaggcaggcgcctgtgagcagaggcctgggggctggatgggtggcaggtggccaggccactcttcctagcccagctgatgccatcccgttatcttgtaattttcttcccggggccttatcagccttattagcaaatgtcagaaacaatgagagtcacttaaacctgatcatgcccactgcaccccccaccagcctggcaccagtttgaaccaagcctgcttctgaaaatgtggtggagaaagccctgctgctcctgggaggggctcaggccatttgattctgcctggtgggttcagggctgcctggctagccaccaagacacgggagagcaaagcccggccaaacccaggggcagtggtgtccagcaggcatcaggacatgccgtggcccacacatgcccttctccacaggtgccatcatctcctttcttctcctgttagtgatggcttcattggcctcaggtgacaccgccttctagcccaggccactggatccagccagagcgtctgtgcatcgccccagggaggtgtggggaggctcggccccacctggcaagtttataggctgcttgaggacataagatgggtacagaagaggcttcagggctcagcagatgctgtgctgggagtgagcccaggcaaggtggcccagggacagaagatggaaggtcagtcgtggcctccttccagaaggaaagagattttagcaggaagagacaggcaaggaaaggaattggtttttcaggcagagcggtacttttttaaattgacaaattttaagcatacagaaaagtagagaggacgaacctccaaacatcagcccttagattccagtmcatcctgccttggtagctgacgtcacgaacgctgtgacctgtccctctgcactccatcatagcatctctaaaacggaggacatttcctacctcagcacaacttcattatcacaaaagagaacattttgagcaaaagtttggaagcaggcaaaagtagggtttgttctggaatggcatgaatgaatgagtcatgggctggacccggccccgcagaaagagcagaggaggccgtctctggtgtaggagttgaagccaagactcagcatgcaggacaaggagcccagcctggtggcatgggctgtggcttctccagtgggcccataggaatggccctggggctgggacttgtggggacggcggccacaagaggaggatcttcagcatggcctgamagcacctgtaatgtaggcaggcaatgggctcctccaggtggcaggaacacygtgaggagcatgcaacgtgctggagaccatggggcatgtgacctccgggcacaccctggacagacctgggtgagaggtggkctgggacgccaggacrgtgargggcttcaaggtgtgtttgtcctttgtccttatacaggtgacctgcatgggcgggtgaggtccatcagaatgctctagaacaggacaactgaggtcccggctgccccgctcaacacgccatgattcctagactgccctgagaggtcaggttttaaatagggtgtggcccggcaaggaccctgagggatgtgaggccagacagctccttggtggccgcctgcacgggaagctgagtggccctttggaacaggaagtgccttgtccaagttaacccgggcccgggcccaccttggactccctctggagagaacggctggcctgttcgcctcctttctccttccttccaaaataacatgtccaggtcccttggtaagaatgctgcagctggggtcagtctccaaactggagtttggtggctaaaatgcccgcctttctgcccccaatttcacacatggatgatggtcctggttcagcagggaagattctcttggacccgtgtctgctggttgggaagtggagaaagccgccctgttctgcctccattttgaaacgtcttttctgttcggaggactaaaggaagccagagctggttcagatgttcatgagcacctgtgccagcccctgcccgtcacacttgaggacaccaaggctgtggtctgtgcagtgaatcggggcagtggggggacttcatggttagaaacacaagctggaggccggatgcggtggctcctgcctgtaatccctgcactttgggatgcctgaggtcaggagttcaagaccagcctggccaacatggtgaaaccctgtctctactacaaatacgaaaattagctgggcgtggtggtgggcacctgtaatcccagctactcgggaggctgaggcaggagaatcgcttgaacccgggaggtggaggttgcagtgagccgagatcacaccattgcactccagcctgggcgacaagagcaaaactccgtctaaaaaaaaaaaaaagaaaagaaaaagaaacacaagctgggcttcctgcttcccagctgtgtggctttgggccagttactcactgtctgggtgcctccatgttcttgtttccttatataaaataaagttctttcctcgtggattgtcaggaggattctgtaataatccacaggatgtgttctgcatgcactaggtgctcaactttcctgacccccgtccagtgcccccctcaccgrccacgtctgccctctaagctgccagtcctataggaggcattaagacgtctagcaaggctgtgttctcagatgcctcgaaatgggacctcagccttggagttctctcctcccacatggaggcaagtcactgacagtcatctagcaaattgtatgcatggtcaagctcagaggttctattttgggtcaaaaaaggcatgagctggctgggcgccgtggctcacgcccgtaatcccaacactctgggaggctgaggcaagcaggtcacctgaggtcagcagttcaagaccagcctggccaacatggtgaaaccctgtccctgctgaaaatacaaaaattagctggatgtggtggtgcatgcctataatcccagctactcaggaggctgaggcaggagaatcacttgaacctgggaggcgaagtttgcagtgagccgagatcgtgcccctgccctccacctggggtaacaagagcaaaactccatcttaaaaaaaaaaagcacaagctggattttgccctttgtcgtgagagcatttcatgccttcatgaaagtcactgcagctgtgcttcaggcagagggcccgggatccaggtggcgtgcgctgccttccgtggccccttcaaagggcagccaccttcccagtgccgcaggagctcctggtctggggccacatgcttggaagggccactgaatgtggtgaagggctgggtcctggtactgagcctgttgagacttctgcaggattcactgccgtatgcctgaggaaggcagacgaaggaaaggacagtgtggagtgctcagcagagtccccatggtcgcacttgggaagaacgccctggcagtggacggtcagtggtcacatgcacatgcgaggccctcaggactctgtaggacacgacgtggcttctccacagtcctggggatcggaagcagatgcagaatgtggccgagtggcccgggccagggcctgagagtctgcattctgacatgcttccccggtggtgctgctggtctgggaaccacactgggtttaagtaactgatttaagtaactgatgcgaggaggccatgctctgggggaaggcagctggagaggagaagaatgatgtccccatgccccttccagcctcagagtcctctagacccggcagtgtgcaggaacggcagcttcactgcccatcccctggggtactccctgcagccttgggccctgctcctgcaacggtggccgaacggtgcaaaggagggggcggcccagtccctgcaggctgccctcarcctgggtttgctcatctgtgagatgggatcacatgtataatcctggctacttcacagagcccaggcgaggatctcatggacttgtgcatgtggaaaagccctgaaactgaaagattctagaaacaccaggattgtggtcactgtcattactggagggcataacccattcccctgtttttcctccatgaaagacaatcccaccaaaacacgaaggccctgccctcaatctgtttgtgtccttggcatggttcagcctgctctccccatggcctgagaggaaagcgttagccaggagggtagttggaggtggcgggaggtaatcccaggagcccgtggtgagctgaggatatggagaaggctcatctggggtgacctgagcaagcaccctctatcccaagccagtccccagaggccacgtaggcccctgtttctggattaactgagcgggagctcaatcaggcaaaccaggttgcttggcacggtgtttgccttaaagaagaacaaggtgggccaggcgtagtggctcacgcctgtaatcccagcactttggaggccaaggcaggcggatcacctgaggtcaggagtttgagaccagcctggccaacatggtgaaatcccgtctctactaaaaatacaaaaattagctgggtgtggtggtgagcacctgtaatcccagctacttgggaggctgaggcaggagaattgcttgaacctggtaggtggaggtttcagtgagcagagatcatgctgctgcactccagcctgagcaacagagcaagactgcatctcaaaaaaagaaaaagaaaaaagaaaaaagaggaaggtgggctgtgcccttctggctcaggcactgatattcaggggccagtaccaggcagatgagccctgggtgttgggctcacatgtctgtggcctgtcgttttagccttggggccaggggtagcagccgtttctctctgggcaaggggctcatgaggaaacgtttctgccttggcagcccaggccacagctgtgctggctgcagacaccctgggcaggccccggtcgctgaggagccttcttgggcaggttgcttcatctctgaagctcagaatcctttcctggagcacagatatcaaaatatttatccccagaagcctcaacaaacctgtgctcaccgctgctttaggccctgcagcagtcccaggtctgggcagatgtttcaagttcagtgtgtgggctctggcttgctggagctgggcccagggaactggcgccttgggatgaggcccgccatgtccgagcctgcccatgccccgctgctgctgcggccggtggtcttggggctgcctgccagccttctctcctgggagctaagtggggacaggtgctgcgggccacggtccacgatgctccctgcttcctgtttggtgggcagcctgggttttaggaatgtgtagagctggaggagctgaaagagctggggctcgggatcaggtggttcagctgactcgggaaactttgaggcaccaccgcacatgtccgtgcgtgagggagacatcttccttgcagggctctgggaggatggggtgcttctgtaatgcccagtcttgggcctggcgcctacctcatatgggtgctctatatagcagcaggcggagcacaattctgctaacgtcagcaacaatcctgtctgttggaataaacatgcagatgcatctgtgaccccagaatcccagtggtggctctgtcctcgtctcagccgagcactcatcggccagggtggctggactcagcacggggctggcactgaaactggcagtcactgctgtcagtgcccacagaaagcaagaagagaatagacaaataccaggcagtggagacactccctgcccactgcagatttataatcagcgaacatttactgagtacctgttgtatgccttgaggtgctcacaggggagcactcgggagcccattcactcgccagtgatgagtgggcactgtgccaggtgctgtccaaggtgggggagcgagggggtcactgcaggagagggtgagaaggaggctgcatgctgcacgaccctctgaaccctgagcctgcctggagaagtgggctgtgctgcggggaccctgttggagaggggcagcatggggaggggcggagcctgcctggggcctctcatcctgcagctgcctggaagttgggctccttctgacagtgtcctcaagtagacgcgggttctgggggtctggctggtggaggccagctggtgctcctgactcactggctcctctccttgcacagtggctgctgccacctgcctagggagtcttcctggggctcagttcccctgaccccctgggacataatgccagaactcatgctggctggccaccctccctcacgtgtgctgtgctcagcccgaagttggtgctttcacctgtgtgctctgggcaaagcaggcgcagaggaggcactgggatagagcgcagagtccacctggggcagccccctcctcgtcccggccattgccccatgttgggggtcttctgtcgggggagggagggttggagctgggattggaaggcccctctgaggctcttcttccttcctccatgagccctccaggccccaccctccatcctgcgcccctgccccatccccacccacggccagggctggctgctgcccattttggccccttcccttggggcgttgcttccaggttcaactcagattctgtcttttccagaagatgtctctgtccttccatgcccccagcctttgttccttgtcctcccctgtccctgcactcctggggtgggccctcctgctcccgagcctcctgcgtggaggctgtgagctccctgccacctgcgtggtcagtctttcctgcaccagcctcccaggacccctcctgcccacgctcctgagagattcaggcgccagtgcatgggtggggcacaggggctgcggcagacagagggtggtgatacaggggtggagtcccacaggccggatgccttgayacttctcagctgcagggctgtgcccggggctctgtgcccctgaatgagggcaatggttcccctgcacagtgaccttgtgagctgattcaggccccatgatcgtgattagctgacagcacattggccctcagagaaatgaaaatacacagttacacagtagcaaaatcccacgagcagtccctcagctggggcagggacacacggactgtggcacgtccacaccaaagaatcctgcgtagccacaaaaaggaacaagctggggatacatgtgacaccctgggcgcatcgcagaggcatcataccaagtgcaggatgccacagcctgcgcgattccatttctgtgacacttgaggagggaaacgggatggaacacaggacaggagtgtctggggtgggacagggaagggcccagctctgggttggagcctggagctggctggaagtgctgtgtcctgatgtggtggtggtatgcatttgtcaagactcatagacctggttggggcacagtggcttacagctgtaaccccagcattttgggaggccaaggcaggaggattgcttaagaccaacagttggagaccagcctgggcaacatagcgagaccccatctttactaaaatcaaacaacaacaacaaaactcacagacctgtgcattaaaaagggtacattttactttatgtgttaccttcataaatctgacctaaaaatgatttttaaagtccccccttctaaaatatactaatctttaagaaacaaaaacaaaacaaaaagctggctgacagtgggtcctactactagcacatgggcgttgatgatggtgataatgtctctcgcccataaaaggccagcttggaaacctgagccccagctgcttatcggcctgtgtagccagacaaccattctgccactcgccaaatattttcaaatttcctttccgaggcaggctgaagtccaggtaaatattgacccaagaaggcggatcacgctttgtgctatatttggttaatagttggagtcactcctaagctactttttcagttgctttgtacaggtgggtttgttttatgtaaaaagaaaagacactttaaaaagctgcgcataaatcagacatcataaatgcagtagaaagcctccctatttaaatgactcagcgaatcttctgatgaaacaactgcctcttcccctttaatgtatttattaatttttttttctttttttggagacagagtcttgttctgccacccaggctggaatgcaatggtgtaatccaagctcactgcagcctcaaattcctgggctcaagtgatcctcctgcctcagcctctcaagtagctgggactacaggcatgtgccaccatgcccagagaatttttcaattgtttgtagagatagggtctcaatttgttgcccagcctgaggcaaatttttagatatatattttatttaagtgagagctgtgacagcaatggcacaatactgcctctgtcctggcctgaggctctctttgccgctggtggccatcgtctttggagaagccgctcagcgtgtattgatggagtgacctccctgcctccctgtccagttgggctcaggtacccagctctttagcaccctccctctaccatcgtggggcctgcaggtcactgagggctgggagggctgggacccaggcccctgactggccccctgttgcagcgttggagagaccacctcagacaccaaggacggtcatgccatgggtcccggcagcagctgtcccttcctgaggagggcgtttgccagctgaccactccctggtgatttctgccctgatcttccctggaggtggcaggttggacgtgaggatgaggtcccacccaagtcacaactgtgtgactgtcttccaagtcaacaaacatcctcctggaaggctgagtggcgggaaggaaagacacctgccttctacgccatgctgggccctgcagcaggcactgtccatgtctcaaatctccctccccgggaaatctaggcacaggtcatactgctggaaggcttgtctgtctctcccagtctcagggccagagcttccaggagcaaagagtggtccgggcctttccttctctttctcccactctatcttatctctcctcctgctttctcccagaagacaagtatcagggatggaagaggtggccacgtgcagagcatgactaatcagcagctgagtggcacacacacaggggatctcgcctgaggcctgggccagcatggggaaggcccctgcaggctgctgggcacggggatggctcagggtcctgggctgggctgggctaggcttgggggagcccggtgtgttgggctggagctggcctctgctgtcgctggaccacagtcacccatggagggcaggggttgggaacctgcagggacagcatctgccctctggccggtggggggttcttagtagcagggcaaggggaaggcaaagggggccaggcccaggagcaggtgggkcctcctcacaggagcagggcaggattcgaggagctctgggctcccacctccgagctggactctgagcatgctggctccytccttctttccagggcagcagcagccccacattcaggacagagccatctgtgtaagcagggctcagagaccctcagacagacagggaaaaggagcaaaatgtattgtcatcgtccagcctgaaatctccagtgggacccgtcagtggagcacgtagcagacaccctgtccctcccgtgccccccggcctgtaagggcagctgaggccgtcttacctgctgagggagaccccgcactccctgacttcccgggctgggtgctggcactggtgaagggtttcgggctgtgagcctcttgccttccactcagactgggccagacccgacagcaccatgaaccagagccgccctgagtaggggctgacactgccaggccagcctcatcctgctcccggccataccaggtcccacggggccaatggaccatttcagtggatgcagggagcacagagcatgagtcgcacctggtggacgggcaggtgtagcaggccctcatgagaggaacaccattgactttcccactgggtgaggaagggacagctctgtaccatttccctctgctcaaacccacaggagccagccagggcatggacactcccatgaggtcacctttgctggtctgttccttgcggggctgctgagttcttgatagaggtaacaagcaaccctggggctcccgtgtgcaggaggaaggttggggactgcctggttgtgcttcggacccrgaggcagacagaggaggcctttgaacttggcctgagcttgttgggtgaagccaaggacagaggctggggtctgagtgaggggagatggtcccgtgaagtcagattggcacagattcccccatcagagttgggaggccccagaatgttcaggaacagcatgtggcaggggtcataactgaagccagacctgagttacaatccatttactcactgtgtgtccttggcaagtcctgcaagggaggcacactatcggacgtcccccgtggggctggcatgcagattgaataggatacatggctgcactcaccccagcgcctggtgtgcagcaggccctrtgccagtgtcggctgacgtcactgtgctgtgggtgtcatcagagcctgcatgccacagtcagtgcagtggcacagggcctgcatgccacagttaaggagattgtaggcccttggggagacagtggcagaataagggagtcgttgccagacactggaccaaggccctcacagaacccaagggagggcaggggcatcccctgctcaccgatggggactgtcacccttagggaagttggggacctgcctgagctcacacagctgggaaacagtgaagcctggatttgccttctaactttttattttcaaaaatatgcaacatacactaaactagaaccgtttaatgacccctgcaccaccgtacccaatgcccagcttcaagaattctctcacaatatgtcattcttgtttcatctgtcttctgccccctctccgcctcttccccttcactcctgtctgcttcctttcactagagtgttttaaagcaaatccagacatcaaatttcatcagtaaatatctcacatgcatatgaaatgcagaatgtatctctaacaagtaaggactttttttttttttttcttgagacggagtctcagtctgtcgcccaggctggagtgcagtggcgcgatctcagctcactgtaacctcgtctcctgggttcaagccattctcctgcctcagcctcctgagtagctaggattacaggcacatgccaccatgcttggccaatttttgtatttttagtagagacggggtttcgccacgttggccaggatggtcttgatctcccaacctcgtgatccacccgcctcggcctcccaaagtgctggaattacagatgtgagccactatgcctggccataagtaaggacttttaataatataatacattaaacattcagcaaaattaataatttcattttaaaatagccttacaggccagacgtggtggttcagcctgtaatcccagcactttgagaagccaaggctagtgaatcacctgaggtcagaagtttgagaccagcctggccaacatggtgaaacccctctctactaaaaatacaaaaattaaccaggcataggggcgcacacctgtaatcgcagctactctggaggctgaggcaggagaattgcttgaatctgggaggcagaggttgtagtgagctgagactgtgccagcctgggtgacagagcgagactccatctcaaaaaataaaataaaataaaataaaataaaataaaatagccttatagaggaataaccaacttacaacaaagtgcacctatatgaagcatacaatttgagttgccttttttagagatggggtcttgctctgtcgcccaggctggagtgcattcgtgctgcagcgttgaactcctgggctcaagtgatcctcccacctcagcttccagagtagctgggactacaggcatgtgccactgcactggctaatgtttttatttttgtagagatgggggtctcaccatctggcccaatcttgtctcaaactcctgggttcaagcaatcctcctgccttggcctcccaaagtcccagagtgttgggattacaggcaagagccgctgtgccctgcctacaatttgagttttgatgtgtttctacagccaggaggcacgtactcaggttaagactgtgaacatatccattcccacctttgagatccccccagcccctcttgccctttctaacccaggctgctgctgatctgctttctgtcactggacattagtttgcattttcaggaattttatgaaaatggaatcatacagtatactctatgtttgtctggcttctttcactcagcatagttattttgtgggtgatggatgctcttgcatggactggtagttcctttttagtgctgagtagtattccattgtatccattcaccgtagtttgtttacttattcactggttgatggacatttggattgtctccaggttttgactattacaagtaaagctactgtaaacatccatgttcaagtctgcctggatagctgctttcatctttcttaagtaaatactaggagtggaatggctgggtcatgtggtggtaggtgtgtgcataacacttcaagagactgccaaactgggctggatgcagtggctcatgtctgtaatcccttgcgaggccgagrtgagtggatcacctgaggtcaggagttcaagaccagcctagccaacatgttgaaacccctatctctactaaaaatacaaaaattagccgggtgtcgtggcatgcacctgtaatcccagctacttgggaggctgaggcaggagaattgctagaacttgggagacggaggttgcagtgagccgagatcgcaccactgcactccagcctgggcaacagagcaagactctgtctcaaaaaaaaaaaaagagagacactgccgaactgccttcagaagtgattgtgccattttgcattctagcaaggagtgagcattctaattgctctgcttctctccaaccctctttacttttagccattttgtaagaattctttatgtattctagatacaatcctttatcagataaataatttacaaatatgttcacccattctgtgggttgtctttgtattttcatgatagaatcatttgaagtataaaagtctaaatatttgataaagccagtttatttttctttcattgcttgtgcttttggtgttgcatctgagaaaccattgctaaatccagggtcatgaagatttatacctatgttttcttctaagagttttatagttttagctcttacatttaggtctttgatccatttcgagttagtttttgtatatgatgtgaggctgagagtccaccttcattcttttgcatgtgaatatcctgttgtccttgtgctatttgttgaaaaggctattctttccacattcatttgttttggcagccttgttggaaatcacttgccatgtatgtggaagtttatttctgggctctgtatgctattccattggtctatrtctatccctatgtcagtgccacactgtcttgattactgttgcattgtggtaagtttgaaatcaggaagtgagtcctccaactttggttttttgtttttttgtgtttttttgagatggagcctcactctgtcacccaggctggagtgcgatagcacgatctcggctcactgcaacctctgcctcccgagttcaagcgattctcctgcctcagccttacgagtagctgggattacgtatgcccaccaccactcccagctaatttttgtattttcagtagagacaggtttcgccatgttggccaggctggtcttgaactcctggtctcaggtgatatgcctgccttggcctcccaaagtgctgggattataggcatgagccactgagcctggcctttttgttttttgttttttgtctttttttaaaaaaagattgttttggatattttgtgacccttaaatatccatatggatgttagaatcagcttgtcagttttacaaagaagccagctgagattctgattgtgactgcattgaatctctagatcagtttggagagtattgccatcttatccagtctgtaatccatgaacatgggatgtctgtccatttatttagatcttttgtttctttgaacaatgtttcattttcagagagtaagttttgtacttttgttatatttattcttaagtattttactcctttaattgctatagtaaatggaattgtttttttgattcctgctttcagactttttattgcaaatgtgtagaaatacaatcgtatcttgtggccttgctaaactcatttattagcttgaaatttttttagtggattccttaggatttttaatgtatgagattatgtcatctgtggatagagttagttttacatatttcttttcaatctgaatgcctttatttgattttcttgtccaattgccctggctaaaacctctagtacaaagttgaattgcagtggtaagagtgaacgtcctttcattgtcttgttgctgagtttagggggaaggcatccagtctttcaccattaagtatgatgttagctttgggtttttctgcccattgaaaaaaattgagttttttgttttcttattatcaagttctaagagttctgtatatatttttgatataagtccctcaagaagtatgtgctttgccaatattttctgccagtctatggctgatcctttcattctatcaagaatgtcttttgaagagaagaagctttaaaagtttggtgaatttcaagttatcacgttttcttttatgaatcatgcttttcatattgtgcctaagaaatcatcatataatccaagatcataaagattctctctagtctattttcttctaaaagttttagaagrctttatatatttagattgatatatttatatatagatttaggtttatatttctatttatagtccatcttgaattcatttttatattttttctgagttatggattgaagttcyttttttttttttttttttttttgcatatgatagccaattgttccagtggcatctgtggaaaggctgtcctttctccactgaattgccttagcactttgtcagacatctcaaaatctggttgtgttagttccactttgtccttttatttcagagttgtcttgagtattctaagttttttgtattttcatatccatctatttgtggtttccatctgatttttgacatagatgattattgttgtctgtgaataaagacaaatcctactgagacagactgagaccatgtctcataaaaaagaaaaaaaaaaccatttcagaataatgcgttagtgtcctagcaacctcagcatgtctgcctttagccagctggggacccttcaagtgtttcttagtgttcttctggcgtttccacctcgtctttcatagctttcagtctcaggttcaacatcttctgttcccagagtagactggaatcggccttttaaccaaggagctctggttatttttagtggaaaatgatatttggagaccacagtttgaatgctagggtgctcactgttccaggcctctctaggaaaaatgatttttttttttttttttttgagacggagtctcactctgtcgcccaggctggaatgcagtggcaccatctcggctcactgcaacctccgcctcctgggttcaagcaattctcctgcctcagcctcccgagtagctgggattgcaggcacctgccgttacgcccggccaattttttgtaatggaaaaatgaattttttagaaatagaaataaatcatgaattcataccaatatttccacttcaaaagtttttgttcaacctttcaatttcatttttgtaccacttttataggaagcttggatcctaaatacagtaacataattaatgtgtatatagtcaaaataataataatatctgtattattaaatattttatcaccaacaatagatttactcgatgcagtctagaatctttctggttcttttgtcctcaggctgtgcggcaggagggaggattagtcaaaatactgtatttcaaaatcacttgaaacttcttatctgtgtttttaccaggtttattgattgagtttttggatttctagtagttcctttgttctctctctttttttttggagacggagtctctctgtcacccaggctgragtgcaatggtgccatctcagctcactgcaacctccgcctccggggttcaagggattctcccacctcagcttcccaagtagctgggattaaaggcacccgccatcatgcccggctaatttttgtattttcgtagagacggggtttcaccatgttggtcaagctggtcttgaactcctgacctcaggtgatccgcccgcctcggccacctaaagtgctgggattacaggtgtgagccactgtgcctgccctgttcttactcttaattatgcaaaacatttacatggttccatagtcaacaaaggacatttgtaaatgtctggcatgtctcctccctcacctgtaggtaataattttgatcagttttgggtttgtccttcccctgttgctttttgaaaatgtaagcaagtctgtgtgtgtatcttcccccagcccctcttcatgtccttatacaacaggatgggtgcaccttccgcacttgcttttttacttaatgaatatatcctggagcttacaccatagcaatagatagaaatcttcctcctttctacaaggagcccttctccagggtggggctgtagcgcagttcattcagcccctccccctgccagtggacactggggtgggttccatctttatacgatgctataggtagtgctggagctagaatttgaactcagagcccatgttcctattgctctttctcctgtgctctgtgggccgtcataatggaggaggcggggagcaaaacggagtgaagaggttgagcatgagcactgaggctgggggaggcgagtgtcccccgctgtgccatggcccctcgggtgtgaagctgggtcatgttgctttgctggggcctygggtgcaggttgtctggaagtgggcagctggtgctgggacctgctctctggcactagtgtgctcactgcagggcgagagcttgggtgcaccttggacagggattgattcactggactagctggtggagtgggcaggtctgttgatctgttggagacaatgactgttggagccctcgagcaggctgtgtcacgtggaagggcagttgagccatgtgctgtgggacgctttggatgctgccctgagctgccactggtcctatgtcctggagaggccctggcccaggttcagcagcactggccagattggggcagatctgaaaggagccagggctgtgcacacctggcaggacaggtggaactgggtgttgggaagggcaggtgtgatccaggtcaccgggccggctgggcctagcgtgtgcagagcagagggggctgacacggtgcgacctcggagagccgcctgttcatatatgcacttgcttgctggcccagggcctgcctagctggcagtgactgggtcctgtgctgggctctgctgagctcccacaaacacaccccatccactatgagccctggtgagaagggagaggggtccaggccccgctgggatgcgcggtgtggacagcacttggcgtgcacatgaagcttatgtgacggtatcacagtgaccttgatctggggctggggaggaaatgcctcgatgggctgtcctcatgctgctgggcctgggccatcggggccggcctaggggatgcccagtagccttggcagcctcagccatccttgtcaactccagtgggactgggggatcctgaatcccacctcctgatgccagtggagccctgagtttctgttcagaaggccaatggagggctgggctccaccgcctctgaggtccctgacctctcataggttctggggggccagggtgggatgagggagagacaggagtcatgggcagactccctgctgccccggggacgtctcactcagacatttgtatgtcacctacaggtaccctgggggccttagggcccctcctctcttcatggagcccagctagtggccccctcccttcctggctccctgcaaggcgagggaaagaggagaggagagaaggcctcggagcgctgatgtatccatcattccacacagacccgtgcttgttgagtgcctcctcgggtggtagccccacgtgggattcagcatagtgcaggcagaggtggacacagtgtgaactgttaggccacagccacatcttgccggagccgcaaggcaggagttcaggagtgagaaggcactggctgcggctcctggggctggaaagggggccagtcaggcaggcagaggggtgggtccagctgtagaagcgagatgggggcggttcgggaggcaaaagcaggaaggcagaaggaagcttggagctcatgagcccctctgtgctggcgcacggcccacgtcctctaaacaaaagggatgggctccttcagtggttccgtgggcccttggcaaagctcgtggaaacaccagctcctccccagcattcattaccaatgcgaagcactagccctttgcttggggcattctagacccccaggtgcctaggctgggagccctgggccaggtggtgggggggtcctggctgtggaatccagatgggacctaccactgcagctgggtattaggcagatttagccagggaaggacaaggtgagagaggaggagcttctgagagtccatcaagggctggccgcagaggggagaggcctggcagccggcgagcccagtgtggcacaggtctgtctgcctgtcctctccctggggacactgcttcacaacagactttcttcatcagctttgccggggcctgtcaggccaatagcttggacttagcctcttgactctcacccttttgcccattccaaaacaaaacaaacagcagcaccgccatgcgcccatgtgcctggtgtagtatcgttccaggcatttcatgggcaggaattcgcttaatccgcacagcagctctgtgacgcagtcgagagtattattagctccattttacagatcaggaaacaggcagagagaaaggaaataacctgcccaagctccaagctgcaagtagaggagccggtgtttgagcccagaacctggcgctgggagccacgagctgccctgctgggcactggggtggacacttgcccatcagtccttcagtgagtgcgaaggagccgtgtctcacttcaaagagggatttaaaaattctaccctcrccgggcacagtggctcactcctgtaatcccagcactttgagaggccgaggcgggcggatcacctgaggtcgggagtttgagaccagcctaaccaacatggagaaatcccgtctctactaaaaatacaaaattagccgggcatggtggcgcatgcgtgtaatcccagctactcgggaggctgaggcaggagaatcacctgaacccgggaggcggaggttgtggtgagccgagattgcgccgttgcactccaggctgggcaacaagagcgaaactccgtctaaaaacataaacaaaaataaaaaactcgactttctgcggcctcacttcaaggatgcgtaggaaatttgagagaccaataggaagtctctaggaaagggtcttgttcccagaagggggtcgtgcttcttgggcccttactgcatagctgggctggtgtaggccttgtggggtgggaggctgtgttcattgccaagatttgagaagccttggcttttatgtgaaaaacgctgagtgtttaattgttgatccaaatattttaaacatgctatgagtttgaccagaacacatcttgggctgccagttacaacctctgagtccaaggacaccaagaatagcaccctggaaagggcagggaagaagcatgggtcctggcgtggagacagaggccggagctgccacctcaggccagacgggcaccacgggcatgtgcatgggcagaggcygttcccatctgagtgggacccagaaggaaatcagacacagtccctgctctgagccacggatagggggagagacgggcgctctcacatgtcctgggccacatgccagggctaggagcctttcatccctcacctgctctacccctccttccacgctggccggggatcggggtggggggtactgtccgtcctgtttttcgtactttgcagctgactcagtttaggtagcgggcagctgagtgatttgcctatgaagtgctgtcggcttttggcgaatgtcaaggccaggatggtgtccctgggtctcgaccccattcctgttttcctcccactccacttgccttgggcctgtctcttctgccctagggtagaggctgtgggtgagatttgcaaaaaaagaaaaggagccggcatttggggaggagacctgtgtgttccagagctcagctgggaactccttgccagggtgtgggagaggctgggctactgaatggagcaaacacacacccagggcccggttgcattagggttccaggtcaacagcacagactgttttaggattaaaagcagtcccatgggacaggttgcaccaaaacattgtttgtttgtttgtttgttgtttgatacagagtttcgctctgtcacccaggctggagtgcagtggcacgatctcagctcactgcaacctctgcctcccgggttcaagcggttcccctgcctcagcctcctgagtagctgggactacaggtgcacaccactgtgcccagctaaatttttgtatttttaatagagatgaggtttcaccatgttggcctggctggtctcgaactcctgacctcatgatcctcccacctcggcctcccaaagtgctgggattacagacgtgagccactgtgcctggccaggttgttgtttatctgaagcttacatttacctggagggtcctggcagtgccggggagaggaaatttgagccagggtcacggagtgttgggcaaatgaatccccactctaggattctggaaatctagaagacaggcaaaaaccaggagcagtgagagcagagtgctgggccacgccgctgcctactaagggctcacatgcatggccctgggaggcgactgcgtccggcacccgctcattgttggatgaaacgagcagctgggctcccagtgaggacacggtggtgctgccaggcagggaaggaagttctgggagtcctgctggctgctggtttatcgattgcctcggaataacagccccatcgaataccagttcgctgggaggcaaggcgtggtttcctctttttctttcccacatgggttagtcttgcttgatgcttttctgttgtcgttagattgttctgaaagctcatttagcatcagctctttccgaggctaagggacaggtgtggcctgggtctgttgggggaggggggctgtatgggaggctgaggatggcagagagaacccttgaaggaaaggtttttgttgtttttgtttttgttttttgagatggagtcttgctctgttgccaggctggagtgcagtggcgcgatctcggctcactgcaacctccgcctcctaggttcaagcaattcttctgcctcagcctcccgagtagctgaactacagatgcacaccaccactcccggctaatttttgtatttttaatagagacagggtttcaccgtgttagccaggatggtctggatctcttgacctcatgatccacctgcctcggcctcccaaagtgctgggattacaggcgtgagccaccacgcccagctggaaaggtatttctttatcattagggaaatgcagaccaaagccacctgacacccactaggatggctacagaattttttttcttttctttgtttttgagacagggtcttgctctgtcttcaggctggggtacagtggtgtgccatcttggcttactgcatcctcaaccttctaggctcaggcaatcttctggctaacttaattttttttattattttttttttttttggagagacagggtctcactatgtctcccaggctggtcttgagctcctaagctcaagcaattctctcacctcagcctcccgaagtgctgggattagaggtgtaagccaccatgcccagtgtcccccacccctgaaggctataatttttgaaaagggaaaataactggtgttggggaggatgtggagaaactagaatcttcatgcattgctggtggggctggaaaatggggcagccactgtggcaaacagtttcacagctcttcaataaatagatttaccatgtgacccagcaattccactcctaggtgtatacctgagagcactgaaaacacacatccacaaaacacttgggcacgattgttcctagcaagcgcccgtatgttgcttggctttggccttggtcaccgtggacagtgctgctaacgcaacctaagtgtccatcagctgctgaaccggtggacaaaatctttatatactggagtcgtattcagccgtaagagggaatgaagtgcatttacgcactgtggcacagacgaaccttgagaacgttacataaagtcaaagcagccagacacaaaagaccatgtagtgtgtgattcagtttatatgaaacgtccagaataggtgaatccatagcaacggaaagcgatgagtggttgccaggggccggcagatgggggatggggaggacggggtttctacttggggtgatgaaatgttctggacttagaccgtggtgatggttgcatagctaaaaactactttgaattttatctcagaattggaacaaaacaaaacaaagcaggctgtggtcctgggcccccgcggtgctctctgcagactgctcctcttctgcccccaccccaccccacacattcccagcaaggtcaccgcagccccctcctcacccctgcagcgcttattccttccgccttttgagcttcccacagagtcagcagcggccacctgctgagacctggactagggcctgcttaccttctgggagaattggctgcagtgccaacagctggttgaggggaaggcccgggagctacctccttcacttctccttcctgtaaactttggcataccctgccccccgccatctgctgccccctagcctgccactgccaaggagctctgaggacaggggccagaggactcactagggagccaccttctgggagtcagtggccttgaggaaatcatcgctaatcactctcctgccgcaactgctgggaaaggcaggtccacttgggaagtggagcaggcagcagtcatcgctggggctggggtggaggtaggtggctgggagcaggcctctgaggctcttcctgtgcacacacaggcgcctactctgggcccacagacaacttgctcacatacctagagcccagcccctgaccccaggctgcatgcttgtctttttgcatcctccttgccccctcccctcctctccgttccttcctcagtgtgctgggccaggcccgggcgataaccagctcaggactgtggaaacagcaggcaggcaggaagagctcccttctctccaccgttggtggccagatgttgagattccagatgtgattagtttgaaaaaaaacaaagtaaaaggattctgaggctaaaagtcactgtttgaaagtctgtgccttgagaagagcacttgggcagagggaggagggtgaggggttttctttgctttgctttgcgcctgtgatggacactttgtgaggcccccagcggaaatttgggcctgtgctctgaaggccgcgtgctcctgcagccwtgggctcctctggcagttctgctggggcccttttagagtctgtgggatgcactcagcagctcccaggtagggcctgaggtcagaccccatgtgtctccccagggacagatcttctccrccagacgtctctttctgcctcttggtgggttcatggctgtgtctggttgaagagttgtttccagaaggaccttgttgtccgtccagatgaactgagcaagtgtgaaaatccctgtggaacttgctctagggcagataatgtgcagctggggtgcatgtggttgttgctcccgtgtaattcttcttctttggaaatgggggctttggagcctgggaagcagagagaggcatgtgctccccacccccaccctggagtctccccaggaaatatctcgttcttgttctctgctcacggtttaggttgcacgatgggaacacaagacccgcaagctgagcagggccttcggatccccctacctggcctgctactctctaagcrtcaccatcctgctcctgaacttcctgcgctcgcactggtaagcacagctctctcactggggagccacaacccctgggctagcgggagggccgctactggtggtacctcatcccycaccacgcgggagccttgtgtctgagcactcaggggttagctctcaaagccacctgccacagcaagccaccctacccctcccagccgtttagactctggccagcagaggagccccagtgacctcaggaatgggggtatgtgaatggggggcaagggacaatgcctgggtggtccccaggtcacatcccagcctctgccacgtagccaaggctgttttaggagtctcctccaggaagcrtccagtcagaaggtggatgctggctcgggagccctcaggggtcaggcctgaccatctctccaggttaggtttgaatcagcgtcagaaagcttctttgaggccgggcgtggtggctcacacctgtaatcctagcactttgggaggccgaggcgggtggatcacctgaggttaggagttcgagaccaccctggccaacatgatgaaactccrtctctactaaaaatacaaaaattagccgggcatggtggtgcatgcgcctgtaatcccagctactcgrgaggctgaggcaggagaattgcttgaacccaggaggcggaggttgcagtgagccgaggttgcaccagtgcactccagcctggggcaacagagcgagactccgtctcacatttttttttttttwaaaagaaagcttctttgcccatctctggacttgggacaggcaccttcctgctgtcaaatgaaaaggtcagagaagaagaactggaactagatgatgaggcacagcccactgcacttgggagcgaatttctctgcccagacaccaggctagacaaggcccacctgcgtggaatgtgatggctgcaggcgacctggggatgcaggctgtgcagggcagctgccccatctctgggccccggtctcacctcccacagtaccctgagaatcattgcgcacggcagctcatggactaaacatggaccacgtggttctccaaaaaatgagaaactagctgcaccagagaatccccatttttgacttgtcgagacagaccagaagttgtgtgtgtgcctggccacaccccacgtggagcgctcactggggccgaggcacagctgccccctttggatggggcgcgtgtagcctggctctccccattgcccgtggccccatctccgtcggaccagcctggcttgcaggcactgggtgcacacaggaaggggcctgygaatgctccatgccagcacgtgcggagccrgggcaggccttgctggtggtcaggcccctcacacactcaccgagggtggcctaggccttccccctccgtggccaggcacccttgctgccttctcgtcattgtcatggccttggccacaggaatgtgggtgagcagcgtggtcagggtcctactgaggtcagccttccgcactggacccctggctcctggcctttgcttcttggccctttgggccagggctgcctgctttctctaggcctgggtggctatcccacggtcttggtcctcagaggggtgggtcccctggcacctgccctgggttgaatgatgtgaagaggcttccccagagagggcttttcacccctcggagggcaaggggtttggcccatggcaccgcctcggggcctgtgcgtctgcacagcctgcatgcttacaatcttctaggctctccggccccagggagcattttcacatttatagtctctgggtagagaagactctgactgtgcagatggaggaagtgaggcttggaaagaagcaatggttgcccgaggttttacagctcatgaagcgctgaccagcattggagaacaggcagcttccagctcagcagtggcttagggagaaaagattccatccatttaggccagaggaacctggcaggcaccggcaccacccaggctgggttatgggagcatcaggggacgggagatgggcctctttcctacccatgctgcctcttgggccaccggcagagtgtccctccttacccaggatggggccctggctgcattggcaggacagtcaggggtctgtgccctccagcccccaggcatccacactccccagcggccaggagggagggggctggtgctggccgactgaacgctcagagcttggagtccccccacaggaacagcgaggctgaagacaggtggagggctgcagagggttgagactcagcccagggctggcacgctgagctgttccaccactcctgctccctagagcatgccgggaccaccatcagggccggcacaaagcaggagaagtgggctgcagcccacagcgcacacagatccaggagcagctagaccaggccaggtgactgcccagaaacaccggccagcgccacaaggcagctgccttgatggagcccctcctgccagccctgccccgggagctgctctgagtctctgctgagttctgatttcctgcgcaatctcatcttgcactagaaaccccagaggcttccttgagtcctccccatcacctccctgctggtccagcagcacagcctgtgatctgcctgaccctggaggtctgcccccgtcatccaccccttttcaaggcagagagtagagggccctggaaggggtcatccttcctcctccaggccccagccgagtgctgtgtgtacctaggagaccagggggacaggcccacccacagcccagttccagccgtagacagcagcaaagcactgtctggtttgttcttggatcccggggcctgggagtcctcctggggtagctggaggaagtcagcttcttacmgatggtggctcccagctttccctcctctcatatcagcgttggcctcacctggcatctgcccagccagcagggccatgacttttggttgaactggccacccctggattttggggaggagagaaaggatgtcctgggctgcttttctcctctcaccttttgygttcagaggcagaggtgtgccctggtcctcactctctcccccactgttcttcccctccaggcccctgcctgcaccctatcctgccatgtccctggtgacccatccttcccgcccacacctgccagtgtgaggcacacaggtggcaggtgctggagccggaccgggctgttgggccaggctctgacaggaccctcgggaccagctcctgcatmccccacacccccacaccctttcccatgcatgcctcgcttcaryggctgtctagaggtgggtattcttttttgtgcagtaaaatagacataacataaactgttatgaaccattttaagctttacaattcagtgacatttagcagcttcccgatgttgtgcagcccttcctcctgactagtttcggagctttttcctcaccctataggcctggagcagtcatctcccgccccccagtccctggcagcactcgtctgctttctgtccccatgagtgtgcctgttctggacctttggggtgtggcatcgttctccatrggagatggcaagctttgtggggtccaggctgtgctcaaaagcctctgcacccagcaggagtcggttggtgggcagagaacacaggcacgtgcttgagccaagcctgggtcatggatgggatgtccgagaggccaccagcagctgacctgccagcgggtcccaggggagagtaggtcactatgttagcaggtctgcaccagcagtgcatccagaggtggtcaggggaggcccggggcaggatgagccactgttatctggaagcaggtgtgctccatccagtcccgaaggggccattagcacagacctgtttgctctggctgtggagtgtgaatggggaggaaggctgatgggctccggggcacttgttgaagtcccttgcctgagctgccccctgcacagctgaacttggccagctttggctggaccgctaccctctgatgagccacaaggctggtctcgagaaagcccacgggggtgggcgaggcgtggatggccaggcagggctcgaaygggcttcacaggactgggctgcagcccttcctccctcctggctgtgggaggagacagccgagcttgttagggcatcagcgagctcctggtgtcgttcaccagtcacgggatggaactgtgctccagcgcacatcggaattgcctggagtctcccagggctccctctgggtcttctgaggggagaggctcctgtgtgctctggtgtggcgggcacagccaggctaagaagctgcatcctggcctcggagtgtggctgtcgatcaggaatcttcctcaacctggaggtattcccaggctgggctaggaggcacctggaggggcagggtggtctctggaaggtggtctgggtgggtggggtgcaggcggagccctggctgaagaagcgttacgaccaaggcctggaggagtgagccggctcttcagatggctgggcagggcccatgagtcccaggagagggcggcccccactcacaggctgggcagcaggggcagggcaggtggggactcacctcagcgctctgtatactagaggccgtggggcaggtgcaaccctgtgggacaccagactcaccccagagcccctctcccctagggaagtctgttttcaaaaactccctgatgattctgaggccaggcctttggggactgtggccctggaggaggctggcacaggtggccctctgtcctggtgactacatgtcctggtcactgctgcatcccacccagtgcctggccggacctgctcaaggatgtggtcaggacaggccgggggttgagcagctgcatgaaggagggagggcatggagctgatgggacagtttgcttccgatggagcaatggagggctgggcgtgtgcagcgttccatggcagaaaaaagcgactcctgctgtcttggcagaacaggccagaatttttaaagagtctgtggactgggaagccaagtgtattagtttccttctgctgtgtaacaaattcccacacacttagggcttaaaccacacaaacttactatgtgacagtttctgtgtccaggaggctggatgcgggggcggggtctttgcttagggactccccaggctggaatcaaggtgcctgctgggtgtgagctcacccaaggcgtggtcctccactctttcgggttgctggcaggacgcgggtccttgaggcccagctcctggtggcctccccgcagcacagcaggcagctctgtggctttggcttttggtctctctggcttctagacccttttggaaaggcctacccagggtcacctcccttttgattaactcaaggccagctgattaggacctgaattctatttgtgaaatcccttcaccagagtgatttcctcgmggcaggtgcctggggtagccactgggcggggtccatgagggcagctggagagtaaggggtgggggggcacttaggacagggaagctggcataggctttcctgggcacaagggcccccagctgctgggaaggaaggagggagaggggctgcagttcggcaagagtgggtccaggccctggtagaccaggctggtctggcacctgaggggctgtggctgggaaggagggaagaggcaccctccccatccccaaagcacacacggccaggaagtctggaaggagagtgggtgtcagcctgggattcccaggtgctaggggtgctgggatactgctgcctgttgtccttggcctgcccgtgaggcttgagcctatcccactgtttacaggtcgtgaggaggcaggagagccatcctgcccctcctgctttctaccatctgcttccctgtttgtaaaacaagacagactctctctcagctattgatgggttctggaaacactttggaaaggtgacgtgttattcaaatgctcagaattagtgcagcgtcaaagcccgaaattcaagccctttgatggtctcgggggttgcatagatgaacattttttgttttagtagttacatgcttattttaatatgtcttggaaaagaaatgagcccatcagacgactcatttcatggctagcgtcgtgtagctgagatggagtggaaagagcgagtcactccaagcctggggtgaaggatgtggagtacatggcactcaggccacacatggatgtggacgacgttgcggagacaccccaggatgatcaaagtcagggaagtgtttctggtcggctgcagatagaaacgggacaggcctgtcccaggtggggccgtgtgcctstggcctggtgtgtggcccaggactgctggctggggacagggcggggacactgagggcagtgatgccccctccccacctccaccccagggtttccgggattttatgggagcagagtgcagacagcctcaaatcacattaatgactgaaggttcaatccaggtcttaaaaatagaacccaaggcaaatgaatgagtctccgttccccacccctagtgcggaatacttccaagggaaattgcgtcctatattacctcattctgttagggagcttgtggtcacagagctactcatccatccactaattttccctgtggaatggacggactgtgctttcctggcttaatggaggagctagaacactgtcgattgcctaattcgggccatgagattccagtaaacctggaatctagaatcagagtgtatttgactgggtaaggggccacttggtgagaacgccagggaggagctcagcccagttcctctgccgactctgagcaaatgacccacagagcattgtgccaggagccagcccaggctgtcatctcagagaaaggaaaggaaaggccccaggactggggccgtaggcggaggagcagctgggggactgagggtcaggtctggggcaaatctggggcctctcccacccgctccctggccccggatctgcccttcatcaggaatctgcttccaagcagatctgatttgcctactgagccatgcccccagggaagctgggccctgaaygagctgggcttttgggccacaccagagggaggaagttccctttcatctgctgcctgcttgtgtgatgcagatgaattctggcagaggaaccctgagcatggggtatggacccaggcctggctcgggtctccgcaggagggggtaagagcgacagagtctccgtccagagtgaccctccagcgtctcgggcctggcctctgcgcccaccccctattgcagcacctggatgggtctccctggttctgcattttccacagcaggcagagtgcattccaaaccctgccgggccgaggcctgcaccttccctgctccatgccctgccccagactctaaggcacacctccctgctatttcctctttctggaatgctctcccctgttcgcccctcccaacccctgtctgttttctggtccccactgcagtggcagccaaggagccagatgcttgcaggggagccatgctcctgagcagggccggcacccttcctttccctcccactccaccatctgcaggcaggagagtggagggtgccaggcaggggagaaggtgtgcctggatcgtggcaccacactgggtgtgcatgtggccacctgattccatggcagcccgtgaccctgagccaatcccagaggctcggcctggagctgcggggtgaccctgagcccgggcagcagcaggatcagggcagggcactggtgggtggagagctgggggtatgggcagcatgaccggcagtgggtttgccctgacacccgaatgccgctgtttaacaggtcggtgtgcccgcctctgccaccgggtcctggtggctttgtccacaggcccttctccctttctccctggctccttctctgctcttggggatgggaggagaaggaaggagcggctactgcttctctccagtcgatgaatatgcactaaacatccattctgtggcctgggccaagtgctggggggatacgcagggaaggaggagcaacttctgttccccaagagctcccagtcaagctggaggaaggagttccagggaggcataaagacatgtctgtatgtccttagctcagcataaggagtttcacaacaatctgaattcaccaatgaatggaacgagtggatgaagatgggggcttcaatctgcttgaaagagcctagcaaacaaagatacttcatggtggatggatggatggttgtgtgggcagatagaggatacattgatggatggaaggatggatagctggacagatggatggatgtgtgggtgcatagaggatagatggatggaggaaggatgggtggtggggtggatggtaagctggccctgctgggagatgccgtctacagactgggtgtgaaaggcgctgccctgcgtgaggtagcagatctccatgtctcttctgtgttgtgattattgtgagcatgggaagagcacatttggtcacacatgtccgtgctcccacacacagcctttcctgtgagtgtgcctctcatctagcacccagggcccccttcccaccagcgcccgctcccctgtgatgaggcctgggtacatcagcacatgcctagcccctgtgccctccctgcaccagcccctcagttctccggagccaactggagaacytgagcctctagacccactgctgtcatagtcacccccttttggtcacgccactgccttttctttttttcttttttcttttgatactaagtctcgctctattgcccaggctggagtgcagtggtgtgcaaactccgcctcctgggttcaagcgattcttgtgccccagcctctcaagtagctgggattccaggtgcccaccaccacacccagctaatttttgtattttgggtagagacagggtttcaccatgttggccaggctggtcttgaactcctgacctcaggtgacccgcccacctcggcctcccaaagtgctgggattgcaggcgtgagccaccacacctggaccccactacctttttacaaggccttcagtggtttggccccaaagggagcctagtgggggaattcaggtgtggaggaggacattaagggcccccaaagtgcctttaaatgcaagtcaagccacccaggatgtggccagacccacaggggctgtggaagcgcaatccctagcacagagcatgccccaggcctcggggcactgagtctgttggggaatgggacacctgggcctgccctgcaacctggcacctgcgtctttcctgagcctcactttcctccatagtatgagttgctcattggacaggatgagagtttgcaagctggtggccttcgggctgaatccagcctgctcacatgcakggtctaaagtggctttcatgaattgtctatttctaaaaattaggatatttcacatacgagtcaggatttctggcttctcttgaaaaaatttaaaaatctgacaggcctgggcccctccctgttactgtcacccacctcccaggtggactggaccccacctgctgcctgcctggcctggcagccctgggctggctactctctaagggtccctggggagagggcgagaagatgaggtcggcctcctcccgggctgtgacatcctccctggccatgacrtcctccctctccatcccctgcccacagcttcacgcaggccatgctgagccagcccaggatggagagcctggacacccccgcggcctacagcctgggcctcgcrctcctgggactgggcgtcgtgctcgtgctctccagcttctttgcactggggttcgctggaactttcctaggtaagaccctgagggctggggtgaccctgagcaggaccgctggagccccagggaggtgcagggccaggtggytgctgccctgctatccgtgacatcggtgggagtgctaggggccccctccatcggggcgtctttgctcctccaggcctggcttgtctgtggttagaacaggaggctgggctccaacagctcctcttaccccagcgtgctgagcggctgcctcctggggagtgaaggcagctcctgctgcttctctccagctaatgaagatgcactcaatgcccgttctgcggcccgggctgggtgcaggactccttgagtccagctccagcaccagctcccccttgcagaagactctcaggccttgttgcacagaagcctgaggtggtggtgagtcagccacctctctggcagctcccggcacgcgtggctctcaggccaggcaggattgtggtttgtgccgtgtttggccgcaggcagggctggtgtaggtctggggaggggtgaggggtggaggcaccttatcccttctccatttccctctgcctgtggctgaggtgctttcaggctgtgagcccagtgctggcctggctagacgcccaccartgaccctgatgatggcagcaacttccagctccttggaatctgggaaagaaaagcagccatgggaaaggcagtaggggtcggggtgggaggggagatgggggcaggggtgggggacaagagggggccttcggaacctggaaggagagaaggaggcagtccctgtccaaggggagcccctcccagtgagcagggagttggtccagctggccgcattgcccgctctccgtcatgggtgggaaggcccacgtcttcctccccatcagccctggccagtgcaggagcttggaagtcactcggcttcagtggcctcagtagcctcctgggaccaacggtgtcctgaggagctcccgggcctgcctgccatccccatcctcagatgccggctacagctccttgggcccagcccccagggcaccgtgggctgtcacagggcactccaagttctcaaggagcttgtgcctgccagtaggggtccccccgagggaggaagtggcatctgtgggtgcagcattctggatcgcccatggccaggcctctctgggactgtggggggcacccacaggcagttcagtgcttcctgctcaggcagacgctgtagggagtttggtccaggaagggggacrgcagccaggagcgtctggatctgccaggtgggggcaggtgcgggcaggtaggaaagagaaaaaagccttggtgcaaggagagggaggttgagggcagagtagctggcagctggaggtggggggcagctggactggccgcacaggtgctgtcggttgggacagggcaggaggatgagccgaggccttgaaggccatccaaggggctgaggctccatccccagagaggtgggagccatagggggggtcccagcaaggaagaggttggaccgatggagccaggatcagaggtggggctcaggaggagctgtggaggggcccttccaggatgtgagggcggtgagggccccatgggaagggggactccgggctgtgcaatcaggtcctgtgggagaccagcggcgggggccctccagtggccagtgctcgggtggatctggacagggagggctgcagaggcagcgtaaggagagccaggatggtgggtggagcccctcagcagtggaagaacaagctgggggtcctggacagtcagagggagggaaggagcctgcaaacaccagtggccacagcctcctggcggccctgccagcagacatggcctagaaacaccgaggaccagcagcgcggtatgtaggcaaaggtggtcacttcctgctgtgactcagctcgaattgggtttctgtgccatctacgcacaccctgtgccccacttcctgcttcctgggaagaaagaactttccagtggtcctgggccctgccccgtgtccccagatggtgatgaagctcctggacccctcctgcccatgctgcccattgtcgggcagctgccctactttccgccttggatgaagctccattgtcctctgggaggagagacaaatgaggggtttctggggacagaaggctgggaggaacgaagccacaccctttatggagcggttactctgtgtccagtgggactgtcctctgtgggcctgggacagacactgtgactgtgaccccggccactcccttatggctcagagcagctctgccgggggacgccttgtggctgtgcggctgacgggtgcatggctggcctgtctggaacaggctgttcaatagtcaccctctctccactgggtctagctcctctgggcagctgagtgagaaaacaataccagagctgacctcccagagcaacgggaggcgtgctgtggccaggccctggtgccagagccacacagcctggggtgtggagcagagcagcccttagcaaccagctgaggcccctagagggagaggaactcaccagagcgaggaagagtgggaggtaggacaggaagaggaagggtctgcataaagaggcgccatgagcagagggcgaagggcctgaggaggaaaggcgctctctgtacagagagcagggaaaggcatcgcaggggagggaacagcgtgtgcagagccaggaagaagaggaaggccagcatggctgggtcagagtgctcgagaagaggagcagtggggcaggggcggtgctcagcaccttagtccttaggccccacgccctctgctgtctgcgtgcctgttgggtccctctgactctgcccattgttgaactctctgaagtctcctggagggcagggccctgtctcacctgcaggtytcgccacagcccgctctggggcctccctcagtgatggtgtggccagggctgatgaatagccgagggaccctgccttgcctcatccacaggtgattacttcgggatcctcaaggaggcgagagtgaccgtgttccccttcaacatcctggacaaccccatgtactggggaagcacagccaactacctgggctgggccatcatgtgagtaccaggcttgccacccctctgccctgctggccacctcccggagaggagctggtgcagctcaggacgcgggggccagggcccctggagagagagaaaggaagaacgtgtcatttgtgggggcctaggcgccctggttctccctttctcagaagcgtcttatctatggtaacagaaacaacatcccagaacagggtggtcagcttctccaaagagggctggagtgtggaggctcaaaggctgcaggcaggtcacagctgctcagccctggtcctgccacacaaaacagctgcagacgcaggaaaatggatgcgcgtctttggcgccagcacagctccacttacagacactgaagcctaaatttcagattcttttcacgtgtcatgaaacattctttttgatccttttgcttttaaccgtttaaaaatgtaacaggcgttcttggcccctaggccgtagtttgcggacccttgtgcggggacatcagggctgggaccacccgacccatcttccccgcaggaggggttggccagagccgccagggcccagctcacccgcagctgacagaactccctgtgccccaatagcctctgcccatgtggcagataccccttcccacagagggggccccgtgccatgagggaagcctagaactgctgtcggcctcagccaggtacgggtactgacaaggtatggagatgtgctcccccggsgggtcagaggacctgcggtcaaggatggcacagcgggcgctgccctcggcttcatacccagcccccaccccagcagttctagtttagccattttcttccatagaaggttttttggcagacagtgttccactgcttttgtttaacacttgaaaaccactggcctagaatttacaggttctccacaagacctgaggatcccaaaggagtgaatcgtaaacagtgaatgtcaagcgcaagatgttgcctcctggctcccaccttcagcagttgggaccgtagcagcgggggttggagacagcagaagctagaaggggggctgtgggtctggctgggacccaccctacccccaccccacgtccaggccaggcagtccccagggacacgtcctacctgccttctagcctggtccctctgcctgmtaaggcccagactatgtgcccccaggctcaccggccatggagcacccccactggggccacaggatgagcccaaactcaaaacaatcccccccacccaggtcgtccctgcaggcttagggttcccaacacacctggctcccccctctcctctgtgtgcacaaacacatgcatgtatgcactcacacactgttccctcgcctagaaccctcccacttatgccccttgtcagtccttccaaacccaacgtcaagtgttccctcctgcacgaatccctccctaaccccccaaccttcggtgcctccccagtggcttagtgtccccagcagtgtcttgtgccctggagtgagagtcacccttgggctcggggcagccaggccagggctctgggggacgcataagccrcctccagaggacatcagccatgcagcrtgctgagagatggcatcaatggtccaggagctcattagagatgagccattatctggccagacgctgacacagcggggacccccacaggcctcccacggcccatctgtctctcacctgccagggccccggagatgggccttccaggtgtctgagcyccccggcatgtaggaccccagcaggctgtgtggcagtgagcccgatgccaggggacagatggcagaggtggtggcctggctgtgagggacaggtgggcctcctgcttcgtgttgtgcaatcagggactcctgtccccctcggcgcccacagtggggtcgctgctggttgccaggcctggggttggagcctgggcttggatctttgcttacgtctgccctgcctcctgcagctcccagacaggcagaccagtgtgaggtccaggggtggaaggcagtgggcagggcagagggtccccacggggtccacaggtgtcctccagccctcacctcgatccagccctgcctgaggttcttgtgatggtttggctggggagggggcagcttggcacaggggcagccaaggagggcacagcccctggcccaggcctgcccatgcgccctctgtgcccgccagacagctcctttcctccctctccttcctctcttcctccctccctccctcctcccyggcagcagcccagcrcctgcgggagctgtgggatcagaggtaactatagaaatagattgggggacagcttgacggcagctatttctggaaacccaaagcagctgcgcccgggctccttggtgccgtcactgacgagctgccgctgcttactggtgtggcggggtcaggagctggtcaccagcaaagagcccctggcgatgctccatccggccttgggcctgctgtatgctctgcctggggcctcccgtcctctgggctggggtgaccgggggctcctgggcgtggggctgctgtcccaccacctgggagagcccaagctgggctaggtgttgagggctgggcggggcggcagctcctaagcccccttccccacagccagatcctcccagggcgtggccatggggttgcacctgtggccaggggctggggactcagggtggaccaaactggctttgggggaccctggacccatttctagaaaacagcctttgttcctcagagcatggtttctgggagacgggagcactttgccccagaatctcctcctgtgcgggaatgaacagccctagccactgggactcttccgcctggggctgcgttcccagctctgggctggcggctggagacccggaaagagtgagcaggccccaccctgagggaacccagccaggccagacaggcagacaatgatgataaatggatcaggaccgagaacatggggaccctggtcctggcacaaaagccagactcaggaaggggcagtgctgcctgggctcggtcggcccaagtggcccagcgtcggccggagggccwgggtcacggcaggaagggccagcctrggcaggtgggccgtggccctgagagaccctggctccagccaggcctgacctgcctctgtcctttcaggcacgccagccccacgggcctgctcctgacggtgctggtggccctcacctacatartggctctcctatacgaagagtgagtaggggctgcggcgggtgggggcgtggctgcccgactggccctgtctctccctctagaacctttccttgtggccagggcaggctcaggacaggctgccgtcagccaggcccactccagggctcccaggtcagagyggccatggtagcttacaatgcggcctgcaggacccagcaggcagccggcccctctcccctcccctctcccgcctgcgctctgaaggctccaagtcagtgttgccccagtggctctgggggatgaaggggatcccggtcccatctggacaccctcaagctgatggacgcagagctctggtgcgggcagtgggtcacccccaggacctgctgaccgaagcctctccccgctgcccggcaggcccttcaccgctgagatctaccggcagaaagcctccgggtcccacaagaggagctgattgagctgcaacagctttgctgaaggcctggccagcctcctggcctgccccaagtggcaggccctgcgcagggcgagaatggtgcctgctgctcagggctcgcccccggcgtgggctgccccagtgccttggaacctgctgccttggggaccctggacgtgccgacatatggccattgagctccaacccacacattcccattcaccaataaaggcaccctgaccccaacatctgctccagcctctgtctgtctgtgtggggaaggagcaggcctggggcacgaatatcaggtcaaatagctcccgagcaaggctggctccagcctttctgtcttgaaatctcagagctgaggggtgggcacctctctccaggcctcccagtaaggtacttaggaggcgtcaggggytcacctggccatggccatggtttcatctccaggagacttggtgtcttgtgtcacctgctcccacccctgccccagcacacccaagacagcccctctgctgcctcttcccttggaggatccagccccgtgtccgtcagcatgagggtggagaggtgtgggcatgttgtccttggccaccccagtctagctgggcagatgacactgtcattcctaaatgaatggccttgtgctgaccagcagctggacacatgctgggcaccctatgtgtctgtatgggggtgaggggtgggccctgcaagggtaagcctcatctgggggaggcagggcacagtgaccaggagtgtaggctcagccattgccactgggactcctgaggtggacagaggggacaccctccccctctcctcctggcatccatgccgccacttcctgttttcatcccagttctgctgctggtggcagggtcacccctcagcccccargactccaggccccctgactggggcaggtcgaggacttctatgcttggtgggctttggggtgattctccccggggtgctagaggccctcagcccttcagctttggtcaacattatccctcagggtctctctgtgagccccgaaggccagtcaggggctcccggaggccgtgtggggattagggttctgcggggagaggcctccacctgttccagcccctctcctcttccacctgtgacctcaggcagatcaccgccctcctccagctccaggggtcctcagtcaagctcagagacagtggccgagggccggctttcccttgacctcccgttactttcgctcagggctgcaaagccacggcctgaatggatatttacaaagcgccctcaatccaggatcttcgtgctcacaccgccaagatggggtcccgggccgcattcctgagccttccaggcaagcctggccctctccttggagggctggaggcgggtgcaaggagactcaccccccagcacaggagtccccaggccagagctgtcagaagccacagggcttccgaggagtgaacctgaccctttcatcacacggcctcttgtcccacttccttggcccccagggcacatggtggaggcagggctgccagccctgaactcctcttgccccagccccagccccagccccctcgcccctggacctgggcaggttccccaacttcccactctgcatatggaggtagagtggatgatggtgccagggttgctgggcaaggctgaccctcacctgtgtcttcgctatcccaggtgcccagttgaccgggccccacagcccaggcaggtggccttcagggtctgggccacagagcctctccatccctcagctgtgctggctccttctctctctgggcctccttccctgtctccccagccaggatgctcggcctgggatccgggccatgggtgggaggtgccagaaagtctcagcctgagcactgctcatgttcctaggcagttccctgctccccacctccgctccccatcagtcccagcccccactggggggctttatttttaggtaccacttactcagcacccagctgtgtgtgcagccggaggaagcctggttccctggcaaccggcctggctcagtccagtgggcccctcccctcagggctcccacctcctgcccactccccactcacccctgcgcttcaccctcacaccaccccccctgccaaatgcaaatggggtcaggacaccccctcaaccccctgttgtcctcagaaggaagtcttggcccattaaccctggggcccaggacttattctctccccagagcctgtcccaccgcggcctccttccctccatctgggctcctgcgatgtcttcaggtctcagatcacctccgcttattcctgcgtctactctcgccattccctccacctggacacccctatccatctatccgtccatccatctatccgtccatccgtccatccatccatccaacaatattgagttagtccttctatgacacaggcaggggactcactcagctatgagcatggttttcatgccctgccctcaggggcacgccaccccttgggacaagccactgcaggatggggacagggcgggatgttttcctctcatcgctgccatgatcgatctgcgtcctcaggctctgcagaatcattctcgctggtgaggtgagttttgaagtcagatctgggtgtgagcaggtgtcaggaggtgaggcagtggggtgggtgaggagccttcccgcccaagggaacagcatgtgccacggctgtggtgggccgacccaggagagggtccagggctcccgagtgtcccttgcaacaggcaggcctggtgagggactcaggttccaagaaacaaatgaagtatgggaggaaagtgacaggttccccttggctgcagggtggaaacagggtctcctactgtgaggaggcccccagggtggggaggcccctacagagttgttctgggcagtggtgatggtgctaggccctggacagaggcgtgaggtgggaagagggaacatgagagatgtgtaagggggagaatgtccaggatttggggatgaatggggaacaaaagggtagcccccatggtgggcgggtccaggggagctggagagatcctgagtccctctgcaacaggcaggtggctgccgggtgtcgtgagagggctgggctggaaccagtacctgttcatcagggggcgagattcacgcttctcaacctggagcacacagtcctgccacctggccaattttatggtttcatttctattataattttaacatctttactgagatataattcacaagccatacatacaattcacccatacatacaattcacaagccatacacacaattctgtgagtttttgtttatccaaagagttgtgcaagcatcaccacaatcatgaaaacattttcgtcactccccagagagacccctgtacccctgagctgtcacccccgactcctctccagcattaatcgccaccaagccgctctctgtctctatggatttgcctctcccggacacttcctataaatggaatcacggtatttgtccattggtgtccggcttctctcactcggcactgtgtctttgaggttcagctgcgtagtgccatgcctcagcactcgtcatttttactgctgaacagtgttccactgtgtagatggagatgctgtgtttatccatcaggcaatggacacttgggttgctctcaccttcgggctgttgtgaagaatgctgctgtaaacacttgtggacagtttttgtgtagacacgctttcattgcttttgggcaaatacctaggtgtggaattgttaggtcatatggtaactcacacattggacccactgaggaacttctagcctgtttttcacagcacgtgcatcttcttacatgcccaccttgatgataattttttatttttatttttatttatttatatttgagacggagttttgctcttgttgcccaggctggagtgcagtggcgcaatctcagctcactgcaacctccacctcccagcttcaagtgattctcttgcctcaagctcctgagtagctgggattacaggtgtctgccaccacgcccggctaatattttgtatttttagtagagataggatgtcaccatgttggccaggctgctctcgaactcctgacctcaggtgatctgatcgcctcggcctcccaaagtgctgggattataggcgtgagccaccgcgcccagccccgatcattttttttaattgtcagtgtactctggaccccctggatggccatctctcatgcagtcctgccatttgggattggctggattgtttccttggggagaaatggtgcatttccataggtggggggccacttatgatgcagcagttccaccctgggtctccccacagacacaagtgcctgggagcaccaactaacacccatccccactgcatcctgtctcctgaaacccccagcattcgccagcgggacagtggacacacacgtcgtggcttagtcacgcaatggtctcccctgcagcaaggaaaggaatgagtggccggtacctgtggaaggatgtcgtggacctacgatgcattgaaaccagacacaaaaggcaaaacggatctacggtggtagaagccagtgtagtcggcagaggcttagccaggtgagggcgcgagggagcttttcagaactggaggtgtcctgtgcttggatgtggtgctgccacaggtgtgcacagaggggaaccttcaagctgtaaactttccatctgtgcaccctactatagccaagtcatatcaagttggaccatataaagttgccaatactgcatgtgaccatttctaacttagaaaagcagtattattcagccgggcatggtggttcatgcctgtaatcccagcactttgggaggccgaggagggcagaccacgaggtcaagagatcgagaccatcctggtcaacatgtgaaaccccatctctactaaaaatacaaaaaactagctgggtgcggtggcaggcgcctgtagtcccagctactcaggaggctgaggcaggagaatcgcttgaacccgggaggcagaggttgcagtgagccgaggtcatgccactgcactccagcctggcgacagagcgagactccatctcaacaaaaaaaaaaaaaaaaaaaagaaaaaaagaaaagcagtattgttctgtgattcagactagtatcctaaaaacttaagagaaaatggagcagtgtgaatagtatgaaccagaaaatgatcagtgacaaccatcacacaggaaattttggaagggacacatggcagtgtgacctgttttcgctagggtggtcaagtgggcctctctgaggaggtggcatttgagccaagacccaacttcaagaagaagcaggagggaggaagagcctccgggcatcgggagtggcaatgcaaaggtcctgaggtaaaatacaaaaattagccaggcatggtggcatgcaccagcactcccggctactctggaggctgaggcaggggaatcgcttgaacccaggaggcggaggttgtagtgagccaagatcacaccactgcactccagcctgggtgacagagcgagaccaaggaaaggcatggtgtggcactgggccagatggacactgcacacactgaccctgcggcccctcatgtgtaaaatggccatcatagtcatgactgccttgtgtataaagcaggtgctcaggcagtgcctcccttatcacccatggagctcctcaaggttttctctttgctttctagaatccagaatctgtctcagggcttgaggggcatgagaggcgtccggtctgaccatatccagtgcctccgtcctgctcctgcttgcacaggtgctcactccctccgccagcacctctgcacacacggcctttgaggacatattgctgatggatgggctgagccgggcagcaaagctccgtgcatcctgacccttggttcctggggcagagccgggagccttgggctgaactggcttctgctggaagggtctgctctgtcgggtacagagctcatcactgatgaggaatctaccagagttaaaatctcagcttgatgaggggagcctgtcagagggaacgcaaagccagctctatttgcccctttcctcctcttcaggaggtggcgtaccagggccacacaggatagaagcgtgcctcagggcctcctctgtccaaggcgctggtagagatgggctctggccgcacgggccagcacggcaatgcccaggcccgagggtgctctgggttcctgtcaccts

SEQ ID NO: 95513 - DNA, 56203 bp, Homo sapiens
tcctctgttactgctctccagtgtaagcaatgtgttggactatttactttgtatgacttcagttctttaaaatgtatagaggttggttttatgactagcatatggcctatcctggaaaatgtcccatatgtgcttgagaagaacatgtattctgctgttgttcggtggagcgttgttctatagatgtggatgtctattatgtttagttggtttagtattatttgtgttttttatgtccttgtggcctagttgttctaccgcttattgaaggaaggtattgaagtctattattattggtattattattaaaaacagggtctcactctgtcactcaggctggaaggcagtggcatgatcatacttctctatggcctcaaatttctgggctcaagtaatcctcccacctcagacccctgagtagctaggactacagacatacactactaagcctggctaatttctaactgttattttatttattttttcattgttttttgagacagagtctctctctgttgcccaagctgctggagtgcagtggcgcaatctcggctcactgcaacctcctaggttcaagtgattctcctgcctcagcccctggagtagctgggattacaggtgcccaccaccatcccagctaattcttgtatttttttagcagagacagggtttcactatgatggccaagctagtctcaaactcctgacctcaggtgattcacctgcctcggcctcccaaagtgctgggattacaggtgtgagccaccacacctggcctaattatttatttatttatttatttttgagatggagtctcactctgtcgccaggctggagctcatcttgcaaaactgaaactctacccattaaataactttccatttcctctcccctcatctcctgggacccacaattctactttctagttctataacttcgactactctaaatacctcatctaagactcatatagtatttgtcattttgtgagtaatttcacttagcataatatcctcgaggttcatccatgttgtaccatgtgtcagaatttcatttctattttaagtctaaataacattccattatgtatgtcatattttgtttatctatttatccattcatagacactgggttgcttctaattcttggctatggtgcaaaatgctggtatgaacatgagtatagaaatatctcttaagactctgctttcaattctttttggtatatacccagaagtggaatttctagatcaaatggtaattctatgtttaattatttgaggaaccatcatgctgtttttcccagttgctgtaccatatacattcccactaagaatgcataaaggttttaatttcttcacatcctcactaatgcttgttattttctgttttgttttggttttttataatagccatcctaatgggtatgcagtagtatctcattgtggttttgatttgcatttccctagttaatagtgatgttgagtttctctccatgtgcttattggccatctgtatgtctttggagaagtgcctattcaaatctgttgctcattttttttttttgagatggggtctcactctgttgcccaggctggagtgcagtagtgcaaactcggctcactgcaacatccactgcccgggttcaggcaattctcctgcctcagcctcccaagtagctgggattacaggtgcgcaccaccatgcccaactaatttttgtatttttagtagagatggggtttcaccatcttggccaggctggtctcaaactccctacctcaggtgatccacctgccttggcctcccaaagtgctgggattacaggtgtgagccactgtgcccggccttgttgctcatttttaatgtaatctgcattgtttctgacaaaaagtctgctgtcatccttttctttttttttttttttgagacggagtctcactctgtcacccaygctggagtgcagcggcgcgatcacggctcactgaaagctcagcctcctgggttcacaccattctcctgcctcagcctcccgagtagctgggactacaggcgcccaccaccacgctgggctaattttttgtatttttagtagagacggggtttcaccgtgttagccaggatggtctcgatctcctgaccttgtgatccgcccaccttggcctcccaaagtgctgggatttcaagcatgagccaccgtgcctggcccatccttttctttttttgttcctttgtatataatgtgtctttatttttctggatgcttttaagattctgtgtatttctggctttgagcaatttgattatgatgtgtcttagttttcccaaacaaaataatttaaatttaaaaaatactgcctgggtgcagtggctcatgcctgtaatcccagcactttgggaggccgaggcaggcagatcacctgaagtcgggagttcgagaccagcctgatcaacatggagaaaccccgtttctactaaagaaaatacaaaattagccgggcatggtggtgcatgcctgtaatcccagctactcaggaggctgaggcaggagaatcacttgaacctggaatgtggaggttgcggtgagctgagatcacgccattgcactcactccagtctgggcaacgacagcaaaactccgtctcaaaaaacaaaaacaaaacaaaacaaaccaaaaagtgaaatatttaggtataaatcaacaaaacacatgcaggatctgtatactgaaaactacaaaacattggtgtaagaagccaaagaaaagagggatatactgtgttcatggattggaatagtcaacataattaagaagtcaagtcactccgaattgatctacagatttagtgcacttccaaccaaaccaaggaagttttgtgtgtgtgtgtgtgtgtgtgtgtgtgtgtgtgtgtagatatagacaagctcattctaaaatttatatggaaagtcaatgaaactagaatagttaaaacaattttgaaaaagaagttgtgggactcacaatacctaatattaagacttactatgaagctaaagtaatcaagacagtttgctaatagcaaagggagaaacatacagatcaatggaacagaataggagagtctagaaatagatccacagaaataggatggatggagtttgtttttgagacggagtttcactcttgttgcccaggctcgagtgcaatggagcgatctctgctcactgcaacctccgtctcccgggttcaagcgattctcctgcctcagcctcccgagtagctgggattacacgcatgcgccaccatgcccgggtaattttgtatttttagtagagacagggtttctccatgttggtcaggctggtctcgaactcccgacctcaggtgatccgcccgcctcggcctcccaaatcctgggattacaggcgtgagccaccgtgcgcggcctgatggatggagtttttaaaaaactgcaacggcaacccaatatagaaggcacagcaggagccccgccccttctgagttggcggggcgggagttccccagatgccgctgcagttgccctgctgcggctctggcccagcatctctgtgctcttgggaacctgtgaaggctccactgcccctcgcaggctcggaagtgcctgctcctgctgcctggcttctccctgctgttggtgcctgcttcaatctcggagcaaagtcgggccgagctagggcgccgtcacagcccagccgggagtgcacacgctcagggcagcactgacacgccagccccctgcctccttggccccctccggacttgggtgccaacaagcatcggagaacggccgaggggggcatgaggacagcctggtgttggcctgcaggtaccccttggcatgaacagcctgggcgccatgaacagcagcaggaatgcagacagctcctcggtggaagggggcgggtccctggtgaagccccaccttcaatcctggaagggcctgaagcctgggggccaggtcaccagtcccagtaccagagcggggaacttgtggtgcttttccccaggcctgctcatggccacctatggccgcccatggaccaatsagcactcacttcttcccctctgaggtccataaaaaaccctggactcagccagactcaaagagaggacgggtagatggggagaaaaccagctgcagagaggaactaccctttctgctgagagctggacacttgttgggatgaactgcctaccagagaggagctaccctctctgctgaaagctgaacacttgtggggaaaccctggctatggagaggagctgcccactgcaggtctcttctgaagtattctgttgctcaataaagctcctcttcgtcttgctcactctccacttgtctgcctaccccattcttcctggatgcaggacaagaactcgggacctgccaaatggtggggctaaaagagctgtaacacaggctgggtgcagtggctcacgcctttaatcccagcactttgggaggccgaggggggtggggcggatcacctgaggtcaggagtttgaggccagcctggccaacatggtgaaaccctgtctctactaaaaatacaaaaatcggccgggtgcggtggctcacacctgtaaccccggcactttgggaggccgaggcgggcagatcacaaggtcaggagttggagatcagcctggctaacatagtgaaaccctgtctctactaaaaatgcaaaaaagctgggtgtggtggtgggcgcctgtaatcccagccacttgggaggctgaggcaggggaatcgcttgaacctgggaggtggaggttgcagtgagccgagatcctgccactgcactccagcctgggcaacaagagcaagactccctatcaagaaaaaaaaaaaaaaaagggagagaatgtggtacatatataccatagaatacttcacagtcataaaaaaagaataagatcatgtcttttgcagccatatggatggagctggagacaattatcctaagcaaacacaggaacagaaaattaaatacctcatgctctcacttaaaagcgggaactaaacattaagtaaacatggacgtaatgatggggacaacagacacggtgacctacttgagggtggagagtgggaggagggtgaggatggaaaaactacctatcaggaactacgcttattacctgggtaataataatctgtacactaaacccccaagacagtcaatttatataacaaatctgcacatgtatccctgtacttaaaagttgaaaagaggccgggcgcggtggctcacgcctgtaatcccagcactttgggaggctgaggtgggaggatcgtttgagcccaacataggaagactcctgtctcaaaaaaaaaaaaaaaaaaaaaaaaattaccagggtgtggtggcaggcccctgtggtcccagctactcaggaggcagaagcaggacgatcccttgggcccagaaactcaaggctgcagggaaccgagatcatgccactgcttccaccctgggtaacagagcaagaccccgtctccaaaaaaaaaaaaaaaaaaaagcaatacaggggtacttaatatttattcatatatttacctgagaatcatcagttttactaaggctgtatgatgttagcagatattggttctatcagtctctccgcagacatttgctgtaaataaagcagagaggctttcagagtgcaccctgtttttgttcctccatcctgttgtctggatccccttctaaaacgtaagttccaggatggcaggaactttgtctatttggttcacactcgacacagttagtgctcaaaaatgtctaacgacacaggcctgcttctcggtttgcactgctcctccatggtagtctgtgcagtgggagaaggcagcccgggcccagggtccacggagaagacgcaaatcgacagcgcgggagcgcggaccttctggaggcgcgcggcgcttaccgctgtccgtcctcgaagccccgccccggggctccgcctccgccggcgcgtgttcctttagggaccgcgcgcgccgcggcctcgctctggggccggtacttgcgcgcccgcaccccgcgctccccgccccgctccccgtcccgcgctccacgcgcgccccagcgttgggggcttctcctccgcggcgggaatgtctggccggctccggcagcacggcgcggcccaggtccccgcgcccacgacgggccagcgcgctgggccatgatccggctgggcggctggtgtgcgcggcggctctgcagcgcggcggttcccgcggggcggcgcggggcggcgggcgggctgggcctggcgggaggccgcgccctacgggtgctggtggacatggacggcgtgctggctgacttcgagggcggattcctcaggaagttccgcgcgcgctttcccgaccagcccttcatcgcgctggaggaccggcgcggcttctgggtgtcggagcagtacggccgcctgcggccagggctgagcgtgagcgtccccgccccgccccgcgccgggcctccttctcgccccgagccccagacaccgcccctgcgccggtgaccttggacggtcagcgccccagcctcggggtggccctctgatagaatagggtctgggggggactaggggccacagcgcaccgggaagatgcggccccgcgctcaggatctgttggctgccatccaaggtttctgaaaatgcgggagagtacaaagtgttaatatacctaactctgcatttaaagctgacttcaaaatttgtggcatatttggcctcaagtcgtttgttaaatttttagaaaaataaacgttataagttgtcctctttcaccccgaccgcagtcacattcccacttctttgtccccaggactttgatgggtgtctttacccatcttttttactgttgtccatgaaagcatagcttccaggggtatttgaggcccagagaggttgtgtgactttctgggggtcacacagtgagtcagtggtccaggtgaggtgggatccacctcatgtcttatccccttgcagagctggccttgctgaacacctgagctcaacccctaccatccgactcccgaggtgttctgtccaggatggatagaggggaaagatccaaggagggacgtttacacacagatcttggttggtaaatttgaagtattttgcaaaaggaacaggggattttggtatgcacaaaattaaagaggctgagtgttttttggcatcccttgattggccacctagggttgctgctggagggtttgataaagaggagaaggaagttacaagagcccgttttttagccacaagttcactgcatcctctcttttgttgggtagatattattatctctgttttccagatgaggaaacttgccccaagtcacatgctgctcaggggctcagtcaggactcaaacccaagtctgtctgcctcccaagcacagttagtgctccccactccacagtcctgttctctgtactactgtctctaacaagtgacatttcttctgacatcagaaagatgcctcatcagtaatgtggtttgttgagggacaggtgttaaaaaaggaaaccaagtaccgtttgtctccatcaacaccaggcacttcagaaggtgactttcacagagcccagtgtgctgagctcttctacagcggatgcctaatgataaactttaaactggagaaaatgccctggtactttctgcagcctcaggaataggctccagtgtgtggcgagtgttcatttataggcagcgctcggcatggggagtctggacaccatatatccgcccgggagtgtattaacgtggaaaccaagcccacccccaactccgaaaagtgcagcagcttttccagttctttgtgcaaatatgtaggctctgtacgtgtggggttactggtttccaagcacaaggcaaaggcacggggcagtaaggagggtgccttgggagtaatctgctggcttccactacttcccttcctgaggcacggcttgctgctgtggacatccctgggcctaccccaagctggcccagtatctgtggttaaaacaaccgcccccccccccccgcccccacacacgtggctccttatgtgtatgtaggcatttctacttttcaaaattctgctctgtctgtattccctttggtcttcacagtaccctatgtgggatgtgaggatcaaatgtgtttcagtaataagcacgcatttgcctagtccctgtggttcctgagagtgttgctggtatgctgtcagggcatcctccggccgtccatgtgacagggtggctgtctttctgtagtgtgcagaacagctggtagaggcacttcctgtactgcacacgtgggatttaggctcctgctcataggctgagatgtgtctcccctctggttgtcactttccccttgcctgaccctagaaaaggtgctgcattctggccctgcagcagaacaggggaaggagaaaggcagcgggggttggggagtggggaggagagggttggtgttgggggttcttctcccagctcagctgctgttttgctgtgtgacatcaggtggatctcttccccgttctgagcctcagttttctgacatgtaaaatgagggtctgcatttttgctttgcaactctaaaagcagcagaatcctttttttaaaaatgtacttattggcacctcaacatataaaaccgataaaagcagagctcttctggttaatgtggggaggatcctcgagctccctgaattgtccttttaccctgtctccccctcccccttgtccctcatggcaccttaaagatctctgagtccctccagttctcaagtttaaggactctactaccatggtaagagctggtccagcctcagtttccacaatgcttttggccactcgaatccagcctaacaagcacgcagttcctgatgattggcctcaggtcccagagagctccagcaggtgtaggagtccatgggcctgacacctttgctggtctctgctggatcccgacgaagtcaggtcctttctggaaaggggttcgaagtccacatactctccgcactacccccaggaagtacrtccttgggtgtgtgtttgggggagtgagaggaatgmagaaccactccccctatagcctggccatactccccaagatgagggcagtaaggtgctgaggaccctggaagtaacttgcttttctcaacttctcaggagaaggccatcagcatttgggagtcaaagaatttcttttttgaacttgagcctctgccaggggccgtggaagctgtcaaggagatggccagcctacaaaagtaagtttgtcctcccagccactcagtaagtttgtctgagcagccactgagccctgtacctccttcctgcttcttccctcctctgccttctcctttctctctccttggccctgcrcaaggctgcacttgcctcgtcattgctgagcctggggaaaaccaccaaatacaatgatctcggtttgtaggctgtgatgttttgatccaggaacttgaggaaatacccagtttaatttgatctggttccctgggtgttcaaagctcatttattcaatgcccggacgtggtggctcatgcctgtaatcccagcactttgggaggctgaggcgggcggatcacgtgaggtcgggagtttgagaccagcctgaccaacatggagaaaccccatctctactaaaaataaaaaagttagcygggcatggtggcacatgcctgtaatcccagctactcaggaggctgaggcaggagaaacgcttgaacccgggaggtggaggttgtggtgagctgagatcgcgccattgcactccagcctgggcaagaagagcgaaactccatctcaaagctcatttattcagcaaatatctcagaactgactgtgctagatactgcaggccgcagtgtttcagcaatgagcaaagtatagtccttgccctcatggagcttctagtccagacagagcagacattaaagaatcacaaaatggccgggcacggtggctcacgcctgtaatcccagcactttgagaggccgaggcgggtggatcacctgaggtcaggagttcgagaccagcctggccaagatgatgaaaccttatctcagccgggcgcggtggctcacgcctgtaatcctagcactttgggaggctgaggcaggtggattgcctgaactcaggagtttgagaccagcctgcgtagcatggtgaaaccccgtctctactaaaatacaaaaacttagctgggcatggcggcatgcacatgtagtcccagttacttgggaggctgaggcaggataattgtttgaacccaggaggcggaggttgcacggtgagccaagatcgcgctactacactctagcctaggcgacagagcgagattctgcctccaaaaaaaaaaagaaaccctgtctctactaaaaatacaaacaattagctgggcgtggtggtgggcgcctgtaatcccagctacttaggaggctgaagcaggagaatagcttgagcccaggaagtggaggttgcagtgagctgagattgctccattgcactctagccygggcaacaagattgaaactctgtctcaaaaaaagaatcacaaagtgaagacacttgcagattgtccaaagagctgaaggaaaagaggttcagcgggaaacttcatttagaaaaagtgtttaaggaaagagaagtagtattgcttgagatatttctgttttgttctggtgaaatgagtagttttatggactgaagcccccactcagtgacctgttgacaattacagaggatgtgcttccctgagagatttttaaaaacagccttattgacatataataatgacataccagctgggcgccgtggctcatgcctacaatcccagcactttgggaggtcgaggcgggcggatcaagaggtcaggagttcgagaccagcctggccaacrtggtgaaaccccatctctactaaaaatacaaaaattagctgggcgtgggggcgggtgcctgtaatcccagctactcgggaggctgaggcaggagaatctcttgaacctgggaggcggaggttgcagtgagccaagattgcaccattgcactccagcctgggcaacagagtgaaactctgtctcaaaaaaaaaaagagacataccgtgcagtccacccatttgaagtatataatccagtggttttacaaaaccatccacaaagttgtgcaaccatcatcatatccgcttcagagctttttcatcatccccaaaagaaaccctgtacccatcagcagtcacccccattcctgtgctccctgccagcccctggcaaccactaatctactttctgtctttaggaatttgcctattctggggatttcatataaatggcatcatataatatgtggtcttttgggtctggcttctttcatttagcacatgttttcaaggttcattcatgttgcagcatctatcaatacttactatttttatggctgaatgatattccagccattggatatgtatggatctaatgtatggactacatgtattgatccatttatcagttgatagatgtttgggcagttttcacttttgggctattgggaatagtgctgctatgaacattcgtgtaaatatttgtttgaatcttgttttcaattctttttctttctttcttttttttttttttgagacagggtcttgccctatctcaaaaaggctggagtgcagtggcatgatgatggcttactgcagcctttaccgcctggactcaaatgatcctcctgcgtcagcctctagagtcgctgtgaccacagatgcacactactacacccagctaatttttcattttttgtagaggtaggatctacctatgttgtctaggctggtctcaaactcctaggctcaagcagttctcgtgcctcagcctccaaaagtggtgggattacagatgttttcaattcttttgagaatatacctaggaatggaattgttaggccataggataattctrtgtttgacattttgaggaactgtcaaactattttccaaagcaattgtrctattgcacatttcccactagcatcatatgaaggtttcagtttctccacatctttgtcaacacttgttaatttctgttttactttagccatccttgtgggtgtgaagtgattttgtgaattttgggttgcatttctctgatggctaatgatgctcaagcatcttttttttttttttttttttgagacagagtttttgagacagagttgctgaccttgggtcagcaatggcttcttcatatgacacaaaaatgcaagtgacaaaagagaaatacacaaaaattggactacgccaaaagtaaaaacttttgtggtttttgtttttttttttgagacggagtctcactcttttgcccaggctggagtgcagtggcacaatcttggctcactgcaacctctgcctcctgggttcatgccattctcctgcctcagcctcccgagtagctgggactacaggcacccaccaccacacctggctaattttttgtatttttagtagagacggggcttcaccatgttagccaggatggtcttgatctcctgacctcgtgatccaccctcctcagcctcccaaagtgctgggattacaggcgtgagccacctcgcccggcctaacttttgtgtttctaaggacaaaattaagaaattgaaatgaaagtctacagaatgagggaatatatttrtaaatcatgtatctgataagagacttgtatctagaatatataaagaactcttccaagttaacaatgaaaaaaagccaggcacagtggctyatgcctgtaatctcagcagaaagccaaggcaggaggatcacttgaggccagcagttcaagaccagctggggcaacatagtgagaccctgtctctacaaaaaatacaaaaatgtagtgttatacccaaaagtaagttatcctgtgcctgaccttgtccaaaagctaacagtaaaaaaagacaaaccaattgaaaacctcaacaaaggattgaatgaacatttctttaaagaaaatttagaatgtccaataagcacataaaaagatgcttgaggccaggtgtggtggcttaggcctgtaatctcagcacttggcaggccgaggcaggcagatcacttgagctcaggaatttgagcccagtctggccaacatggggagaccctgcctccactaaaaatacaacaaaaatagccaggcatagtggtgcgtgcctgtgatcccagctacttgggaggctgaagtgggaggatcacttgaacctcaggggggtggagagagtggggggagggggagggtttgcagtgagccaagttcacaccactgcactccagcctaggtgacaagagcgagaccctgtctaaaaagaaaaagattcggctgagcacagtggctcacgcctcttatcccagcactttgggaggccaaggcaggtggatcacctgaggtcaggagttcaagatcagcctggccaacatggtgaaaccccatctctactaaaaatacaaaaaatacaaagatttgcccctgtgttttctttaagagttttagttttgggccgggcgcggtggctcacgcttgtaatcccagcactttgggaggccgaggcgggtggatcatgaggtcaggagatcgagaccatcctggctaacacggtgaaaccctgtctctactgaaaatacaaaaataattagctgggtgtggtggtgggcgcctgtagtcccagctactcaggaggctgaggcaggagaatcgcgtgaacctgggaggcggagcttgcagtgagccaagattgcgccactggactccagcctgggccgacagagtgagactctgtctcaaaaaaaaaaaaagagttttagttttagctcttccatttaggcctatgatccattttgagttaatttttgtatatggtgtgaggtagggggtcaaacttcattcttttgcatgtagatatcttgttgtcccagtttcatttattgaaaagactacttttttcccactgtattgtattcacactcttgctgagaattaattgagcatcaatataaggatttatttctagacttagataacttttattggccacatttttgcttgaatttagcaacctgaatgacaaatgtaaggtatgatttggccttcattgtgtcatataaatgcctctaaaaattgtcaacttttaaagttctaatatgataaataggtgtcagagaaacacaaaatacagagtttgagttgaatcgtagaccttatttggtagtaatttatctttggatgtgagtccaagtcctgcagagtagtraattttattctggtttatggtatgaacttgatgtatcgtgttcctgtagcaggagtctgagaggcaaagaatatgtgtacagcattcacacttaagctttcaaaaccctgctcgtggcctggatcagcatgtgctgacctgcagccacatgactgtgtcctggggagctgcagggcacagtggtttggagtggggttctggacattggctgcccaggctcacatcctcacttccccagaatctcattcccagatgtcaggcaagttattaaactttctgggtttcagtaaaatggagataaggagaaagtcctcagtatatgtgcctggcacatagcaggtgctcagcaaatgctagctgctgctgttgccgctctgtaagatttaataggcatatcgcaagaaaggcatccttaagccaccacggtatgggaaacaatggattagattggcttcttcaccatagtacttttcagagcttttaagtgcttgtgtgctttgtgacactgcattggggtagtaagggatgcagctttcttcaaaagtattctagcggccaggcacggtggctcacacctgtaatcccagcactttgggaggccaaggtgggcagatcacctgaggtcaggagttcgaggccagcctgaacaacatggagaaaccccgtctctactaaaaatacaaacaaattagccaggcatggtggtgcatgcctgtaatcccagctactcgggaggctgaggcaggagaattgcttgcacctgggaggtggaggctgcggtgagccaagattgcrccattgtactccagcctgggcaacaagagtgaaactccatctcaaaaaaaaaaaaaaaaaatgtattctagcctgggtggggtttggtagctcatgcctgtaatcccatcactttgggagactgaggcaggagaatcacctgagctcaggagtttgagaccagcctgggcaacacagcaagctcctgtctctactaaaaaaaaataataatagtaataaaaagaagccaggcatgctgacctgtccctatagtcctagctacttgggaagctgaggcaggaggatcacttgagcccaggagttcaaggctgcagtgagctatgatcacgccatgtactcctgcctgagcaacagagcaagaccccgtctcttaaaaaaagatattctaggccgggtgctggctcacrcctgtaatcccagcactttgggaggctgaggcgggcggatcacctgaggtcaggagttcgagaccggcctgaccaacatggagaaaccctgtctctactaaaaataaaaaattagctgggtgtggtgggcgtggtggggcatgcctgtaatcccagctactcaggaggctgaggcaggagaatcgcttgaacccctggaggcagaggttgtggtgagctgagattgcgccattgcactccagcctgggtaaaaagagtgaaaatctgtctcaaaaaaaacaccaaaaaccaaaaaaggtattctagcctggaacattttttcatagcttctcgattaatacctttgcagaaattcccgtttgggaatgcaaatctagaccatacccagtggtcctttatctccatttggctcttaaattggtagaagattcctatggtcagtttgtgcccagtatctagacaaagcgaagggactcgtcagtaactgagtggataactgtgtatctggtgctgaagtgggcactgagtacaagagatgtgggcccagcagcagagaccaaggctgatcagtcaccctcatgactatttatccagcatctgctgcatgctcagyctcatcccaggggctgcggggacacaaataggtaagagagttcttaccttcaaagagttccctggtaaacagacattggaacatagatctcaaagtaatcgtggcgttggggctcaggcaggcaggcaggaactgctgctccccgggaggccacgccattgtgctgccatcttgaggaatgaaaaggaacctgccaggtagtgaagggcaaggggactccaggtaggaggggaacagttgagcagacgcccaggggactctcctgagatggcctttgtggcacgtcctgccctgttccagcagctctgcgcgtgagatagggcttccctgggcagagcctcaggttctgaggagcttggtttggaatatcttcaggggtgaccattctttttattgttcgggaatatatgaatatattctttttttttttgagatggagtcttgctctgtcgtccaggctggagtgcagtggtgcgatctcggctcactacaacctccgcctcccgggttcaagtgattctcctgcctcagcctctggagtacctgggattacgggcgcccgccaccacgcccggctaattttttgtatttttagtaaagacggggtttcaccacgttggtcaggctggtgtttaactcctgacctcaggtggtccacccacctcggcttcccaaagtgctaggattacaggcgtgagccatcgtgcccggccgaatatattcttataaaagactccaatagcatgagcgtgtgtgaaaatgtgtcagttgacctctctccctgcatatacccaccttggcccactcttcttgctctagttaagaatttggtgtgtatgcttccagaccttttgaagtgcacccccctacatatttaaatatagatttacaaattgatatgctccacccagcagtcagagtgatattttttaaaccaaattcagatgatgttagccccactgaaagccctctgctggcttcatcttgtggtaaaatcccgctgtcccttggccaggctgggaaggctgtctgccatctgaccctgccttcctttccaacctctgtcttcctctgctcctgtcacgctggcttctttcctgccccttggatgtgccacacgtgtttctggtcttaggacctttgttcttgttgcatcttcctggaatgtttctgccctagttctttacacagctagattgtttttctctttcaaactgagaaccgtgcatgttgcctcctcacagaggccttccctgaccactgcagctgaggtctctgccctcccctcctggtcgttctgtcccatgaccctgagtgtgtactctaagctgaaattgcatgtctgtgtctgtcccttcctcttttgagtgtcagctccctgaggtcagggattgtcttggttctggctctattcttagttcccagaatgatgcctggcacatcacacactcaaaatatttgccaaatgaataacttcatgtgcataatcccacagtaattgttgatttaaaaaaaaatttttttttaacaattttggaggaaaccactcatttagaaggataagaacttaaacctgattttaacatggtgctcactgtcgtgaagcctagagtaagaggcagtttattcatgggttcattaaacagatacattttacgacttaatatgcacccagtactgtgctagcactggggatatatatgtaaataacacacctaaggtctccagtttcagggcaggtctcacagcagggaagatgacaacatataaactaaaatgatttccaactgtgataagcttagtgaaggaactaaacaaggggctgtgctgcagaggaaacagggaaggggctgctttgggtagaatgggaagctggctctagggagctgagaattgacatcagacctgaagagtaagaatgaaygggccagtgaagagtcgggacaggccttgcaggccaggagaggagcaggtgccaatgcctgagccrggccaggcctttgtttgtctgagtaacataaaggaactggacagctggcactggaacttaggaagcatgttgggggtggcaggggtgggtggagggtgaagttgaagagagattgatgtgatctaacttagggtttttttgttttttttttttttttttttttgagacagcctcgctccatcacccaggctagagtgcagcggtgtgakcccagctcactgcaagctccgcctcccgggttcatgctgttctgcctcagcctcccaagtagctgggactacaggcatctgccaccacgccyggctaatttttttttgtattttttagtagagatggcgtttcactgtgttagccagaatggtctcgatctcctgaccttgtgatcagcccgccttggcctcccaaagtgctgggattacaggcatgagccaccatgcccggccttttttttttttttaaatgagacagaatctcactctgtcccccaggctgtagtgtagtggtgccatcttggctccctactacaacctgtatctcccgggtaaaagcaattatcctgtttcagcctcccaagtagctgggactacaggtgttcgccaacatgcctggctaatttctgtgtttttagtgaagacaggttttcaccatgttggccaggctggtcttaacctcttaaccgcttgacttcctgacaccttggcctcccaaagtgctggaattacatgcgtgagccaccgtgcccagctgtaacttaggtttttatttatttatttatttatttattcgagacagagtttcactcttgtcatccaggctggagtgcaatggcatgatcttggctcgctgcaacctttgcctcccgggttcaagtgattctcctgcctcagcctcctgagtagctgggattacaggcgcccgccaccacacctggctaatttttgtatttttattagagatggggtttcaccatgttggccaggctggtctggaactcctaaccttgggtgatcagccctcctcggcctcccgaagtgctgggattacagaagtgagccaccgtgcccagccataacttagggttttgttttttgttttgttttgttttgtttttgtttttttttgagatggagtctcgctctgttgcccaggctggaatgcagtggcgcaatctcagctcactgcaacctctgcctcccgggttaagcgattctcctgcctcagcctccagagtagctgggactatmggcacatgctaccacgcctggctaattttttgtatttttagtagagacagcatttcaccctgttagcctggatggtctcgatctcctgacctcatgatccacccgcctcggcctcccaaagtgctgggattacaggcatgagccaccgtgcctggccataacttaggttttttgttttttgtttttgtttttgtttttgttttttttttttgagacagagtctcrctctgtcgcccaggctggagtgctgtggcatgatctcggctcactgcaagctctgcctcctgggttcatgccattctcctgcctcagcctcccgagtagctgagactacaggtgcctgccaccatgccccgctaattttttgtatttttagtagagacagggtttcaccgtattagccaggttagtctcgatctcctgacctsgtgatctgcccacctcggcctcccaaagtgctgggattacaggcgtgagccactgctcccggccaatttaggtttttaaaatgtggatttggggcaatgaatttggatagacatttttccaatgaagatatacagatggccagtaactacctgaaaacatcatcagtcattagggaaatgcaagtcaaaaccacaaggaggagctgggtgagtggcgctcacctgtgctcccagctactcagaaggctgagaagggcaacagaaggccggaaggccagcctgggcaacatagagtgagacagtctctaaaaaaaccacaattcacattgtgggygtgaatataaaacagtgcagccagtgtggaaaaacaccttgaaaaacatttcctccaaatgttaggccrggcatggtggctcacgcctgttatcccagcactttggaaggccatggagggcgaatcacctgaggtcaagagtttgagaccagcctggccaacatgatgaaatcctgtctactaaaaatacaaaaattagctaggcatggtggcaggcacctgtaatcccagctcttgggagactgaggcaggagaatcgcttgaacccaggaggtggaggttgcagtgagctgagatcatgccactgcactccagcctaggtgacagagtgagactccatgatcaaaaaaaaaaaaaaaaaaaaaaagttagacatagactcactgagagccagcaattcaactcataggtgtatatccacggaattgaaaacaggtattcaaacaaatactagtacccgaatgtcccagcaacactattcacagcaaccccaagtatccactaagtgatggatggatatttaaaatgtgacgtagccacacaatggaatatgtttcagctataaaaaggaatgactgccgggcatggtggctcatgcctgtaatcccagcactttgggaggctgagggggacagattgcctgagctcaggagtttgaaaccagccagtgccacacggcgaaaccccgtctctactaaaaatacaaaaagaattagccaggcttggtggcaggcacctgtaatcccagctacttgggaggctgacccaggagaatcacttgaactggggaaacgggaggttgcagtgagtctagatcgtgccactgaactccagcctgggtaacaaagcgagactctgtctcaaaaaaaaaaaaaaaaaaaaaagtctgggcgcagtggctcaagtgtgtaatcccagcactttgggaggctgaggcgggcggatcatctgaggtccggagtttgagaccagccttaccaacatggagaaactctgtctctactaaaaatacaaaattagctggacgtggtggcacatacctgtaatcccagctcctcggaaggctgaggcaggagaatcccttgaacctggggagcggaggttgcagtgagccgagatcacgccattgcactccagcctgggcaacaagagcagaactccgtctcaaaaaaaaaaaaaaaaaaaaaaaaggaatgacctacccattcatgtggcaacatgaatgaaccttgaaaacatgatactgagtgaaagaagccagacacagaaggccacgtattgtaggattctatttatgtgaaatattatggggcgggcgtggtggctcacccctgtaatcccagtgctttgggaggccgaggcacgtggatcaccagaggtcaggagttcgagaccagcctgggcaacatggtgaaaccccacctctactaaaaatacaaaaattagctgagcgtgttggtgggtgcctgtaatcccagctgcttgcggggaggctgaggtagaagaattgcttgaacctgtgaggcagaggttgcagtgagctgagattgagctattgcactccagcctgggcaagagtgagacctcgtcttagaaaaaaaaaaaaaaaaagtttctgaacaagaggcaaatccttagagctaggcagcccctggttccccgggctgtggggaggggctgtgggaatgactgcttaatgggaatggggcttctttttggggtgatggaagtgtctttaaattcgattgtggtgatggctgtaaaaccctgtaaatatactaacatttatttaattatacacttaaaataggtgaatattaggatatatgaattctatctcagtaaaacttttaagaaatgtttactcaaacatttaaaaatttaggacaaactattgatacatttatttaacaattaggacacactgttgatacatttatttaacactatgggcgaatatcagaatagttttgctggatgaaagaagccaggcaaaacagagtatagactatactttcttttatgtaacattctagaaaatactatccaatctgtactgatggaaagtagatgggtggttgcctagggccccaggggcagggagggacgggagggataacaaaggagaacctttgggggtggcaggcgtgtttatttcttgattgtggtgatctgggtttcccatgtgtgtcttttactttttttaaatatttctttctttctttattttgagacggagtctcgctctgtcgtcaggctggagtgcagtggtgtgatctcggctcactgcaacctccgcctttcggattcaagtgattcttctgcctcagcctcccgagtagctgggactacaggtgctcatcaccacgtccggctatttttctatttttagtatagacagggtttcaccatgttgaccaggctggtcttgaactcctgacctcaggtgatctgcttgccttggccactgaaagtgctgggattacaggcgtgagccaccacgcccagcctcccacgtatgtctttatgttcaaatttattgaattgtacccttttaatatgtgcagtttattgcatgttgattattatattatttatacctctgtaaagctgtttaaaaagagtgggtctggatgctgggtggaaatggcttggaggggtgagaactggaagttgaagagtcagtggaggtggttgcagccgctcagtgggagacgactcagtttgactrgggtgaggtctgtggagagaggtgggtggatgacgtgtgctttggcgggacccataagacctggggatggatctgatattgggggtggaataaaggtaggaaaaataggtgatttttaggtgttttgcttgagcagagctctgtctttatcatctctgtttatctaaaatagactaggaactgagggaagactcggggagagacacgctttaggagtaggggatcacgtttcccacgttggaaatcctgtgtgaggtgtgtgaggcgtccaggtgggtggaaacttggtgctgggagaggttgggacgcatcagcatgcacatggtgtttaaagcaggagtgcaggctgagagcccccgagggcctagacccaacctggagcggtcaggagaggagtagacggggagtctgggctgggtggctggcgaggatcaggaggccaggagcgcaggctaggacccaggataggggagcccaggagagctggcgtggccagctgggctgagtacctgtgggtgaggatggtgagatgggcattggacagagggacactagggtctttggtgacaaggagcaatttctgtggagtgaaggggcaggcccagtctagagtggattgaagcaggagcaggaggcgagggagtggggtcggtaggtggaggcagcttgtcggggacattctgcttcgaagggagcagctggaatgtgggggtcaaggctgtgtgtgtatatatctaaggcgggaggtgccagcacacgtttgaatgaggagtcatggaggaggatagcaagcgggcattcgggaggtgccagcacgtgtttgaatgaggagtcatggagaaggatagcaagcgggcattcgggaggtgccagcatgcgtttgaatgaggttcatggaggaggatagcaagtgggcatttgggaggttccagcacacgtttgaataaggattgtggagaaggatagcaagcgggtattgcagggcatagtgtctgtgaagggcagagggggaggatccagggcacaggtggagcccaggagaagggagtggtgtggcttcctcctgtgcagcaggaagggaggaagaagtgagcccggcggcaggtgagtctccagatccatsatgaggtgggcttggagtctcacccacaagaaggttgaggaaatggggcgggtgtgtcctggctgtgcccagagcaccagagagggcattgaagagagctgccaggcagctgcaggccctggcttggtgtcaggaattgaaggtgaaacaagtccaactgatgatgtgaattttcttctccggcaacatttagttgcttgggtgcaggtgggagcagtgggatagctgggctccttcagggcctggccagacaggcctgggtggaggatgagaagcacaagcagaggatggcagcgaaggctgggccccagctggatgaaggcaggccgctaagctgggacaaggagggtgtctccacgaggctgaagagttgagtacagaatgagataatgcatttgctgaagcgtcgtgggtggtggccagggaggcaaagcctgagacgaggttttggggggaagtgattccaagctccgggggtgacactaggagaggtattggaggttgggtgtttggaggtggagaggaagttgtttggaggtggggagggttaggaactgagcgacaaggtgttggatctgtacctatgcacacacatatatgtggacatgtgtgtgtcaagtcactgaggatggtgatagagcaggaatggagaggatggcgagccagcgagtgaggtgcataagggacagtaactggcaatggtaggtgacagtgagtaggaagggctctaggggtgtgctgtcgagtgtgggcattggcatcagggatctggaaggagcagtggagaaggcagacgctgccctcacctgccatctctgaagtctgtgggggatgaggaagaggcagctgtcactcagaggcgagttggggaggtgctcccttcgtgtgaggccagttttggytggggcaggagtgaggatgctggggagaggctgagtctttaggagaggggattgcgtggttggtggaggtagtgccaagtatcaggtaatgagagggcacaccctgtgcccagggacccgggagtctmacctctgcctgttgagggacgcgtttgccagagagaaagcgtcagcaaagtgccatcttccagaggctcagcaagacgtgcaggaggcacaggctccagtagcgaacgccagcctcatgagggtgtttgggaccaggtggctccattagtgagggctggggccctgtgggcatgagggcagggcgcaggcacctgggaggccatttgggtcagctctcccgcggagctacgaccttggggatgtggcgctcctcacgcggagccaagccaagccaaggccaagcctgtgtttcagggactcgatcactgcagggcttagcctggcatggagtaggctccttctctgtgttctccaggccaggggacttgcatgccagaatccttcttcctcatagatttcttgacttaccactctgcattgcaggaggccctccagtcagatgtccagcccagagctggctgcctgtggctgggtagggtcatgtggctgcccagggccatgggataggccgacacctctggtgtggatatagtacaggggagtgggtctcccacagcaggggaagggttcagactcagagggtccagccctgtgaaggcagggcaggtggtgaaggcctcggggtggtgaagtcatggggctgcaggctcaacctcctttctcttgttgacagcactgacgtcttcatctgcacaagccccatcaagatgttcaagtactgtccctatgagaaggtaaggcgtgcgtctgctcagctgagcccttaccccatgcatcacaggtgaggggtacggggctcagcctgcctgtggaaaggggatggaccctcacagcactcccccacctctgtgacagcggctttctgctccccaaggacctctccagcctgaggctctagatggggcctcttatgatgcaggttctccaggaagggtgcctgtcactgtgtcaggttagcctggcccagagtaggcctttgaagggtgagaaccatgcctggggagggcctgaaggcacgtggatgcattaacatgaaaagtcttaaaaaggtgaggtgggtaaagttcattttgctgtatactcactttattatctttattgaaaagaattagagttgcatgaaattgagacctttctggaaattgggaacttgcagttgccaaacccagaggaaaggtctgtggccctggaggagagcactcatgccggaggggtcagggccggccctccctggggacgttggagcagctcttcccgagctgaggaaggcaagatcttcagtccagagcccctcctgctctgggggcgtcaaaccttcaggcatgagttctttcatgttcttcacatgacctttccgctctggattcccattttttttgagacagagttttgctcttgttgttgcacaggctggagtgcaatggcacgatcctggctcactgccaagatcactgggttcaagcaattctcctgtctcagcctcctgagtagctgggattacaagtgcctaccaccacatccaggtaattttttttgtatttttagtagagacggggttttgccatgttggccaggctggtctcgaactcctgagctcaggtgatgtgcctgcctcggcctcccaacgtgctgggattataggcgtgagccaccgtgcctggcctggattccatatttaaatgaaattcatggtcaggcgcggtggctcacgcctgtaatcccagaactctgggaggccgatgcaggtgggtcacctgaggctgggagttcaagaccagcctggccatcatggtgaaaccccatctctattaaaaatacgaaaatcagctgggtgtagtggttcatgcctgtagtcccagctacttgggaggctgaggcatgagaattgcttgaacctgggaggtggaggttgcagtgagccaagatcgtgccactgcactccagcctgggtgacagagcgagactgtccccccacaaaaaaacttaattaaaaaaaaaaaaaaagaaattcacacattcagccaacatagcgtgccctctgtgtgctcagtgggaatcacacttgctgaacagttgctctggcattatgtgggtgcttggtgcccactgtttcatcatgtcctcatgacaccttgttccctrgttaccctgacatccctcatgtttttagagagtgggtcttgttctgtcacccaggctggagtgcagtggccactcacaggtgccatcccagctcactgcagcctcgaactcctgggctcaagtgatcctcccacctcagcctcttgagtagctgggaacacagctgcgcaccacgcaccaccatggccggccttcgctgacccccttttaacacgctaggagcacgagttcacttatacttaggagagaggagtatcttacctgcagccagtaaatgtggattcagagtgtgggccaggcccactgtttcaggtcgagcagtgatcccaaagtgagtcctgagaccagagtcagcatcccttggagactccttaggagtggacatttttcagccccaccctacaccttctgaatcagacactctgggagtagcaatgtgggtctgacgagcccgccaggtgattctcatacaccctcaagtttaaggattgcgggactggagtcactatttcagctggagtttcactgggtggccatggtggttgaccagcagttgtgggagtgagrtgaacgacatggcctcattcatccgttcctggggatttagatactgtctttgtgccagctgtcccacctgcgttgcctcggcccgggactgccctctgagctccagacactcagacccgatgtatctgtccctggggtgctggtttccttgtgcatggcagtgctgtctggtggcctcaggtcggaaatcaggggccgtgctgatgtcttcctctaagccctcacttccagcctgttggtgagtcccatgtcccatgggaccgatttcgaaaacgcgcctggcacctgtctgcttctgtctcttctcattgccagcatcttggcatttactgccagtacagctgacagggcctcctaaactgcctgctcctttcagttccatgcaggctgacaaggccctcacagagcagatcatggcagmtcctgacttgaaacctctgaatagtttccctttaaaaaccacatacaccctcctgagcatgacctgcagggcctgcctgcctctccacccactgtgcccccctctctgtgtgcttctccagcagcttttggcttggaatgttctcctcccacccctaggtctggtgccttcttgtccacgaggcctcggcccagaagtctccccacatttcgtgaccatcatattgaagtgtattctttctccatcttgttttttggatgacacttcccaccacttgaaatgggtttgtgttttcgtctgtggcttgttcttggtccatctcctgactgggctgggacctgtgcaggctgggctctcaccctcctgcccactgtcaagcccagcacccagcgcagggtggcacactgggaggactcagygtttgttgttaaatgagtagattcatttgtccaacagagagttattaaacaccggcgagtacagtgcttgccattcatttgacacctttgatacgccaggcaatgtccctttattctcacttttgaggtttacaacagctgcctgtgaaacaagaaaactcttctgatttgacagatgaagaaactgaggctcagagggatgaggcagctcatttaccaggtctgacgcttggccagccagtgaggcctgctccgggtctgcctgtcaagagcctgtgcccaccgccagtgtgttcccctggaggtagcctgcattcactggagaggatttggaaaccgcgcatatttaagaggaaagggatgtcaggaccccagtcacagtaacatcaacaggctctggctcacttgaacaaaggcaggactgattagaaggatattgccttgctcagggaatcaaagggaagcccgaggaagcaggcctgaggccgtagggkcagagcccgcagaccgtctctccagcaaacagcccaagacgctgaagcgccctttctccatccttgggtttcattgcccaagattcctagtccccaggagagggaggcccatcagctgagcttgggtcccacacccagccctgggtgccctgatggactgtcctaaaaggctgcagttggtggcagaggcgtggcttcccagaggagttgagatgctgttgccagaagaagggtcacactcatagtggatgtcctgatcaaactaaacgaaagagcaaaggcaacaagaatccacatctacaatcccaccacctggagagagatgctgttagcactttgatctggttctttctagtttttttgtgggggagtaggggagacagggtctcactatgtcacccaggctggagtgcagtggtgcgatctcggcttactgcaacatccgcctcccaagttcaagtgattctcctgcctcagcctccttagtagttgggattacaggtgtgcgccaccacacccggctaatttttttttgtatttttagtagaaacagggtttcatcatgttggccaggctggtctctagctcctgacctcgtgatccacccatcttgtcctcccagagtgctaggattacaggtgagccaccacacccagccctcgtttttctttgatgcgtattaaatataatacatgtattttaacaaagctttcatccaacatagttatccttttctgcttattaatatatttttagccttttttctgtcatcaaacacttcagaaacatgatttttttttttttttgtgagacagggtccagctctgtggcccagactgaagtgcagtgacacgatcttggctcactgcaacctctgcctcctgagtttaagtgattctcatgcctcagcctcccaagcagctgggacaagtgtgtgtcaccatgcctggctaattttttatatttttgttctgttttgtttgagacagagtcctgctctgtcacccaagctggagtgcagtggtgcaatctcagctcacttcaacctccacctcctgggttcaagtgattatcctgccccagcctcctaagtagctgggattacaggtgcgtgccaccatgaccagctaatttttgtatttttagtagagacggggtttcgctatgttggtcaggctggtctcaaactcctgaccttgtgatccacctgcctcggtctcccaaatgctgggattacaggcgtgagccaccacgcccggccaatttttttgtatttttaatagagatggggtttcaccatgttggccaggctggtctcaaactcctagcctcaaagtagtctgcccatctcggtctcccgaagtgctgggattacaggtgtgagccaccatgcccagccagaaacatgattgttaatagctgaagacgtctagtgagtaagcctttgtatggtcatgttcttagggtgaattccaagaaatacaattcctgggtcacgcgaggaaaggtagggttcgggtatatatcacacagaaatttgtattcatttccactgtaccagccgtgggcagggtactttcctcctgccaggggctaggctggaccacatagggtcagtcaatagaggaagcaggccattgaacaaacacatgaagacaggaaagtgcacagcagatttgaggaattcagggtgaattttgttggccagtggctacaggggctgattgggagcggggttgggccaggtgaaatggattagtttatccaaatctcccagctgtcctcatggtttagccacaccaccacctttaaccctagaactaagacaaggggagaagtgcgggtgagaagtgagtaaggcgaaggttgcttccaagcaccccctcacccaccgtttgtgcccctcccaaccctatggactggtacttcttccctggctgagggcgggctggtattaatggttcctgtgttccatgcctgggggaggcaaggaagggctggagatgggtctcrgggcacatctgcacaggacagaggtctcccacggtagccccggtctaggcttaagccccagagcactcacagttccttccccagctcctgtccactgagtaggttcagcctttgttgctagaagtggaaacttttctccttggttgattttctttcaagacccagtcagaggatgggaacctgactgctgtgaggtctctcactttatcaccacatggagggagtggaattgggttacattcaggttgccagaaccttctttctggctggaaagaaggtttcccaacattctaaacccagattgctcggtaatagttaacaatagccaagctggtagtatacgtctccaagggctttccctgtagtgatccatttagccttcatagtagccctacaaaataggtatttctattttttatttttattttttagacggagtctcgctctgtctcccaggctggagtgcagtggcgtgatcttggctcactgcaagctccccatcccgggttcatgccattctcctgcctcagcctcccgagtagctgggactacaggtgcctgctaccacgccgagctaatttttttgtatttttagtagagacggggtttcactgtgttagccaggatggtctcgatctcctgacctcgtgatctgcccgcctcggcctcccaargtgctgggattacaggcgtgagccgcagcgcctggccttaaaakaggtatctttattatccctgttctacagatgggcagactgaggcacagacagttgaagctgagggttagcggccagaaaktggggagtcagacttcagagcccatgctctgctcctcggcctcactgcctcttctcggactccttgacttgaaacttaagcagcatgacctgtaccttttcaccccctagagagatttgaaaatccgtgtcaggttcttcatgcacaggcatggcattttactctgagattttccagttcaacaaggggagtaatcacaagccaaattaagggaggggcttgggtgcgaaggggaatgtgctcttctgatttgaagtctggtttccagatgacatgtctgcctgattcgacgttgatttttagaataaatgtcaaaaattcccacttcaggccgggtacagtggctcatgcttgtaatcccaccactttgggaggctgaggcaggaggatcacttgaacccaggagtttgagacctgcctgggcaacatgatgagaccccatctgtactaaaaaaaaattagccaggcgtgctgatgtgtgcctgtagttgcagcatcttgggaagctgaggtgggaggattgcttgagcctgggaggtcaaggctgcagtgagctatgatcatgccactgcattacagccttagtgacagagtaattccctgtctcaaaaaaacaaaaacaaacaaaacaaaacaaaacaaaaacctactcctggctgggcgtggtggctcacgcctgtaatcccagcactttgggaggccgaggtgggcagatcatgaggtcaggagattgagaccatcttggctaacacggtgaaaccccgtctctactaaaaatacaaaaaattagccgagcgttgtggcgggcgcctgtagtcccagctacttgggaggctgaggcaggagaatggcgtgaacccgtgagacagaggttgcagtgagccgagatggtgccactgcactccagcctgagtgacagtcagactccgtctcaaaaaaaaaaaaacaaaaaaaaaacccactccttaattgagcctcttcctctaacctgaaataaaaacstaaaaacgtagactttttttttttttttgacagagttttgctgttgttgcccaggctggaatgcaatggygtgatctcagctcactgcaacgtctgcctcctgggtttaagtgattcccctgcctcaacctcctgactagctgggattacaggcatctgccaccatgcccggctaatttttgtattttttgtagagacaaggtttcaccacattggccaggctggtctcgaactcctgacctcaggtgatccatctgcctcagccccgcaaagtgctgggattacaggtgtgagccaccgcgcctggccaacatagaccattttttttttaacttaagataatgaattacatttctttgctttctttctttctttcttttttttttttttttttgagacggagtctcactttgtcacccaggctggaatgcagtggtgtgatctcagctcactgaaagctcagcctcccgggttcacgccattctcctgcctcagcctcccgagtagctgggactacaggcacatgctaccacacctgtctaattttttgtattttagtagagatggggtttcatcgtgttgcccaggctagtcttgaactcctgagctcaggcaatcgcctgcctcagcctcccaaagtgctaggattacaggcgtgagccactggacccggccttctttgcatattttacattaaatttccagttgctccagtacgttttccagttactccctgtaggacttaggctaaaagacttggcactttctcttggcatgtaaagaaaccctaggttcttttggggatggcacggccacactgccagcattcaggagcttcccctggagctcytgaaccccagtgtcacccctgccatctcagtggggctcatggtgtctttcttggcgtgtttctggcccataccgtgtttattttaaaaattgttcatgctaattggcatggggtttcttttaggggtgatggaaacattctggaatttagatagtggtagtggttgcataacattgttgatacactaaagaccattgaattgtacactttaaattggtaaattttatgatatgtgaattacatttccaaaaaataaaataaaattggctgttcagatggctaataattccaaagctaactcactccttctagttagatctggccatttcatcattgtaatagggattgtagacaaaagtgcatgatccctttatttatttatgtaattttttttttaaagacagagtctcgttctgttgcccaggtggattctagtggaacgatcatagctcactgcagcctctaactcccagaccatcgtgcctggtcataatacctttaaagtgtcctagatcaagccattcattttgaaaacctccagttttatggtattctttttctttttcttttctttttttttttgagatggagtctcgctgtgtcacctaagctggagtgcagttgcgcgatctctgctcactgcaagctccgcctcctgggttcacaccattctcctgccttggcctcccaagtagctgggactacaggcgcccaccaccatgcctggctaattttttgtatttttagtagaggcagggtttcagtgtgttggccaggatggtcttgatttcccgacctcatgatccacccgcctcggcctcccaaagtgctaggattacaggtgtgagccaccgcatccggcctatggtattatttttctagcagtgtcattcacccaactccacacctgcataccccaccctccttgatttaagrcctgtcttgggatctgctcatctgagtggagcaggactctgtcccttccaacattttgcctgctagggacygtgtctagctcatagatctcttatttctgatgtgtccatttggtcatgggcctgtgagccaygcggagcaggaagggcagggaggtggggtcgagagctgccagccatctgcccctctgatcttttccagcactgtcctctgccagcatccccctttacttctgtgtcttcttggtaatcactgaactctttgctctcgaggtggttcatggacttcctgcctgcactcctaggtcttggagagagcgcctcccctgggagtcctgccagcaattctttagctacatgtagttttaggttccatggcaggcatttttcctgattctggtttagaacgacagcaccgctttatgcttggatacctttacattcatctgggctgaactattttctccccagagctttcaggaaccaaaatggtaatcaggtgatgagcagcccttctccttccaaacagctgctgataaacctaacagacccttgtcaggcaaatctgagctaaaggcacaatgcccccaccagtgtgcacattattatagctgttgaacctacgtcagtgcaccatggtcactcagagcccatagtttacatcagggttcactcccggtatcctgcgttctgtggtattggtaatcggggaggctgtgcgttgtgtgggagtggagggtatatgggaactctgtacctctgctcaattttgctgtaaacctaaacctgctctaaaaaataaagtctcttaaaaaaaatccacagtgaatgagagtccctcttgctccctatccttgtcagcatttggtattgtcagggctctggattttggctgttctcataggcagggagtggtgtctcattgttgttttgatttgcatttccttgattaatgacattggacatgtttttaagcaagtaaccctttgtatattttctgtaacgaaatgttcaagycttttgcctcgtttctcattgagttgtttgtgagttgtgagagttctttagatatgctagaaacaagttctttatcagataatgtgttttacaaatattttatcccagtctgtgatttgtattttaattttctttttcttttttttcttttttgagagacagagttttgctgtcactccagctgaagtacagtggcatgatcccgcctcactgcagctgtgaccccctgggctgaagtgatcctcccaccttagcctcctgagtagttgggactataggtgtgtgccgccatgccaagctaatttttaaaacactttttttttgtagagatggggtcttgctatgttgcccaagctggtcttgaacccctggactcaagcaatcctcctgccttggcctcccaaagtgctgaggttacaggtgagttttctcaacagagtctttagaagagcagaagttttatacttttagattttttatttaggttatgatccatttgtttttttgagacggagttttgctttgtctccctggctgtagtacaacagcgtgatctcggctcactgcaacctccgcctcccaggttcaagcgattctacctgcctcatcctccctagtagctgggattacaggcacctaccaccatgcccagctaatgtttttgtatttttttttttttttttgagatggagtctcactctgtcacccagtctggagtgcagtggcacaatctcggctcattgcaaactccacctcccgggttcatgccattctcctgcctcagcctcccgagtagctgggactacaggcacccaccaccacacctggctaattttttgtatttttagtagagacggggtttcatcgtgttagccaggatggtctcaatctcctgacctcatgatccgcccgcctcggcctcccaaagtgctgggattacaggtgtgagacaccgtgcctggtatgtttttgtattttagtagagatggggtttcaccatgttggccaggctggtgtcaaactcctgacgtcaagtgatccacctgtcttggcctcccaaagtattgggattacaagcgtgagccaccatgcctggctcgttttgagttaattatcatatattgtaggaggtaaaaatggagaggttttttttttttttgcatgtggatccagttgtgcctctgttggaaaggccaccctttctcactgaagtgtcatggtagcctggggtccatttctggaatgtatcctgcttctctgatctaagtgtcccacctaatgtaaataccacactgtctcagttactgtagtttttttttttttttttttgagatggagtcttgctctgtcgccaggctggagtgcagtggtgtgatctcggctcactgcaacctcctactgggttcaagtgattctcgtgcctcagcctcccgagtagctgggattacaggcacgcgccaccacacccagctaatttttgtatttttagttgagacggggtttcaccatgttggccaggatggtcttgatctcctgaccttgtgatccgcccactttggcctcccaaagtgctgggattacaggcgtgagccactgtgcctggccactgtagttttatagtaacttttgaaagcartgtgagttttccaaaattattcttcattttaaaaattgttttggctattctgggtcctttatatttctatagaatgtttagaacaagctggtcagtttctacaaagaacctggtgagaatttgattgcaagtgcattgtagctataaagcttaacaatattgggtcttctgatccacaagcacatacacatcctcatttatgtaggccacctctaccttctctcagcaatgttttgtagctttcagtgtaccactcttgcacatrttgtgttaaatttgtctctatttcatgtttttttttttggcatagagactatctttataaatatatttttaaatattttataatggtaaatacacatgataaaatttatcaagtgtacagttcagcttatttcgtttttaatgctattataaactttgtttaattgaaatttccaaatatrtagaatacaagtgatttttttttttgagatggagtcttgctctgttgcccaggctggaatgcagtggtatgatctcggctcactgcaagctccgcctcctgggttcatgccattctcctgcctccacctcccaagtagctgggactataggcgcccgccaccatgcccagctaatttttggaatacaagtggttttttaattttaatttttaatttttgtgggtacatagtaggtgtgtatttatgaggtacattagatgttttgatacaggcatgcaatgtgtaacaaacacatcagggcagatggggtatccattatcaccttaaacattcaatcctttgtgttatagacaatccaattatattcttagttgttttaaaatgaacaatttttttttttgagatggagtcttgctctgtcactcaggctggagtgcagtggcgcgatctctgctcactacaacctctgcctcctgggttcaagcagttctcttgcctcagcctcccaagtagctggaactacaggcacgtgccaccatgtccggctaatttttgtatttttagtagagacggggttttgccatgttggccagctggtctctaactcctgacctcaagtaatccacctgccttggcctcccaaggtgctgggattacaggcatgagccaccacgcctggccatgaacaattaaattatttttgattatagtcaccctgttgtgctagcaaatactaggtcttattcattcttttttttttttttttttttgagatggagtctcgctctgtcacccaggctggagtgcagtggcgcgatcttagctcactgcaaactctgcctcctgggttcacaccattctcctgcctcagcctcctgagtggctgggactgcaggtgcccgccaccacgcccagctaattttttgtatttttagtagagacagggtttcaccgtgttagccaggatggtcttgatctcctgacctcgtgatccgcctgccttggcctcccaaagtgctgggattacaggcatgagccaccgcgcccagcctattcattctatttttttgtgcccattaactctcttcactttccttctagatactcctccactcccccttcccagcctctactaaccatcctcctactatctccatgagttcaattgttttaatttttagctcccataggtaagtgagaacatgtatagccctttctgtgcctggcttatatcacttaacataatgacctccagtgccatccatgttgttgacaatgacaggctctcattcttttttcttttcttttttttttttttttgacggagtcttactctgtcacccaggcttgagtgcagtggcgtgatctctactcactgcaacctccgcctcccgggttcaagtgattctcctgcctcagccacctgagtagctgggactacaggcatgcaccaccacacctggctaatttttgtatttttagtagaggtggggtttcatcatgttggtaaggctggttttgaactcctgacctcttgatccaccctcctcggccttccaaagtgctgggttgctctcattcttttttatggctgaatagtacttgattgtgtatatttaccacattttttaaatccagtcatcagttgatgtacactgaggttgcttccaaattttggctattgtgaatagtgctgcaataaacatgggagtgcgagtatcttttccatatactgatttccttttttttaggggtatatacctaggagtgggactgctggattttcagaggaactgccattatattcctaccaatagtgtacaagggttttattttcttcttgtcctctccagcatttgttattgcctgacttttggataaaagccattttgactggggtgagatgatatttccttgtagtttgatttgtatttctctgatgatcagcgatattgagcacctttttatatacctgtttgtcatttgtatgtcttttgttttgtgttgttgagacaggatctcgctctgtagctcaggctggagtgcagtggtgtgaaaatagctcactgtagcctcaacctcctggactgaagctatctttccacctcagcctcctgagtagctgggactatgggtgtgtgccaccaagcctaattttttttttttttctttagactgggttttgccctgtttctcagactggtgtacaagtggtttaatcatggctcactgcagccttgacttcccaggctcaatcaatcctcccaccttagcctcccaagtagctgagactacaagcgtgtgccaccatgcctggctaatttttgtatttcttgtagagacggggtcttactatgtagcccaggctggtcttgaactcctgcccacctcagcctcccaaagtgctgggattataggtgtgagccatcacacgcagccaccatatgtcttcttttgagaaatgtctatttagatcttttgcccattttaaaatcagattattagatttttttctatagagttgtttgactccttatgtattctggttattaatcccttgtcagatggatagtttgcaaatactttcttccattctgtggattgtctcttcactttgttgactgtatcctttgctgtgcagaagctttttaactggatgtgatcccatttgtccrtgtttgctttggttgcctgtgcttttggggtactattcaagaaatctttgtccagaccaatrtcctggagagtttccccaatgttttcttttagtagttcttgtatatggcaagagataggggtctagtttcattcttttgcatatggatatccagttttccagtgccatttattgaagagactgtcgtttccccaatatatgttcttggcacctttgtcaaaaatgagttcaaggtagatatatggatttatctgtgggttctgtgatctttttttttttttttgagacggagtcttactctgtcgcccaggcgggagtacaatggcaccatctcggctcactgcaatgtccgtctcccgggttcaagtgattctcctgcctcagcctctggagtagctgggactacaggcatgtgccaccatgcccagctaatttttgtatttttagtagagatggggtttcaccacgttagccaggctggtcttgaactcctgacctcacgctatccgcccgcctcggcctcccaaagtgctgggatttcaggcatgagccactgcgcctggcctggttctgtattcttatccactgatctgtgtgtctgtttttatgccagtaacatgccatttggactactgtagctttgtagtatcatttaaagtcagataatgtgatttttccagttttgttccttttgcttaggatagctctggctattctggaatttttgtggttctatgtaaatgttaagggttttttttttttttttttttttgkatttctgtgaagaatgtcattggtattttttttttttttttttgagatggagtcttactctgtcacccaagctggagtgcagtggcgcgatctcggctcactgcaagctccacctcccaggttcacaccgttctcctgcctcagcctcccaagtagctgggactacaggcgcccgccaccacgcccagctaattttttgtattttttagtagagacggggtttcactgtgttagccaggatggtctcgatttcctgacctcgtgatctgcctgcctcggcctcccgaagtgctaggattacaggcgtgagccaccgcacctggcctgtcattggtattttaatagggattgcattaaatctgtaaattgctttgggtagtatgaacattttaactatatttattcttctaatccatggacatggaatgagtatctttccactttttgtgtcttcaatttattctatcagtgttttatagtttacagtgtagagctctttcacttgggttaattcttaggtattttattttatttgtagctattttaaatgggattcctttcttaattttttttcagattgttcctgtttttttcaggattgttcctgtttttttcagattttgtatcctgcaactttgctgactttatcagttctagtagttttttggtggaatctttaggtttttccaaatataagatcatgtcatctgcaaacaaggataatttgacttctaatcctttctaatttggatgctctttctttctttctcttgtctgattgctctagygaggacttccagtactatgttgaatcacagtggtgaaagtaggcattcttgtcatgttcccggtcttagaggaaaggctttcagtttttccccattcagtatgatactagccatatayaggtctgtcatatatggcttttattatgttgaggtatgttccttccatacccagttttttgagggtttttatcatgaaaggatattgaattttatcaaataccttttcagcaccaattgaaataatcatwtgttttttgtccttcattctgttgatatgatatatcacattaattgatttgcatttgctgaactatcctggaatccctgggataagtcccacttggtcatgctggatgatctttttaatgtgttgttgaattcaatttgctaatcttttgttgaggattttaggaatcaatatttatcaatgatattggcctatagttttcttttctttttttcaatgtgtttttgtctggttttggtatcacggtgatactggcttcatagaatgagtttggaagtattccttccttctgtatatttctgaatagtttaagtaggattggtattagttatttaagtgtttggtagaattcagcagtgaagctattgggtccyggccttttctttgctgggagactttttattatggcttcagttgttgttacttgttattggtctgtttgttttgaatttcttcatggttcaatcttggtagattgcatgtatctaggaatttgtccatttcctctagattttctaatgtattggcatgtagttgcccatagtagccaccgatgattgtttaaatttctgtaatatcagttgtagtgtttcctttgtcatctctgattttatttatttgggtcttctctctttttttcttagtctggctaaaggtttgtcattttgtttacctttccaaaaaaccaactttttgtttcttttcacaaaaccaatcttttgtattttttttatttcatattcatttatttctgctctgatttttgttatttcttttctttcctttcttttcttttttttttaattttgagatggagccttgctctgtcgcccaggctggagtgcagtggcacaatctcggctcactgcaacctctgcctcctgggttcaagcgattctcctgccttagcctctcgagtagctgggactacaggtaggtgccaccatgcccagcttatttttgtttttttagtagagatggggtttcaccatgttggccaggctggtcttgatctcctgaccttgtgatctgcccgccttggcctctcaaagtgctgggattacagtgtgagccaccgcgcccggcctgctcttgtttttctgtttctttaggatgcatcattaagttgtttacttgaagtttttcttcttctttttttattttttttaaattcaggcccccacagaagcattttcttcttttttgatgtggcacttatagctataaacttccctcttagtactgcttttgctgcatcccataggttttggtatgttgtacttccattatcatgtgtttcaataaatttttcaatttccttcatttcttcattgacccacttcattcaggagcatgttgtttaatgtctctgtgtttgtatagtttccagaattcctcattattgatttctagttttattccaaaaatacatgtgatttttttatattgaccttgtatcctgttagtttgccaaattaacagttctagttgctttatgtagatgatttggggctatgaaagtctagttataataattacatttatttagtacgtctgtatcaggcattactcaggtgtcctcacagttttttatttgatcataccagcaacactgtgaggaaactgacctcacagtggaagtcactggcttgcccaaggtccccagctcgtatgtatcagaaccagacttagggcctaattttgagggtaagacaaaaaggtagaatcctttttctgaagactttctgtgtgccaggtgcagtactgagactctgatgcataattttccactaaatccccgaaggcactcacgaggtagatgctgtccttatccctgtgtcaccacacagggaccagacaacctgctgagggatagagatactcacgtgagaagctggtggtatctatgcgcagtggccacataagtgctcatggctgggctccaggaggctcagggggaaccccatgccctcttctatttttacctcttaccatatataaaatttaaccctggctgggtgcagtgggtcatgcctgtaatcccagcactttgggaggccacggtgggcggatcacaaggtcaggagtttgagaccagcctggccaacgtggtgaaaccccgtttctactaaaaatacaaagaacttagccaggcatggtggcaggcgcctgtgatcccagctacttgggaagctggggcaggagaatcacttgaacctgggaggtggaggttgcagtgagccgagatcgtgccattgcactccagcctgggcgacagcaagactctgtctcaaaaaaaagaaaaaaaaaaattaaccccaaatgggttaaatacatataaatacatatatacatataaaagctaaaagtataaaacttctgctcttcaaaaggcactgttcagaaaatgaaaagacaaatcacagatcatgaaaaaatatttgcaaaatgcattgtctgataaaggactggtttctagaatacattaactactctcacaactcaatacaaacagcccactttgttttgccgtttatgtgacccctgataagtcacagaccctctctgagcctccatttcttcatctgtacgggatctcgtcaccactatcgtggcacatcattttcccacgcaaaccctttctgcagagcagctccgtattttgtctgcagagtggcgccggtccgagatgaaacacggaaactgggtgtgtgtgattggaaatgttcatggcagtttgtctgatgcagtgttcaggcacatgatttgatttcatatcttacaaaagcattggtcacaatgcagtggaaattaaaaaaacaaaacctgacccttctcttcccacactcccagatkttccatgttccagccacactccagggttttccccattcctcaaacacctgagcaccggcctgccttggaacatcagtgtttgtttttccctctgcctggaatgttcttgccgacctgtggagagccagccgccttgtcagtcgggtccagagaagatgccgcctttgcagtgaggcctctgtgtgaggttggagctctgtgctgactgcagagcccttgccccctggctatcgttgtctgtggcctgtgtgcctcctcctgctatgtgcactccatgggtctcctgttgaccatcgtctctctggttcctggaactgtacctcatgcaatattggctaaattactacacaagtcaggaaagtttggctacttggaatgttgccgtgaggcttagatacgatgayggacactgcatgcctgtggagtgggtctgctgaaaacattagccccaggctcttgccccccatccagcctgcaccagcgatttacagtcctgtggggaagatgcgaagtaagttatagagatgtgtagctccgactgtgacattgctagggaggacaattagactgggagagttcagggaaggcttaggaggtggcagctttagaaggataggtgctcactgggctaggagaagggccctgtgcatatgtgtgtgtgtgtgcatgtgtgtgtgcacacacgtgtccatgaaggaatgttccagtcagaggaaatggcacatgtgaggctctgagcaggaaaaagcataatacagtcaagcagtgagaggaggttgtcgtgggtgggcgtggcaagcgaggtggccacagggaaaggtggcgctgggacagcggtagggctggtctgctctgcagatccggcccttttcccacgtcccgtgtgctggccggttgcagagggtcatgtggtgtctgcctttgtgaagtgggactcctgaagcgacctccaactggaagaaagccaccctaaggcacccatgtcccatttccttgtcatacacagggaaaaacggagtccctgggagggcaaggacctgcccggctctgccccagggtggcagagccctgagctccctgtgcagcctgggccactcagtgtttctgtttgtttatgcaggaaccagaggagcttagggaaaaagtgcatccagtcctgcccctcctctgcttaaaatctgctgctggttaacctctgtagctgtaacagggtctgtgasttaagggttggttgccagtgtcagaaatcaacaagggtgttggaatctggatggctgtagagacagcctggagctgggcagggctcagttagggtgcctggggcccatgggccagagcaggtgccgtgcttaggctgcgcccacccctggctgcactggggtggtgagagcagccaggacctgctaccctataggaaaaagtcaatttccccagggaatcgaggcaaagggaaaggatgccgagagcccaccagtggcgagaggatgccggtggcttgccaggccccsgtctgctccctgccccccggggagcaccagcaccccagtttgctatccatcggcccagacacaccctgccccatgtccgttagcacctggaatgcgctgtgtgctagggrtgcccctgtggtcagcttgcctgtcctgaagaaagccttccttgggcagcctgtggcttctttgtaggcctgtcccaggtgttatgtaaccattgtttaagagggccttgaccgctgtctcctcagctgtaagctccctgagggtaggaactgctttttgtcttggttttctttcttcagtgcctaacagtacgcactgcccacatgcatgtggggcaggaggtggcagtggcccagcaggtggmaggggtggcacacayggccgccctctgctccctgtgtttgggttatgctgtgcagtgttcgctgggtgtgaagaggggacagggctgggtttgtcgtgactctgctgctttctagctactggagtgtggaccagccatgtgcgctccctgagtgctggcgtcctgggctggactccctcccagcactgactgcctggcgctgggccttggtgtcaggcctccatccctccctgcctgttagctgaggtctaggctgacccctgccctcggctcttggttggctcccaggtctgatgtcactttcttctcaccacctgcccttgcctgtttgcgtccagtatgcctgggtggagaagtactttggccctgactttctggagcagattgtgctgaccagagacaagaccgtggtctctgctgaccttctcatagacgaccggccggacatcacaggcaagtggcctgcgacaggtgaggagcacgtggggagggccccagccttggcccccttctcctgggcagtgagcactcagttgcttcctgccccacttagtcaccagctgtttgccaggcactgagcccctccccttcgggaagacaaggccccctctgtatgggctgtggcctggtgctcctgggagctgggaggagtgggtgccagctctagggttagcttgaggggtggccttggggaagtcccttcagcttcaaagccttgtcttcctcatgtaacatggggactcaactctggtttccaaatgtttgtttttagcaacaaaacccattttttcccccaaaagcaatgtggactgatgcaatgaatgacaggagggcagagcagagctcctgcagggaaggtgggttgggacagaagacccccctccccaaaaccaaacaagccagtcaaccttgaactgccgtagaaaggagagggagatgggcgtggygactcacgcctgtaatttgggaggctgatgtgggtggatggcttgagcccaggagtgtgaaaccagcctggccaacatagcgagactctctctacaaaaaatacaaaaattatctgggcatggtggtgcatgcctgtagtcccagctacttcaggggctgaagtggaaggaytgtttgagcctaggagttggagaccagcctgggcaacatggtgagactccctgtctctacaaaaaaaaaaaaaaaaacacaaaaaaattagctgatcatcatggcgcatgcctgtggtccctgctactctggaggctgaggtgggaaaatcacctgagctggggaggtggaggctgcagcgagctgtgattgcaccactgcattccagtctgggtgacagagtaagaccctgtctccagaaaacaaaacaaaatacaacacagcacaggagaggggaagttttttggtttacctaactggaaaggggtgaggagggctttggccggccaaatctaggcgttgaaactgcccgtgagtgttgtttctttgyctcttgsctctgccctggcctggtttttgacatcctcctcctggtagccgtcagtagtttcaggtcgagtcttttggacaccccagtgggaatatacattctatttttttccctgattgttttagaactggcttgggaaacatgcccacctccatcactgcgtccagagggtggactccacgagtgtacccaccccaccccaccctccccagcctcgtgggttcccgccagagtcagggcagacagtggtctgtggggtcccgtgaccttgagggcccaaaggctggcttggcctccatctccagccacaggttgttgggggcgggtgtataacccaaaggggtggcrtcaccagcagcaccagtgtggacacgagggaatgaggcctggagaggctgcaggggcctgtgatcagcggctggtgagctgcagagctggtgccacctggccttcccacaccaggccatcaggatggtggggcacagagagggaagttgggggaacaccgtgtggtgtaagccatcaggatggcagggcacggagagggaagtcgggggaacaccatgtggtgtaagccatcaggaggcggggcacatgtcccttgccagtgctggtggtgacagtgaccygcagtcagtccctgttgactgagcactggctgcgcgtgctgacggcctccttgccgcatctcgtgccatcctcacacccgctgcgaaggcgggtgtgcgtgcagtcacccctttacagaggaaacaagttttggcaaggccagatgcctgcctggatacccaggtttccaccctaggcggctgcgctccaggtctccactgctgagctgaatgccgctttcccacccacaggggccgagccaacccccagctgggagcatgtcctcttcacyrcctgccacaaccagcacctgcagctgcagcccccccgccgcaggctgcactcgtgggcggacgactggaaggccattctggacagcaagcggccctgctgagctggactgtgcttcgggctcctctgtggggctctgacctcagggctcccagctcggggcctgtggggccagtatgctggtctgggagtccctcctagactcctgggccccatgacctcctgctgcatgtcccttcccttccccagccctgccaggccttaacctgatcacggggcagggctgggccctctgggcgcttggacatagacacgtggtcccaggccgttcagcctgacctcaggcagcaggcaccaagctgccagaagcccaggggctcaggacagggaggagttgaggccactgttcagggggctggtggccgtctccactccctaggcaagttctctgaggcagaagggggttccctgttcccagagtctgcagccatcagcaaggaggaccaggaacccggcgactgaggtgcttccaggtggggacaagcccctyttggtctcagccacagcaccccttattccagctgccctgcccaacctgctcaccccacatgaccttctgtgtattcagcaaacactcactaggtgacagcggccaccaggctctgtgctgggggacgatactggccctggcctcgaccagcttagaggtttctcacacctctgttcccagggccccgctcagggcccagcagagagtccgtaggcttgaacatgtgttgagtgcatgaaaaataaatgctgttcatgtgtgtagctcaaggctgtggcctgccctaagatcctctagcgtctgcccccactggggacccagcttcaggtcttgtaagtgtctgggcagttccactgcattgaagacaggcggaggaaggcatgacttcagcccatgcctcgcagggtgggtcctagtggtggtctcctcgggccacccacccactctcgttggtgagacttaggaggtgggtcttagtggtggtctcctcgggccacccacccactctcattggtgaggtttaggagatgggctccagacactcggttgctctctcaagtgcctccttcccgcacctgccccagtgcttcagagcagggtcccccgtccccctctcctccgctcttctcccaaggccaagtttctgtgggatcgcaggagccctgtggggaaggctggtgttagagtctcagcttctgttccttttgacccgctgggaagtgacagcttgaaccagccacctccccactaacctttggagaggttttgggaccactttcttgtccttatgcccttcccsttactgctctggccgctctcccatcatggcccttgaagggaacatgggttgcccatgcccctaattcaccccagctctggggccctcctggcaggcctctctgccttatatgacagagatgctttgggctgccctggaggcagggtcagataggagagaagacaaggggaaggcacccatggcccaaggttggctgagctttttgatgttcctgttcttatagtctcaggagcttgggctccatcacccaccttagggagggaggacccctccaggctccatcaccccagcttagggagggaggacccctccaggctccatcaccccagctaagggaggaaggacccctccaggccccataaccccagcttagggaggaaggacccttccaggctccatcaccccagcttagggagggaggatccctccaggctccgtcacccaccttagggagggaggactcctccaggctccatcaccccagcttagggaggaagaactctaggcttggccaaaggcagatctccacggcacccccacccccttacccgctgaactgacatttttctttggggtgaaggggagaggctgaaccaggaatatatttggggttgcatcacatgatctgaaaccatctggtccaggcagggtggtggttggaagagtcctggctgtcttgccacatggctctggagggaagtctgaccctggggtgctggctgcccagctgctcctgagtccctctgcctcttcctgctgtctgaggtctcacctgtggggccctgaaagtccctcctcatgaagggccaggagaatgtgtgatgtgcaactcctttcttgtccccagcagggcctgtccacctgctccacgccctgtcctgagagggactgccccatcagaagactcgagtcacagggactctcctggggccagccacaccctgaaaacattgtgactatagcttggggtgcagaaaacaacttggcttgtttccatcctgggggtccttctgatgacagaaactcaatcctgtccagattttctcagccacatcctggtttctccctccctcctcctgcccagggagagccccgggcctgggggctgacttggtgcaggggtgtgggtcgggttgctgagagcagtgttcacggaccccgagggagctgtggaggggccctgaggccttctgtccacaaagaggggagcagggcctggtggggtaccactgggggacattccctcctgcctcttacaccagccagggaatctttgttgagtctagggcagggcagggctgggcagtctccgtcagctcctaaccaagcatccgcaggagtaacatgctctgaatccttcaggagacggactgttgcgaaaccttttagactgataattgccatcagttttaaaggtcagtttaggaactccatgctccaaattgccacatttgttctctgctgttatcatcactcaccccgaggtgggcagctgcttcagccacataatttatttaaagaaaaaaaaataattgcaggggcaaaaatgtttcagaacatgaccccacccgacggtctcaaagcaacttgctgtgacgttaacaagcacttcgaggggtgcctggggctgccgaggcactgtggagcagcaggaggaggccccgggggcctcaggtcccagcacggtctcctatgtggaagaaggggccagcccctggctgagacgccctgcagagacccagggctggggggagcttgctgaggtggaaatgggaagcagrcgttgatgagtgaggtgccgtctgcacctggatgctcagccggctgctgccgtccccattgcactgaccttggctgagaccccaaattcatgatcgtgtcaacagtctcctgattgaggccaggcgcagtggctcacgcctgtaatcccaaaactttaggaggctgaggcagatgaatcagttgaggccaggagttcgagagcagcctggccaacatggtgaaaccctgtctctactaaaaatacaaaaattagctgggcgtggtggcgggcgcctgtaatcccagctactcgagaggctgaggcaggagaatcacttgaacccgggaggcagaggttgcagtgagccaagatcgcgccactgcactctagcttgggtggcagagaaaattccatctcaacaacaaaaaaattctgattgaaatgaaggtcactttcttgaaagcttgggaagcttgtgttttgcctcagaaccagtttttgaaccccagaaaagaagatccactcccgttaggagagctaggcctggttctgccccatggcacatcagctctatccctcccttatccaccaggctggcctctcagtgactcagctctcggtgaaagttgtgattcatttgaaaatattggaaagattcagagctctaggaccagagcccctggaaggggtgacatcccccaggtggagagggcgctgggaaagcaggtttgtggagcatgtaggaatcgtggccgcacgctcaggtatgtggggaatgtgcccctgtttctctgtcctgccagagggtggaggaatctgactcccctacctgctcttcagcagcggggcctccagcaggggggcctctagcagaggggccttgtcgttgtccccatgctgctcccccttggcccttcatccctgtctgtgcagggtgtccatctgtcctcggtgaggggccactgctgcctggcctcgcccccaccctggggaccctgctgaggatgggaacactgctcctggccctcagacctctctggggtttgtggttccccgagcctggggttctgaccaggggtgggctgaccacaggtcaccttctgagggacccctggtatctcctgcatggactcctcgagtgcctgagcccagggggagagcagcctgggcctgtccagggctcactggcccaggttccccaccctaggccagctcttcttgacacatgtaggctgtgagtcctcaccccgtggggtcgtcaggccagatgaggccatgcatgtgaggaaagcttctgatccttctccagtccacggcagtgccattcccacctgtkggggggaggaggcaggctcgggaggtgcagttacgttcccgaggccatgcggcgttcgacctgggtcagccttgctcagtgtttctcaggaggccctccttttgtccacgtggccttttcctcagacgtttttgtgaaggacgatgtggcagagcccttctggctgggccctctacccgtctccaccccagagggcccaggggctgcgcaagctgctgatggggacccccacactgagcggggtgtcccatgcctaggaaggacagattccttggccagcgttgctgagcctctgtcctgtcactcacccccttccaggctccgagggatgtgaggacttcagaccacacacttcccagggcacatgtgtcgctggggatccctcatcagtccatttgcacctgtgctgtggggagccggtctctgctgcacttgggcagcccgccccggcggagggcaaccccttaatgagccttagcaggtggcatgtgggccagcgtgtccgagcacgagacgttcttgtgctgggtcccttcagctttagcctcagtgggcaattggcccaagtccctggctgcttccccactgcagcccctacccagcttgggtggggtcctcactgcccaccccgccccccgccaccttggcccccttccaggttccagacttccacttgcgtgtgtcagaaacgcagctcaaacccacccatgtgcacgtgcgcaaagctcgttggcctgggaggcccagggcacgctcacccccagggggtcacacagtctgaccaggctttcgcgtccttcctgctctctcactgcactgtccgcttctgcttcccagcctgtggacgctccctggagggcagagcagctggcacaccatgcccatgctctgagcgagcagctgagctctggcccacagtggttgcagatgatgtcgtagaaagggcccagaaatagcgaggggtggtggtggcggcaaacctggcagcagagcctgtgacaagtgcagtgacgcctcacagcgggctcagggggygggtggcctggtctgaagtcaccataagcagaacaggcttcgcaccaggacatccgggtcaataacagccggccccaggctggcgatgactcatgttggaggggctatggccagtgccgtggaggacaggcgtgggagcagtctcaccagattaagtttacttccagcatttgggtctaaaccctccaatgaacagatgggctggggatgtggcctgtttgccgcaggcgacagaggctgctgtgtggcgagtactgcggcagggcctgctctgcgtcccgtgcaccctggggtggcactaatggcacttttcagccctcgggttccatcacgtggtcttcttacatgggctgctgggtggtcacggggcggggggtcacatgactctgtaaaatgtgtcctcattcacgaggggcccaaatgctggggagggagggaggcctggggcagcccagccaggcagggaagctcggcggcaggagccgcagcccagggcagaggaagggtggctgtccccccaactcccttcccaacccccctgcagacctctatgctctgcttctatgcctgagctttagtgggggtgtttttttaaattgcaaaatggacattttaagggcatctctctctgagtgtccggcatatagatgcggctcaatggatggcagccgggatgaggatgacgaagcagagatgaagggggcacatgtgtgtgcaccatacacacacacccgaagtggtgcggactggagccctccaggctggcctcgggcttgaaggcagaaagaccatggggtttctttagttttctgggtcaggattccccatttgttgggaccccatcaagcatcaatctgacaatagctgtttccttagtgcttactgtgtcccgccactgtgatcagcacatttcacagccacagaaccaccctctggagctgttcctggttagggatggcacgaaccatctctgtgtggccaggcctgctggggctgccctaggcggtggccatgctggggctgcgcttgtggcctcctggcactgtcgtctggcctggcattctcttggggcccaggtgttcctgggtaaagcagggcctggggtcaggagctgggcttccatccgaggtgggtgccagatgctcagcttgcagcaaaaccacaggacaggcagaaagggtcaggccagagcaggccaattcttagaggccagaggggcaggcccagccactgaggtggcctcagttgtcagtcttggggccaaggagggtgaggagaaggggatatgagcgaattgatcttccaccgtgtgactggcctggcgcttacatatg

SEQ ID NO: 95514 - DNA, 33147 bp, Homo sapiens
tcaacatctctctaaaagcaagtactcagagttaaacccattaggttttccattgctcttaggctaaactaaaaaatctgtaatattgccaggtgccatggatcatgcctgtaatcccagcactttgtgaggctgaggtgagctgattgcttgaggccaggagttcgagaccagcctgggcaatatggtgaaaccctgtctctacaaaaaaatacaaaaattagctgggcatggtggtgcatgtctgtagtcccagctacctggaggctaagttgggggcatcacctgagcccgggaggtcaaggctggattgagtcgtgatgacgccatgatgccactgctctccagcctgggtgacagagtaagaccctcgctcaaaaaaaaaaaaaaaaaaaaactgtaatatgatcaacaaagccttctagaatctgacctctggccacctcaccagcttcagctttactctctgccactcgggtcttccttcagttcctagaatgtgctgtgctccttcctcctcctttgcacatgctactcccacatccaggactccactctgccctctggctggccaccctgtactcatccttcagatggaggctgaccaactccttcctcagaagagcctttcctgacctctcttcacccagtcaagccaaggtgctctgttcttggctctcctggcacccgtattctcctccatagcattcgacaaaataataagcatagcacggaactcgttgttttatgtctgtctttcccgttagattgtaagctccacaagaaaggggccagtctgtcctacatagcactgtatcccctgtataggcccctgtctggcagagtaagcactcaacaaatacttgtaagatgaatgaataacacacaatggaattatccctttccaccagctggatacggttctactacttgttagcttttctcccccagcatccaaaacacattcatttagcagttgtcaagaagcttcgttctgaagatacaaagtagatttgccaagcccttgaggaagttacacactagcagaggagacaaaagtataaaggcataaatccaacctctacattggtgctacagaagaggtacataaaaaaggctatgagagcaccaacaaaagctagactaacatggcctccttctggcaaaggagagggaggcaagaaaaccaagaatgcttcgtgaggtagcctctgagcagagagggagcaaggacatatctgaatctactaaaaattactactaaaaatctaaaatctactaaaaatctactaaaaaattcgtttgagtctctgttgccgcacctgtaaaatgaggggattttggcagatgacctctagggcccatcaagacctgagagtctaagatgccatggctttgatattaataaacatactgagtagttactatatgccaaggagtatactaagtactcacatgtattctctcatttatcaacacaggtactgttatcatctcattttaagatgcaaacatggaggcagagatgtgacgtaatttgtcccagaatcactgaaggaaccaggctttccccaggcatcatgattctacattctagaggcctcacaacaatactataatcccttttattaactgcatcctctttgctttagaaaacatgtgtatgctggaaacttactctttctgctcaacattatagttttgccttgtatagtcttaatccacatggatttggttttttatacatagtgcgagataaggttccaatttcagtttttaaattcacacaaccacacaaccaattgttccagtgccacttattaaaaatgtcagcttttcctaagcaatttgcagtgtcatctcggtcatgaataaaatttccatttttgtattggtctgcttctgggctctcttttctcctttgctggtcaatttgtacagttttgcaccttattccagactgtctgaagaaatagagcttcataataattcttaatttttgataagttaaaaaaaaaaaagaaaacatcatgtgtagtgattccaattttgagttgttctctaaaaggacatacaccaaaatggcaacaagcattgtctgagtatggcaattatgagtgggtttttaaaaatcttttttcctaattttctataataaatttgtattaatatcagaaatttttttttgttttgcttttgttttgagacagtctcacactgtcaccccagctggagtgcagtgatctctgctcactgcaacctccactggttcccgggttcaagtgattctcgtgcctcagcctcccgagtggctgggatcacaggcacccaccaccacacccagctatttttgtgtttgttttttgtttttgttttttttttttgagacagagtctcgctctgtcgcccaggctggagtgcagtggcgcaatctcggctcactgcaagctccgcctcctgggttcacagcattgtcctgcctcagcctcccgagtggcttggactatagtcacccaccaccagccaccacacccggctaattttttgtatttttaatagagacggggtttcactgtgttagccaggatggtctcgatctcctgacctcgtgatccaccggcctcggcctcccaaagtgctgggattacaggcgtgagccactgcgccaagccttttttttgtatttttagtagagatggggtttcaccgtgttggccaggctggtctccaactcctgacctcaagtgatctgcctgcctcggcctcccaaagtgatgagattacaggtgtgagccacctcgcccagcccagaaagtatttttagagagaaaatttctgcatagtgttagatacagcataatttaagctgttagtctttctaaatccagtatattagctacccatctcaagttcaggctactggcaagtctcatcagcatatccatcattctcattcacgacatcaatgaaaatgtagatctaggcctggctggctcacgcctgtaatcccagcactgtgggaggccgaggtgggcagatcacaaggtcgggagatggagaccatcctggctaacacacagtgaaaccccatctctattaaaaattcaaaaaaattagccgggtgtggtggtgggcacctgtagtcccagctactcaagaggctgaggcaggagaatggtgtgaactcaggaggcagagcttgcagtgagcagagatcgcgccactgcactccagcctgggagacagagcgagactccatctcaaaaaaacaaaacaaaacaaaacaaaaaacgtagatctagacaaggccaccgcagacacctgtcatcactgcattaattaatccccttttgataaccataaaactaggtagcctatatgtatttactcaatgcttcttatgtgttagttaccaggctctgcagaggacacaagcaccccactgacctcctgatgtagcaatctattatccaaaatggagccaaaactactttatactgttggcatttattaagtgcttctatgggccagacaacgtatagtcttcatgtatactatctcaatgaatccttacaatagtcttctatggagtagaaattattgttctcattttatagataggaaaagtgagaatcagaaagattaagtgacttgctccaaggtcacagagctagtgtgcagcaagggcagcatccgaatcccaagtgtatcctattccaaatcccatgctcccagtggctcttctatccttctccccgctccacccagatgcagctacacttggctagctggactccttactgccaaacatctaaatcctaaagtttgatgatcactttatgattttaatcagtctttctgtcctgtagtcctcttttctaagagacaaatcaactatcctagaaaccagttttcagttactgcttaagttaattctagggcatcttacccctctctagcaatgggattatatcaatgaaaccgattttcctatccccctccattgcatggggatgaaaatctgtcccatttttgaaagctcttcaaaaaaactcctagttgccagtcctcattcctgaaacaaacgaaccttcctcatggcgaccaaaagagttaaactcaaaaatatctgaagagacttattctgagccaagtatgagtgaccatggcccatgatccagccctcgagaggtcctgagaacatgtgcccaaggtggtcggggtgcagctttttttttttttttgagacggagtctcgttctgttgcccaggctggagtgcaatggcgcgatctcggctcactgcaagctccgcctcctgggttcacgccattctcctgcctcagcctcccgagtagctgggactacaggcgcccaccaccacgcccagctaattttttgtatttttagtagagacgggggtttcatcttgttagccaggatggtctcgatctcctgacctcgtgatccgcctgcctcggcctcccaaagtgctgggattacaggcgtgagccaccgcgcccggccgcggcttggttttatacattctagagaggcatgagacatcaaatacatttcagaaatacactggttttgtccagaaaggtgggacaactcaaagcgggggcttccaggctataggtaaatttaaacattttctagttgacggttgagtttgtctaaacacctgggatggatacaaagaaaatgctcaggttaagataaaagattgtggagaccaaggttcttttcaagtctttagtggctgcccttagagacaacagacaagtgtttcctattcagatctttgaaaggtggtagactcttaatctctttaggattgggagggcctggaagaaaaagatctagctatgttaatagagattctttgcagatgcaaatgtccaccccgcccgccccccccaaagaacagctttgcaaagccatttcaaaatgtggcaaagaaacatgtttaggggtaatattttaactttcttctttgtcacataatgttaggccagagccagtttggaaagtaagtcacgatatatagggttaaatgaaagccatctgatgagaatttatggtttgtagggcatgactcttcccagacaggaatgtgggcaagataaaaaaaaaaatcagagcttagtccgcactcagtcgaggaaactggcttagagaagttaagctttggcctgggacttgcgccggaacttcaggtcctaccttccacgggaaacagcctctaattccttcctttacttttctaggcgcaggagccagctccccgcccctccacaccgctccactccccgcttccaggcgcatccctgcgggtggtgttccggttagagacacgtgtttcggcgcaacttgtcccgaagctgcccggtgtctttctcccgcttaactccgtgaatgactcgaaacccgactccaaggcacggctgcagctcgcggcgcgcccacagccgggccgcgggtggggacggagctgaagccgggtcagaactcacccgactcgcctgggctgggggacgtctggagaacgtcctggggttgtcgaagagcgaaccgtcggcggctgccatggtctgcgtgggtgacgcgtggtgcagcagcgagcccggtgcgcagactgctgggcccgggaccccacgtgggacgcgcgaggaccctgcgccaccgccccttccgggtccggaacggctccagctgtacggactcgtcccgaggggagccggggacggcggcaccgggcgggtagggacaagactaccgcgcgtgcccccgcctggtggcagcccctctctgcgtccctcgcggcctggcaaaattacattcggccgagagttcacgctggggaagctctctgaatgcctctgagaagcgagatccggcgccatctcaccgacgagcctcccctttaccgccccgtgcgtttcctcagcactttaggaactaaagcctgtctgggtagctccctaacaggctctggagctcaatccctgggcagggaaaagggggtcctcggggctccccgctcgctgtcctttttctggacaggcagttccttggccacctggtagggccgcgttgyctggcaacggcggggtccttcttggctcggcggcgctcggggcctgaggggagaaaaccgccgcggagggcgctgggggtggcggcggcggtccgggaggtggtcgcgcgactgcgtggagcgccagggcgtccgacctctgcacctgagagaagatgaacacggccgaccaggcccgggtggggcccgcggacgacgggcctgcgccgtctggggaggaggagggagaggggggcggcgaggcgggcgggaaggagccagcagcggacgcggccccggggcccagcgctgcattccgcctcatggtgactcggcgggagccggccgtgaagctgcagtatgcggtgagcggcctggaaccgctggcttggtccgaggaccaccgcgtgtctgtgtccacggcccgcagcatcgctgtgctggagctcatctgcgacgtgcacaacccgggccaggacctggttatccaccgcacctcggtgcccgcaccgctcaacagctgtctcctcaaagtaagtcatcccccgccatccctggggtcttcccctgtccccctctcgcggccgcatcatccgtcccaggggaatccgatcccacactctgtccggggatttccctcttcgcaccgagcgctggggatttattaagcagccagggttaccacagcttaaaaaaaaaaaaagaaaagctctgcagctgtctgcaccctgtttccccaggtcacccgccgccgcaaacacaggtacacacccagggggcttcccggagttgagtcccaggaacccctccttcgcccctccgtcgggcccgcacatggagcgggttactcgatggtgctttctgagactccaccccctgtagatccaacccggggcctgcctctgtcgttgctgctattgtttggggccgactttccgaggttcttggctggctttgtctactgtgtgtgtcctcctctcgcgcctctttagcttcagaaaagaaaaactggtcccatccattgtcttaattgtttcagtgactttattatgaatggtcctcgcctctccttgggcaaacgggtaaatactggatctcggggtttgtactttagtttttctttactagctaaacatctttgggatgttgaatgaaaataaagattcgaaacaactrcctatcttaaacttcaagcgcaaggtcaagtagtaagccatagcgttccttttagttgcttagaggtgtaaaaactttccatatatccttgatagaggtgtacgcttacatgtgawctgtcagtgtatattcatacattcaatagatatttgaataccattctgcttggtgctgccccatgttctggaaataaagcagtgtacaaaacagaacccctgccctcatgaagcttacattctttggcaagtcaagcacaaatgataaggtcctgtcaggtagtgataagcactgtaaagatgtgtatccgcacatagagaacatgtttatgtgttcgtaaactcttattttggaaaaccattgaaaatatgagtcattagctataggtagggtgcagataaccctcatcactttgtagcatacttaattcaagtttcaaacatctttctgttgttagattgttagtcagcttgtatgactaagcttcctctaagatcttcttgaagaagatatgaacacatttgttcaagtgtaaacaaatcagatagacagatgcaaccctatgaaattgagaaatacaaaaggagggaggcagaagaaaggtgatttaaaaggtgtatcttctgctgtaaaggaayttaactgtttccaaggatgttcatccgcacagcaactcaaggaaagtatgtatgtcagtatagtagacatcgaataccttagcagagagaatgtaaagaaaggagggartagtaaggggagagacttatggggcaggtcatctggtggtgaatctgcagcagtcctaaagaaggtagtgtttggtttgtaagaggaaggaaggaaagggcattccaggyggcaggaatgaggcattcatcccatgtgcatacacgtttaagtcatgaacataattaattattgtttgtataatgacggatcagtacatgagctcaagtaggtcttctagagagtccgagaaagtaagatgagaccagtttgtggacttggaaggtcggtatgaggaagttggcttcaatctaggaagtctttaagatgctgttacagtttcattagcatagagtgacctgctgtggttcaggaacattactggatagaggcaagaagatgattgttgtgatcagtgtaaaataaaagtgaagagactgggctttggcacaagataggcctatctataaaagggggataatgaagcgttgtttaggttttttggaagattaaacacacataatcacttggcccagttcttggcacgctgtaaatgctcaaggtgaaaatataatgagttgggccgggcgcggtggctcacgcctgtaatcccagcactttgggaggccgaggcgagcggatcacgaggtcaggagatcgagaccatcctggctaacacagtgaaaccccgtttctactaaaaatacaaaaaattagccgggcgtggtggcgggcgcctgtagtcctagctactgggaggctgaggcaggagaatggcgtgaatccgggaggcggagcttgctatgagccaagattgcgccactgtactccagcctgggcgacagagccagactccgtctcaaaaaaaaagaaagaaaatataatgcagttatacrggtatgaaggagtaggagtctggattaatgtcgtggttgtggacatgagtattctgataaaattttgactgtcattttgcctcagttaacatttaccacaactgctaactagtaacaggaaatccttatatagcyctcttatagttgacaaatggcttctatgaaattaattagtaacatcttccccttctgtactgttgttttttttttaatatgcacatcacataaaccatcagtcatttagcagtctttttagactgattgaagtgaatgaatgctgagttgaccctgcagttctacaagagccctctgtgggttaaaactggtgtgacggtaggaatgtaaagaagtctgtgtcagcactttgatgactccacccattggcagtctgtggatttaaatctgctcggtgccgtgcagcatgccttcgcrctaacctaaatggtggacagtctgcagcgcagatgacagttttagtgtagcactgttagaaagctaggtactaaacacctttgaagcttttgctctataattctgttatttagattatgaatttgcaggaaaatctgcagttatgtaatagttcagacattaattatcagctgttttataagattgtatgatataaaggtggacmgtataaatctgaaaagcaatgaaatagtgatttaagaatgtcagaattgtttttcccattggactactgatttagtgactcatctagtgagacatttgtgtatagttccaaattctgataatatttgtgyaccgaattgtattgtgcatcaattgttaggagccttagaaagtattaacttcatctgctacattaagttaaataactgttgcctgtctttggactctattacctgtcctcaagaagcttactgtctaaaagcttcaagtgaatttttgtcaggtgcttacaaaatgcctaacagttagtattaaaagtatttgccattaaaagtgatggtgaaaaccgcaattacttttgcaccaacctaatagtggtcaactggaaactggatggtgtacaattaaatgattggctgcgggcaggcctctgggagctggactttttaagtatactccttgggcatctgaatacttgatttgttaacagttttgtgatagggagagttggagggaggttcagtagtctagttgaaacatatgtcagaaattgctacacaaaaccctaagactttttcctaccagtcaagatctgtactgctctccatcctgtcaagaattcttcccacaatgagtaggaccaagggttgcttaagcttcctttatttcatcccgtgctgctgctttgggttaccaatcctgtgagtttacttctacagtagcttttatttgtagcaaatttaacctattctaaggagtattgcttagttcacagtattaaaggatttgatgaacaattttatatctacctttcatttggtacacaactttatgtctaccttgcatttttgcrtacttttattagcattaaatatcttattaacatttacttaaggctgagtgctgtggctcacacctgtaatcccaacactttggaaggccaaggccggaggatcgcttgagcccaggagttaaagaccagcctgggcaacagagagagaccgcatctctacaaaaaattttaaaaattagccaggcatggtggtgtgcacctgtggtcctagctactcaggaggctgaggtgaaaggatcacttgaccccgggaggttgaggcggcagtgagctgtagtcacgccagctgcactgcagccaggstgacagagaggaatctcaaaagttttttttttaacttagtcctcagagtatattaacaattatcataggtaactttattgagcgcttaatatatgctttgatatattgacttatttaaccttcctaactttctgggacatgtattagtctcatttataaatgaggaaattaaggtcagaaggtttaagcaatttgcgcacacagagctggtatgtagcagagccagcatttgaacccaggtagtctggcgtcatagcacagattttcagttattatgttgtgcttcattatgtcatctcacaaatttcatctgcctgtagaaagcaccgggctttgattagcattgttttatttccaagccagccacctacacctcatttaattggcattttcagtctatgattctccagcaagtttcatagtgtatccaagagactactttaaaatgccttcctaaaatcaagatacactgcctaaaacaccattcccaaagtattccacatacttttggataataaagggtaataactgcctccctcacctccaaaaaaaaggctctgttgtttaaaaaggcaaaaaagtttggcttcctgtggctcagtaggtctttatagtagttccctggccgaggcatttagtgtcctcgtgtcacttttcaagggagaacgacatataaatatagtatttccaaagcttgtttggccatagaactatttttcaagggacaattaaagggagtagtgtactgtgaaacacactgtaggaaaagttagttctctattttgtggacaattttctatttacatttcattttatttgcttatctatkatgtcatctagcaattttagcagaaaagagaataagaatagactattccagttacccttttttttttttttttttttttttgagatggagttttgctctgttgcccaggctggagtgcagtggtgccatcttggctcactgcaggctccacctcccgggttcatgccattctccttcctcagcctcctgagtcgctgggactacaggcacccaccaccatgcccggctaatttttttgtatttttagtagagacggagtttcaccgtgttagccaggatggtctcgatctcctgacctcatgatccgcccacctcagcctcccaaagtgctgggattacaggcgtgagccaccacgcccagccatcctttgcttgtttctaatcatcactcctgtctgcacaaactattcatttgttaatacattgaggaattttctgttaggcttaatggtctgtagtttttgttatttatgtaccatttgggggatttttttttttttttttgcaaagcctggctccatcacccaggctggagtgcagtggcgcaatctcggctcacttcaacctctgcctcccagattcaagcagttctcctgcctcagcctcccaagtagctggggttatgggtgcccaccaccacgcctggctaattttttgctatttttagtagagatggggcctcactatgttgcccaggctggtctcaaactcctggtctccagtgatccacctacctcggcctcccaaagtgctgggagtacaggtgtgagccaccatgcccagccatgggkgatattttttaactctttgttgcactctgattttctgatacatccccagttgtccagacttcatctaggatgtagtaagtggttctgagttaatgtcttccaagtgctttctgtgtcctggagggtaattcctctaggcttgaacatttaaactcattcaagtgacttttattatatccatgtgtgtcttaggctggaatttccttttaatcatgttctaccctttccagtttaaagagcagcctctttgaaaaaggaaattgacactaaaaaataattgaagcattctttttcttttayccatttctctaaagacagtggataaagtccttccttcttcctgctttcaacataacaaaacatcttttggctagtctctgctctttttggctttagctttcctatttttttatggttctgaaccactttcttttggtcatttatctcttcctccatctttgatgtccctttaaaatcttattaaagagctcacagctgggcacggtggctcacacctgtaatcccagcactttgggaggccgaggcakgtggatcacttgaggtcaggagttcaagaccagcctgaccaacatggtgaaaccctgtctctactaaaaatacaaaaattagctgggtgtggtggtgcacgcttgtaatcccagccacttgggaggctaaggcaggataatcacttgaaccctggaggtggggtttgcggtgagccgagattgtgccactgcactccagcccgggcgacagaatgagactctgtcttactgtcccatacatgttacgaacttggaggagggagagatgaatgaaagcttgaatgacctcaaaaggccttatagggagaattagatctggtaggatagatgggatttacatagggagaagaactaggcaagggagccggggaaagctgaggtgggaatgttcaggaatggcaactagaatagtctgattagagtgaacattattctatagaaacagtaaacaaagcagttggagttggctctcgccattatttgtcaatgamatttcagataaaggacctaaagctggcatttgtattgcaaagatgttgtaaaaatctaaatatcaatttgtatcaaagatatatatagatacatattttcataaatttgttaacaccttttttgttttgtgactagttcaggtaaatgctctgttgaatcttaagaatcaagtacatctctcttgcatatattaattctaagaagaatatgggaaccaggctatgaataatgacattctgacttattttaaaaaattgccatctccttgagtaaatgctcatctgatagtttttatatctcttattttcaggttggctcaaaaacagaagttgctgagtgcaaggagaaattcgccgcctccaaggaccccacggtcagtcagactttcatgttggatagggtgttcaaccctgaggggaaggctttaccaccaatgagaggattcaagtacaccagctggtctcccatgggttgcgatgctaatggcaggtgcctcttggcagcactgaccatggacaatcgcctgaccatccaggcaaatctcaacagactgcagtgggtccagctggttgacctgactgagatctatggagaacgtctttatgagaccagttacaggctctctaaaaatgaggccccggaaggaaatctcggggattttgctgagtttcagaggagacacagcatgcagaccccagtcagaatggagtggtcgggcatctgtaccacccagcaggtcaagcataacaacgaatgccgggacgttggcagtgtgctcctggctgtcctctttgaaaacggtaatatcgccgtgtggcagtttcagctgccgtttgtaggaaaagaatccatctcttcatgcaacacaattgagtcaggaatcacctctcccagtgtattgttttggtgggaatatgagcacaataatcgaaaaatgagtggccttattgtggggagtgcttttggacccataaaaattcttcctgtcaatctcaaagcagtcaaaggctatttcactttaaggcagcctgttatcttgtggaaagaaatggaccagttacctgtgcacagtatcaaatgtgtgccactttatcatccttaccagaagtgtagttgcagcttagtagtggctgcaagaggctcttatgtattttggtgtcttcttctgatctccaaagcagggctgaatgttcacaattcccatgtcacaggccttcactcactgccaattgtctccatgactgcagacaaacagaatggaacagtctatacttgctccagtgacggaaaggtgaggcagctgattcccattttcacagatgttgcattgaagtttgaacaccagttgattaaactctcagatgtgtttggctcagtgaggactcacgggatagcagtgagcccctgcggtgcatacctggccatcatcaccactgagggcatgatcaacggcctccaccctgttaacaaaaactaccaggtccaatttgttactctcaaaacctttgaagargcagctgctcagctcctggaatcttcagttcaaaacctttttaagcaggtagatttaatagacctagtacgctggaagattttaaaagataaacatatccctcaatttttacaagaagctttggaaaaaaagattgaaagcagtggagtcacctatttttggcgttttaagcttttcctcctgaggattttatatcagtcaatgcagaaaaccccttcagaagccttgtggaaacccacccatgaggactcaaaaatcttactagtggattcgcctgggatgggcaatgctgacgatgaacagcaggaagaaggcacttcttccaaacaggtggtgaagcaaggcctgcaggagaggagcaaggaaggagatgtagaggagcccactgatgactcrctccccacgactggagatgctggaggccgtgagccaatggaagagaaactcctggaaatccaagggaaaatcgaagctgtggagatgcacttgaccagggaacacatgaagcgagtcttaggagaagtgtatctgcacacctggatcacagaaaacactagcatccccacccgcggactctgtaactttttaatgtctgatgaagagtatgatgacagaactgcacgggtaggtgtttattaacaaaaactctgaaattgtaaagcctgctttcttcatgagaaagaaatgacctaaattgagttcctgaagctcaacttttgctttgacattttttaggtaatttatttgcttgaggtgcagggtaataaataggaarcgtggattaatgcagaggatgcattcatagcayataaagaatattttgattcttcttcacactggccttgttagatatgcaaagtttgcaggatgagctttccagactggattagctcagaggctgcatttagctgagtagtatgtgatgggcaatcatggctgtagaaatatggtgcccatgctccctgcccttcctcttttgcaaaagttttgtatgggaggggtgtagtgacatgttttccatttgatagaacttaaggatatcttcagatttagtcaagaaagacatataaagtaaacaaattattactcatgtctcatttttacaaaaactgggcacagtctttattttggtaacagaacaaacttacctagaatgtattctatagaatttaagttgcttaacagagcactagggttcccagtgcatattaccactcaaagsgttctgagrattcctacagaaaagaaactgatacctttgtgtagctcggtattactcagacttcttgatcagagaatctttcttgcagctaacagttgttaaaatcctgaagaacttgtgttccaagaaatatactgtgttctgaaatattcaaaaccacaaatatctgtactcctttttacttcaaagactgatacttactgactaaagtcttatttaaartattaattgaaggcagtatccttgttcttaatgttaagccattcacaatcacttgttgcactttcttgttggaaagaatgtgtatgtttgygtacacacgttcgcctttgaaattattgctcatagaatgtttgcaatggtcttaagagtattaaratgcactgttcatgtaactgactttacttctttaaaagttaacttttggggctgggcgtggtggctcacgcctgtaatcctagtactttgggaggccgaggagggcagaacayaaggtcaggagaccaggagactagctggccaacatggcgaaaccccgtctctactaaaaataaaaattagccgggtgtggtggcgggcgcctgtaatcccagctacttgggaggctgaggcaggagaatcgcttgaacctgggaggcgaaagttgcagtgagctgagattgtgccattgcacaatcgacaagagcaaaacccatctcaaaaaaaaaagttaatttttaaacgttgtttcattgtgttccacattgtctggaaaagtattctggttatcacagtgccatgggacctggttaggtttattataagagtcagtgaaaaattagcaaaaacatgttagaaagtactagaggttggatttgtaatgatttagaataattgtccagatactccatgagcctgggaagttacatttagcatggtgatgtgattccaacatagccattttaaaaaccagaagattgcacacccgtccctgtttatagcaactgagtttattgaagaccaygcattcctgtcttaaaaatccaactatatgcataaaatgaagactttttaaacctaggatgttggcttattagcagttataaattattttggagattatcagcctagtatgctagtacagttaaactagcattttttaacctttttaaattatcactccccccsgaacatttttagacactttttctgaattgcccctgcccatgaagttttaatgtattttgtgtgtctgtttatgtactgtgtgtatatctatgttttatacgtaaaagtaagaactttttgtcccaagaactaatatttgctgctttggaaggactatcactcccattgagaatgtgtgagtcagaataacacagttgagagttcagcttgccgagatcagggctactgagaacaaatagcaatccttccttatgtaaaattgagatatatctgggccgggcacagtggtcatgcctgtgaccccagcactttgggaggccagggtgtgaggatcgcttgagcccaggagttcaaggccagcctgagcaacatggtgagaccctgtctctacataaagtaaaaaaaaaaaaaaaaaaaattatcctggtgtggtggcacaggcctgtagtcctagctacttgggaggctgatgggggagccatgttctcaccactgcactctagccggggcaacagcgagaccctgtcttaaaaaggaaaaagaaaaaatagaggtatgtatgggaggaattctgagtagtttttgtcactgtatcattatcaggatgtttggcctgtctagaatagcagagtgagtttggtcatctttgctgttagggaccatatgttagaattcttaagactgaaaagaaaaaaggccaaaaattaatgggatttaaatttgtagaggatatacagaagaggtaagatagctggcttaccaacttctgagctagtaagacrccctttgaaacgtaagtgaactaattttagtgaattaatccaaaatcttgtggattcatccataagaggttaagcagaaatggattcgaaactagaagggcgctatcactagtaagagaagacaactcttgagggttgtgtatcccagcctccaaattacatatccagtgaagttttaaaaaaaaaaaaagaattggattcaagttttcttttcagacttttatttttaaacagtataatctttttttttttttttttttttttactgagatggagtctcactgtgtcaacccaggctgatgtgcagtggcgcaatctcggctcactgcaacctccactcacgggctcaggcagatccttctgcctcagcctcctgagtagctggaattacaggtatgtgccaccgtgcctggctactttttgtatttttagtagagacggggtttcaccatgttggccacctggtctcgaactcctgacctcaagtgatccacccgccttggcctcccaaagtgcagggattacakgcatgagccactgtgcccagccaagagtgtaatcttaaagcagagaaaagcaaaactgaagcaaagaaaggcctagagcctgtgccattacctctctcactcccagcttsttgctccyatcgtgggtcttgccatgcctctgcagtggggtcagcttgtctcagattgcaggctactggaccatgttggccatgggtctttgggccatcagaatagacatttgtacagttctgcmaagagagcagtattccacataatattttgcctatagagattatgctttttcttcttaaagtcaaaacattataaataatagctaaatactttgtcttctaacagaactctgaaatccttgtttcagaagcaactaaaacaaggcaagtaataagattttggttttcagaacagttttctccttagtggttacagtttaccctgttatcacagagtacctgaataaatttattttatttagctagttgacacaggttgaaactctagttcttttatttttcagacagtataatcaggatttgtggaaatgcaaatctcctgtcttctgtaaaatattgctcttttctttttttctttattttttaattttccctttgtgtttgtaggctttttcttcaggaaatcctgcacttacactaaactttgctgactactttgtcttactaggtgctgattggacatatctcaaagaagatgaacaaacagactttccctgagcactgtagtttgtgtaaagagatcttgccattcacagatcgcaaacaggcagtctgttccaatggccacatttggctccggtaagccattttaaaagtttctacttctgctcatttttcagttttgtgtagcacaaactactgtatgtgacagaatagcaactttatgccagttatctgttgcccttgccaatttgttggagaaaagctgctattataaagcctgatgtggacttttttcatcagtgtyactcaagcaagttggcctttaaagacagttttttactgcttaatatataggagttttcttgttttatttgttcattttcctaattgaacaaattatggctcctcttcctagcctcactctaagaccttggtgtgtcctcatgttactggacctgtgggctgcatttggcacaattactccctccttgaagcactttcatcacctgccttccgggacacagcactccctggtttttgtcctgtctctgactcttcattctyagttgtctttgctgatgggcacctcagctgtctgtctttctgcctgtttttcttctctcagcactttccctgggtggttgcttatcatctgcacactgatgatttaaacatagagtttttgcctgtatctctccccctaagtctaggcttatatatctaactgcctgctcagtacctctatttggatgtttaataggcatttcaaattggaatccaaccttttgttcctacctctgcagccctggtccaaaacaccatcatctcttgcccagcttattacacctgtagttaccttccatctggtcttcccacttccatccttgcccctccagtctgttattatagttgtgatagtgattgtatcaaaactttgtcactggctacttgtttctgatgagtaaaactaaaaccctctcagtgatccacaagacgccacacagcctggggccccttcctccctttgtcctcccgctgacctcatctgctgtatttgtccatcttgttcgcttcactccaggcagaatggcttcattcctcaggtacgtgaggcgccctccacctcaggacgtctacactggctgattcctctacctaggatgctgttccagcagatgtccacgtggcttcctycagtttcccattatcagttaggccttcctggccaccatatctaaaattgtaacaccccactgacataccttcccctcccattactttgcatcctccttccttgcgttattattttcctccttaataattatcactatttaatatattttttccttgtccttcctctagaatggaaagctgtatgaggacaggaacttatgtgttttgtttacagctatttctagaacaatgcctagtacatggtgggcactaaattttttaatttttttttttttttttttgagacagggtcttgytgtatygcccaggctggagtgcagtggcacaatcttggctcactgtgacctttgcctcctgggttcaagcgattctcccacctcagcttcccctatagctggaactacaggcatgcgccaccacacccggctaatttttttttttgtatttttggtagagacggggtttcaccatgttgaccaggctggtcttgaactcctgggctcaagtgatccacccaccttggcctcccagagtgctggaactacaggcgtgagccactgcacccggccaaatttttaacaagattgtgctacacgtaccatattaactcaccagttctgttatcaaaatgtatgtacatttttctacatcactacaaagataacattcttaatggctatagaggtttctagtgtatgaatgtttcmtaatttacccccttattataatttgttttttttccaatttgtattgcattcctacactttttttttttttgagatggggagatgaggtctcactatgttgcccatggcagactcgaactcctgggctccagtgatcctcctgcctcagcctcctgagcagccaggactatgggcatgtaccaccatgcctggcttctacactttttctaatttgagtgttcagactttttaagagaaaagaataggaaataagcttgtagtatattttaggttagtaataaaaataaaaacatatactgagtgctattaatatgccaggcacagtctaagctgtacacacttattaagttactatattatggtggttgtgaaaataagttactaggattacaggtgtgtgccattgcacctggctttctgttagttaagattgggtataactactgtctttaagactgacagtacattggggaaaaccctgacgaatattgaaggcaaaattaatgatgcaagaagagacaggacactaacaaatgttcacaggttcaattccatccaaagattattcattgagcctttaccagggccaggcaaataaggataggtggaatgtatttttgcaacaaccatgtatggggagcatcatgattacttttgtttttacagatgagattggggcctggggaagttaaataatttgcccaagtcacaatggtggcttgtggcatagctcagaacctgacattctgtctccagaagccacatgtgtaagcattacacattaatgtctcctagatgggttctttcaggaaaactgttttcatttttcttgactaaagttagggctgaaataccccagtatgatttctctaggtgagaaccagtgcttgctgtcactcagttgtaatctttcttcctagatatycagttctttactcaaggtgtgcctgcctggagtcccttcccctaacctctgcctgcttggagtcccttccccaacctcctcctttgtgttttctgctccttagttgctcacctgaaaactgttattttttgggaaaccttccctgcaacccagatgtaccctttcccatctcaytgcatcccacctgtccttatttgcctggcgctggtagatggtcagagaataatccttggatggaattgaacctgtgaacatttgttagtgtcctgtcatttttttgcaccattaattttgccttcgatattcttcagggttttccccagtgtactgtcagagtcttaaagacactttctaatcttaactattagaaagctgggcccagtggcacatgcctgtattcccagctacttgggaggcttaggcagaaggatcacttgagctcaggagttcaaggttaggctgggcaacgtagcgagaccctgtctcaaaacaacagcaacaacaaaaaacctaacgaataattctcaatataatacatgatcaatttttaaaaaacagatcaagaattyaaagtgcggtcaggtgtggacagactaaattcttttctgatgctcaaacaggaaaactgcaatctacctggattagaaccgttgtgtctctttgctaagcatggagtattggtttggccagctttggtgcacagggggatgcattgttatgtgaatgtatgagtatcatgctttcatttggttaatgtgtggttttatgataactctctgtgatggagaaacatcagtttctgagtgttagtagagcaaaccctctcccttgccaatacagtctgtcttctttcaggtgcttcttaacctaccagtcctgccagagtttgatatatagaaggtgtttgctccatgacagcattgcccggcatccagctccagaaggtgagtgctttcccttacttgggaggrtgggtgggtggaacatgctggcagagggccagcgccccagaataacagttctagtcacrctctacacttcttggtattgtgttgtcgggggtkgggggtggggagtaggcccctgctgctctttacggtgttactgtgaagccacagctaactaaaacatggccattggaatatgtcatattgaagtgcttactgcatttagtatgtaagtttgtctgcgttgctattctgtcactgcaaacaaattattcattccaaaaaatgtcagagcttgtttcagtagatgacatagatagattatatttgaatgtaaactctgtggatgatactttrtacgaagacattattgaaccagtaataggatattcacttggagtcattcttccagtagccatgatgggtttttttcctggttggtctatgtgctctttcctgatagttctaatgtcatccgtttctgagataactacctggaaataagattgtagagtgggcaggaattagtgatttaataatgacgcaaatgtcagattttgtcctgacgttaataaygcactctaaccaagtgagctaactaggtrcagaatatacaattttatatgtattttgaggggaatattctattctcagctgaaacaaacagcattctatataaaactacataaattcttgagctttgctctaaactggcagaagctctctaattctcataagttggtatgttgataccttgtgttctgttgtagctttttattagrgaaacaacaatcatacacaaaaggaaagagaagggtataataaaccactgtgtgcccatcacttcagaaattattgactcatggccttttctgtttcatgtgtagttccctcacccacctccctcctcctgatggattattttgaaacacatttttgggaacttttaaatttttactgcaattgataatggatatgctgcttaggcaggaaatctggaagagattgaaactttaaaaatcttacccattgactttgagtctagccatttaaagcttttgagaagaatgagaagctactggatctaagaagagcactggagtagagtttttcatagatgaaagacgaggaggatttgaccagtgttgccgcatttttatttctcaagggcatagcattttttaaaaattcctattactgtaattttatgagagaatattttaacattaacaatgtatgaagaacacattctcggaatatactcctttctttaaattgaataaatttagctttatgaaacattcttcattacccttattttcctgtttcattacatttaactttgtgaaccacaagtttagtccagcctcatttggaatgatagaaaccgaagcccaaagaagtgaagtgctttgtctagggatatgtagctggtttattgcagaggtgggaccagaatgcccgtctctcaacgctacagtccggtattcatcccttttgactgtcttttccgaagctaacagttgataccacttgtcctccttttgcagatcccgactggattaagaggttactgcaaagcccctgccctttctgtgattctcctgtcttctaaataatcagtgacgggaagatggaagggcatgatgaactctgccatagaaaacttcctccagcctgaagagaaggatgcactggaggaagccggaccctcacgagtggagagaagtccttggtgattgtaaagagggcccctggagctcatttctgaathgcactctccatttccagagactaaaggatgtcctttgaaatggctggactcagagagttggagtcgttttgagatgagcattagccccagctttgtaaccaatgaggaacacttacttatttttaagtatcttgacagaagcaatttgaacacagtgtcccgtcatttctagaaacagaatggtctcttctagagagcttggataaggaccttgctgggttgagttaggttttaatccttgcyttggtttggaactgccttcgggctccagaacttaaattgcttggtccgtggcatctgatgtaccaacagagattaaaagtgtaaagcaacacatgggctgatgttttgttctcagaaaatagctgctggtctgcatccctccattcttgttttttatgcatatggaaaacattttcctaaaactctatattcttaagttgaagccaagactraaatttaatgtgtcaaatgatctggtgactattataatgaataattgtgacttatttttcattctctcctgggtcatcaggtttcctgacccaactccttaatccgtataaagatgtcaaatactgtagttcacccacgccacagccctgcttcagacttaactgtggtagcctagatgagctatttgtacacagaggaaaaaaagatattttcctcttttagtaataagactttcagtatttttaatgttgacatttccagatgtttcatttagtatccaggggtctgtctggagacttctagagagggacagctcagaagtgagacccttgagctctggtgctgtaarcttgtgcaattaagttgaacagagcctgggaatttctttcctctgcacagtcccttgatatttggaatccaggttctgcccccaacccctacccacccagtggtctgttaagatgtctcagatggggctgggcttggtggctcatgcctgtactctcaacactttgggaagcaaaggcaggcagatcacaaggtcaggagttcagcctaaccaacatggtgaaaccgtgtctctactaaaaatacaaaaattagccaggcgtggtggtgcacacctgtaatcccagcactttgggaggccgaggcagacgggtcacttgaggccaggagttcgagaccagcctgggcaatatggcgagacyccgtctctactamaaatacaaaagttagcctggcatggtggcgcatgcctgtaatctcagttactcaggaggctgaggcaggagcatcacttcaacccaggaggcagaagctgcagtcagccgaggtggcaccactgcacttcagcctgggcaagactggagactgcctcaaaaaaaaaagaaaaaaaatgttggtacttagatgataccatgacggcaacctccccacccccacccmgcattgataggtagtgcagaccagcccttggaggcacttctaaacagtctgctcagaaatgttttctgtttcctattcaaattgctgttttgtctcctatgtttaatcatgtatttgctattctgcttatttttctcatttggtggtaatttcaagaagagcgtttatccactattgattttcaagaaagaaaccaagcagcattgaaatcatgagtaacagaattcakaacattgtatggtggaagtcatttgtgtctgcagctgttttttcactttrcaataaataagagtaaaaattgagatcatgtcaaaaaattattgcagttttaatcattatggcatagtttcacttcccctccccccattagaatcagtggagatttgttcttactagggaattttggactgctgccatttaaaacttaggtttttatttaaagcagttgtgcatttttgagaaaatgtattgggagtarctagagaggatctcccaaatttttttgtatgtctctctaggagtaaacatggcaacagtttttctagaacgtggactcactgcagggactggacccaatggcattgttaagaccctaaaatctagccaccacctgcctcccccargtttccacacacccagttggaaggcctttccctgcccttgtccctgtctcacacccatggaggttaagctacagagctggggaaacaggagattttgagttaatggcagcctcacaaatagtgcttctgaatttctctgagggtcagcatacctcatgggagtgtgttgctcagtgcaaccttggaaaagtgggaatggcaccagacgtttttcaggtgcctcttgcaattcaaacttacatcctctataccgtcctaaaatttgcctgatcttatttggtagatttcaagttgctttcagctgtgaccgtaataactgtttcaggaactggagaaatagtggaagtgctattgccgcgctgcatgtaaagcacaggagcaaagattcgatacaattagaccctttaagctacaacgtggttgcatttggggagtctgatacccacataggtatcacattttctctgcctggggttaatttgttcttattattctaggtaagaaattgatagcttgttatgcttggtactcattctgaaatccctgtgtgtccaccaggcagacttcaagcaatctctacctactattatatctgccaaaactaccaattatttttcaatgtcagaagttattagagccactggcaaagctcatggttgaatatgacatttttctgcttttccctctaagaagtttttgagaatgttaatgttgaagtatgcaggctggacctaccagcaagtttaacacgttaattaggttaaaaagaatattaaaaggcaataattaaatatttcaattattttgtaattataatggtatcaaataagatgcaaaagaagttgatgcttattggtgcttaagagaattacaatactggttttatgagcatcttttctctgcaacagttaaactgcctcagagtttgtgaattgctgcaattcctggaatggaaacaggaattagggtcactggttgattggcacaggatctttccatcgtttctgctcctgacctctctctcttgcctttccttcccccagacaccctcttggtttccattcctttagttccctctgctttagaacacagattacatgttggaaagaaaaatggattaatggtaaaatttctaaaagctaaattgtacagtggggtctcacttcctagaagaaactattggtaatatttctttctaaaggtaatagtattaattgtatctggttttcttcaaaacttaactataatttccttgtcagggtgctcagtagctcttggtttgactttgggctaagggatgtgaaattttagctccttcccaccacctgtttsccctcactcccacccccagccaatattcttcataagcaaaaattatggttaagctaagctgaatgggttatattcaaagtaagtacagacggcaaataggcagacaaatacaggaatgtctttacaattagcccaccatggactgttttgagtctctgcatggtttccataattcattatgatgtatctttatgctctttcactgctcttctgtgcgttggagtttagcaattcagtgagactggggagtgtctcaagaatggaacctttgccttcaaggttgggtcatcaaaaatccctctaaaggatctaactgtaatgaactgtttttatttttgccattagtgcaagtatcaactggcagcctcaaacagctttagactatgtctcaggtctctcatagttatacttagaactgctctttcttgaagctaaaagaggtttttggagtaaagatctgcttcatgtctgctagcatggtatctgctgttcaacctagtatagagcatgtgaaatgcaactgtcctttaatggaattcagccaaactccaaaaatactgagttgcttctagttatctaaagtagtacagaatcactatcccgatgaagaagtggggtttttcagaagattgtaaactcatttccatggcacagatacaaatcatcgtcaggacttgttagccagtccatgtctcattgataggatgtagcctgccatctgcatagatggtttaacatggtgctgtttttgaaaacttgctgtggaaataaatttgacagaagagtagttatttgtaaagctgtcctagaaagaggttaattcttttggtatatgaatatttctcctccaatccttttaattaggtggttcagcttatcttgtattttctgagtcataactatactctagggccaagacctactataaaatctggggtcctaaccagagagttgtttagatcaatatgatatgctttgccaacatgatctaagaaggtattcattctttctgggtttgagaagagttgacgaaagtgtaagattatactctcatgctaaaataaggtataggctaagtgaaatactgtaaatgggttggttagaattaaagtttagaactctaaatcttatgcttatttttaaagtaaaaagttgcctcactgtcatgaaatcctgttactttcattaaaaaaaaaaatcctgtaaaatggtcaaattggataatgtaagagataatgatggctttgaggcatttcatactttaccagtttacatttggctagcagactggtaaggtttagggttctctccactaatggaaaattaaatgctaaacgtcctaagaattatgttgttttcaaggctttgactcagatttgtactttgatgtatgaaagtgaatatcaaacttgtttatagaaaagactatatagaaaaataagtctgtgttgtgtatagtgatacatgttttatgtttacccaatgcctgtactaaatcttgtgcttggctttgaattatatatgtgtttacctatgacttttttttgaaataaacagaacagtcatctaaaaacataaggttttggaaaggagatgctttttcaattcttaccatctgattaggtggaatgttttatagacttttggtgttgaaaaaaaaaagtttgataacaatgcattttgcttggaataccccccaatccagaaaagttggtgacttctctccattgtatatatgtacatagttttcattactagattgtaagctcctcaagggcaggaattgttttatctttgttgttcctgcagcacctaatgtaaagtgccttgcacagggtaggtgctcatgacgtgtagaatgagtgagtaacttcctgcctcatcaggatgaaatgtggttcacttcccctgtgttcaacactacaaagctactcctgccagaagagggcagagttctttcttgggtttgaactggcttttttgggttgaaccagatcatcccacatccttagcactacttaaccttcttttcctgaagattacatatcagtgtcctgcgtttttatctaatattagagctgaggttcctaggaaaattttgaagtggggaagattatggagaaaatgaaatggaaatttggggagggtggtttgtcagtataaggccctgtggggtaatcatattttagttattacttgttaaaagggtaacagaacctctgtttctttaccaagtcgctggttggccatttctccaattgatgaactaccattggttttagctctttctcatttgggattcccctcaattgcttacatgattctggtacttagagtctaatagagttgctgtgaatatgtagtgctgtacataatggcagttttgtaaatgtgagataaccttgaatatgttgtggtttgtatacagagccattagtattgttattttggccacttttttattcaaaataaataacataattatttgtatagtgcgtgtctgttttatggagttgccacggtttatagcaaagcttggaaacctctgaaagcctgagcacccccaacaaagttaagtaatgcccgggcatgggcagacaaggaggaaagagctctgtgagggaagtgttagggaactggccactagcaactacctcagaaccaagtcagtaagtcttaggttgtctattccagaaaaaggaggaatgtaaggggaagtaacagaggttcagtaatatgttaggccacatgttcttaacaatgtcaattaaatagtatttggtgaggaaagtgaccctgaaaaatatgatctctataagcattatgtatttgtgaaaagatgagaatataccagcattttttgcagatagtcatctgtgcttttatggtagaggcagtgtatcaatgggttcatccatgtgcatcagaaagacttggaggatttgttaaaacactgggtggggtgggctggatgcagtggctcacgcctgtaatcccagcactttgggaggctgaggtgggcggatcacgaggtcgggagatcgagaccacggtgaaaccctgtctctactaaaaatacaaaaaattagccgggcgtgatggcagacgcctatagtcccagctactcgggaggctgaggcaggagaatagcgtaaacctgggaggcggagcttgcagtgagctgagattgcgccactgcactccagcctaggtgacagagcgagactctgtctcaaaaaaaacaaaaaaacaaaaaacaacaacaacaaaaaaaacaaaaaacactgggtggggtgaaccccacccctagaatttctgattcagtagatttgggataaagcctgagaactgctatttctagtgcattcttggttgctgttcacactgctgatctgggatctgtgttttgaatactgttggtccacaaatgaacccaaacactgctccctgccttgcttctatggtgcccaccaacagttcacatggattattggtttgtacaaatcgtcagtcttacctgagattctcagcatcactacaccagttacttttaactttattaagacaagatttttaattttatcctttcctaaggaggacacatggaatagaccactgtagtgaatcctttctctcttgcaagtctggctaatttcagtcttcctctaaaattccccttcagatgaattgaagctagtcctcccatccattggtgtacttgagcttaatccagcccatcgtttgaagttcattgaataagaaacttcaaaaaaaaaagccaaagtatttgtgctactcctattgtgagataatttaaatgaaatactgattgcagggatttcagcagtgataaatgtacaatttagacacatattcctgctgagaacaatcagaaaagctagtttaaaatgttgaaatatacatatgaaagtgttggagactgaaccaggcaggaattacaaggcgaatatctgggagaaggaggagtctcaggcaaacccagcattcaaggtaggtttcttctcctagatgagtctgccagtttcagaagaaagagatgagaggctaaaaagagtagcagagcttttgacatcattgcatgaccataacagaaattggacagcattgcccaccaagaaaggggctatcctggtaagaaacctccacttttaggattgggaatccaaaagagcacaccttcagagaaaaggtgaactgaaaacaggctagtttccacagaaactgaagcccagcttcccatcatttcaatccttgaagatgggttaaagtgatctaggttggtcagagcttctcatgatcttcttttgaaggaagaggctatccctaggcctcaaatcacaatgtttggcattcaatcaataatagccagccccaaaaagtaataactaggcacacaagactataagacaacatgtttttcttaaaacagaaaaaaaaaggtgatccaaattatgttgttatcatatatgaactttaatcatgtttaatattctcagagaaataaaagataagtttgagaatttttacagttgtacagggctacaaaagaagcagcagcagcaacacaggccacacatggcccacaaagcctacaatattcactgtctgggcttttacagaaaaagccagaagaaaatatccagaatgatgtggggagagaaaaacaaaacccccaaatgcaggaaaaagcattagagatatgatgggaggatgtaaggaaaataaatgtaataggaatcccagaaggaaaggagaaagaagatggggcaaaagacatatttgaagaaataatggcttggaattttccaaaacttaactaaaaaattcatgaagccctataaacaccaaacaggacaaagaaaatgaaaagcacatctaatctatcataataaaactgctaaaaatcaaaaactagaaaagctttaagtaaccaaggacaaaagacaagtcaccttaaaaggagcatcaataagacttgacagcttacttctcagtggaaataat

SEQ ID NO: 95515 - DNA, 22936 bp, Homo sapiens
acacctttaatggctgcggggcgtgtttcttcctccagggacaccagatccccctgctcaaggctggggggcgagtgtgccactcggggctctgagatgggcagagatgactatcctcgaacttgaaccctttgttcgtgtctctaaacctttcctgttttctagaagtagacaaactgaatccaagggcgggtgtgctggggtcttagtgccaactcaccctccagaaggagagtccagacccttctcccactgccagggggaaagtgtccatccccctcagccaatccaagggtttcaaacttcaggggtgtgatatcatgccaaatatatatatttccatccatgattcctggctcataactcccatagtgcttgttataatgttggggtgttttaggcctcagaagcaggcctcagaaaacagaatgtctctctctgtctctctctctctgaccttctcctgccctcctttcacctgctcctttttctccccaaggcaagaatcttcccctgcctttctgtctggccataaattctctgacctaccttgtctaattgtaggtcacaagatccccattttaggagtcccaccccagaccctggaggaaggaatgctgtagggagaggccaagaagaatctgcacagacaggccttgtgagtttccccctccactaatgctagaccgtgcgccaatgctagaccgtgcgccaatgctagaccgtgcgccaatgctagaccgtgcgccagtgctagaccgtgcgccagtgctagaccgtgcgccaatgctagaccgtgcgccaatgctagattgtgcgctaatgctagaccatgccctttttgtccaaccatgtttctacacagttgtccatgcttcagtcatgcctatccgattacccagtgaagcctccataaaaggcccaagaggacagggtttagggagcttctggatggctgaacacatagaggctcccaaagggtgggcgtccggggagggctggaggcttcgcaccccttcccccataccttgccctacacatcccttcatctgtatgctttgtagtatcttttataataaaccagtaaacatgtttccctgagttctgtgagctgctctagcaaattaattgaacccaaagaggaggctctgggaactccagtttgcagctggtgagtcagaagctctggaagcccagatttgtttgtttgtttttttgtttgttttggagatggagtcactctatcaccccggctggagtgcaatggtgtgatcgcagctcactgcaacctctgcctcccaggttcaagcgattctccttggaaacccagatttgtgatggcgtcagtgggaagtgggggagggggcagtcttgtgggactgagatctcaacccgggggatctgatgctacctcctggtgtctgttgcctggtgtgtgggaaacccccacacgctggaccacagaagtcttctgtgttgactgttgaatgagggaagagaaaaagccctttgagagagagagagagagagtgtgtgtgtgtgtgtgtgtgtgtatgtgtgtgttttccactcaaggagctttgggggaatggctgcacacttcataggtgagatatgctatctaactcattatcttatttcattgtcctgatgcaggcggaggctggattttcatctttccaccatttctgaagcgtggccccttctgctctcaggggagcctgctgaacatgtgttcttctgggcatccctggggtcaaggtctaggtatggcttccagcacagccaagaagctcctctccyrggtgctgggggcccaggaaccagccctgggatccctcctccgggcctagctggctggtttcagttagtgcttggactggcttccctgggacagggtgcagtgggttctgcttgtatccaggccaggccttagctagtgcaggatgatgggcttggatcagagactggctcctggatgccgctgggttctgggtgggccaactgtatggatgtgaacgcacttgtcctcctgaaacaccaggtcaaagaggaacacagtgaagggagccccagaggagtagggctggcccagagtccacccagccctgtagtctttaaaccccacctttttggggcagtgatacattgttctgataatacagatgtagaaccccaatgtatcaaacccaggacagagctgctcagggtggagctgggatgaggtctggactccctacccccaacccagacacacagacacacttcaggagcctcctccccgacaccccattcctaggcctctgagaggcccagcttgacaagcactaaaggaagctgtcactgcaatgcatagtgggaaaaactgaggctttgtccaagatcagccagcaaagcaggggcagaagcttgggtgatgagctgagacttggggtctgtcctcaggaccctcctgctgctgcccacccccaggttccaaggccaaggggagccaaaatcaatgtctgggtccaaactgagctttgcagagatgcctgatggccactcaggagagcactggctcttgttccagacagaagcttctcctaaagtgaggagagtgaggcccacacggggggccatggggcctgcctccaccccacccagtccctccaccccagctccacggccagggaagctctgcagactctccccacctctccttagagattaaaggtctggggggttctgccacccctgctcayctgagttcccagacttgaccatgaactcccttatttctgggaaacactctggagcattctctggcatcccagaggtaaggcc[135 bp omitted]aaccagaagggggactttagccagccccctacgagaggacatttccccattcccttcatgaatgcaaacctcagccctccaggattaccagtgggaagacaggtcacttctttgtcagcttcagaagatcaagaccaatttatggagaaaccgagagatgagtcctcacaagcccattttccagatgaaaagctgaggcccagtgaggggaatggtcacagagggacactggatagcctgggagttcggaccaagagtcctacatcccctccaccgccgaccccacccaggctggccctgagctgctgcacaagaacttgcccgtgacctcccgatcccagccgctgccctctgacctcgcgatcccagccgctgccctctgacctcccgatcccagccgctgccctcgctgagcttggaccacgtgcctgagacccgtctttcctcatttaaaccctgctcggggtggggggggctccacaccggcggggaacgtgcttgttcaccgtgtgttcttagcctctagaacagagcctcaggcacaggaggcacttcacatttattgaataaatagatgaatgaatcagtgtcatcctcccaacagccccttgaagcaggtactcttatttgacagaggaggaacctgagacacaaagaagtcttggtttcattcattccttcactcattcatgcatccagcacccctgttgtgtgcagacacctggaatatgacagtgaaccccagacaccatccctgtcctgagagctcacagcgcaaaagcagggacagcatctcacccacagctagcagtggaagcgccgatctgggtcccagcttcagtggcccaccacctcctcaaaagatagttaagtaaggccaggcacggtggctcacacctgtaatcccagcactttgggaggccgaggtgggtggatcacctgaggtcaggagttcgagaccagcctcgccaacatggtgaaaccccgtctctacttaaaaatatataaaaatcagccagatgttgtaatcccagctactcaggaggctgaggcaggagaattgcttgaactgggaggcagaggttgaactgggaggcagtgagccgagattgtgccactgcagtccagcctgggcgacagagcaagactccatctcaaaagatcacgccactgcactccagcccaggtgacagagcgagactccattaaaaaaaaaattaagtaaaacataaattttatttatttacttatttttgagacatagtctcactctggcacccttgctccagcctcatagcttgctatgttacccaggctgctcttgaactcctgggctcacgtgatcctctcaccctagcctcccaaagtgctgggattacaggcttgagtcaccatgctcggccttaagtaatatttaataagagttttctttaagtcatatagagagagacagacagaaaaacagagacagagagagacagaactggaaggctagcagtgactcttctccccactgctcttctcccactctgcctggcttggatttgttctttctggttcccttgaacactgcaagtctctgcctacattcctatttc[450 bp omitted]ccttttgaacagcactcaccagctcccagggccggtgccaggctcctgcagactgagaaaacaggccctgccttacaggaaccccaaggtgctctagagaaaccccaaggacacaggtaatcatcacacccctgaggggcctgggaggctgtgcccaggcaccaggcagggctgggtttccaacttccagctgcactgtgacctggagcacacccataacctctctgagcccgtctctggctgggtcccaccccccaccccttgggtcactctctcttttattttcccttagggccccttcatttcgccttactgtccctcccctctcgcacccttcctaggagaggtttctgctacgaaaactttctaccccatgcactggcggacctctggtgagctgcaagagggtctctcctggggtcccagagtccctggggtggaaaagagtagcccttcgtggaagggataatgcaaccccgacaggccgtgggaagaaagtgtggccagtcccatttcacagaagagaacacggaggctccgggtaattctgggagccactcacttgtgtcccctcgctgggtaggggcgcctggctcagaggcccccagcaaaggaggacagatcctaaaccggacagcaagctgcgtccagctggttctccctttccgtgactgcttcaaagctcttataaacaaggtaaggttttccccacaaatcgcttcatttctccacccgcaccctaccatggccccggacctgcggttctcggccccccgagctgggcctgctgcatcctaggcagagttctaggcggctagcggaagccaggcccaggggtcagctcaggcgctcggtcccccgggatcctgctcccaggccgcagggaaggggctctgggaccgcaggggcggggcctgcggtaggtgggcggggctgcggcgccctctttcccgtctggcttctcttttctgtcctctttcctgtctgtcttcctcttttctgtctggcccgcggccccgctgcctgccctgctccaggctccacctgcgccgccgatcgcccgggtatcgcgggggcccaggccagctgagtccgttttccgcgccggggtggcgcccctccaaccgtcctaacgccgggccggcagcaaggagtaagtctgcaccccgtagggacagtcgcgctcccttggccccacccagtccctgccacgcaaggggccaaggaggagggccctgagcccaggaggtgcgcatctcggacccagggtcccgggtcccgaccacggactggggccggcggcgctcggggctgggctctgcgttcgcgggaggcgggggcgagacggggcttggaggcccgrgtggggaaactgaggccccagaggaagagagagggagagggcttgccggacactcccgagtggcagcggcctaatccccaggaccccggctctccgctcactgtggcccgggctgcgcccagcgttttacagccgttcccgcgtgtcctccccccgggcgccgcgtgccgccccccatccactgaggccgggagcaggggatgactggcccaaggtcaacgagccagcgagttgaggcgcgttcccatcgttccgtggagaacccgggccctgcctcccggagaggtggacagcggccacctcgctcccctcggggaatcctgggcgccccttcccgcgcatcctgcgctgggactgcatgtgtcctcgctgtgcctcggtgcttgatttccagcggacggtggactggcccatgcacccctcccggcggcctcggctcacctctgacaatggacctagtacggagacgcgggagccaaggcagggatccgccttcgcggcctctgcgaagtcggtcccagcccctctcccaaaggacagctggaagcaacagctgagcaccgagccactgccaccgtgcgcctcccagagctgccagagctgagcccggggtccagcgggacctagagtccacatgaccgcagtgggtgaccgagggagggcagggctgcagggctggggtcaccgtctccccataaagagcattcctggcccggtgcagtggctcaagcctgtcatcccagcactttgggaggccgaggcgggtggatcacctgaggtcaggacaccagcctgaccaacatggagaaacctcttctctactaaaaatacaaaaattagctgggcatggtggcttgtgcctgtaatcccagctactcaggaggctgagacaagagaatcrcttgaacccmagagaagaggttgcagtgaatggagattgcgccactgcactccagcccrgttgacaagagtgaaactctatctcaaaacaayaaaagtgttcctttgcaggtgttcctgggacctcagagaccaggctcagagcctgacatccctgcgaggggacagcctcatcygcccaggccrgtgggggtctctacaagtgcccaggctcaggtgcagcccccagcaatgcatcgccggagactggccctgggtctggggttctgcctgttggcgggcacaagcytcagtgtcctgtggtgagtctgccccacggagctccccctgtctctatccccacccaggactccccctgtctctatccccacccaggactccccctgtctctatccccacccaggactccccctgtctctatccccacccaggactccccctgtctctatccccacccaggactccccctgtctctatccccacccaggacttcccctgtctctatccccacccaggactctccctgtctctatccccacccaggactccccctgtctctgcagatcaaccccaaaaccttgatctcctcataggattccagatcccaccaacccctcctgactcacctgttctccaaccccagccccaacaagacccaactagtgtctccggcttctgaattctgccttgtactggcctcctggcctttgacttgctcttttctctgcctggatcatccttcaaccaatgttgatggggaatccccgttcaygctcccaaattcaccctctgtttctgtccttccatgaagctcctggggctgcccctcaccctgctgtttgtgtggggggcctggcatcaagaatatacactccctaggaatgaatgactctatgggtgaatgaatgactgcatggcaggccctgtgacacatgccaggaataccagcaggctttgtcctccaaggtcagccagacctacagaatgacaggggacctggcctcctaatgcactgtgggagacctgcactcccaatgacgtgcatgaggtgcgttttcagcctctggtgcagagtggatcaacagattttttttyttttttttattcacagggtgtatcttgagaactggctgccagtctcctatgtcccctattatctcccctgcccagagatcttgtaagtatgggtgtggctaggagaactgggggccctgagggctgctcacagttggggagacaggagagtatttaagttcacttcatctgccggttcctgattcctaagttcatgtttctgataaatgcaatagtatttatgtaatttaagggctrtgacaagcgtgaagtgaaattcccatttcggtcttccagcatccttgcagccccctgcatggtctgaccgtccacatgttgcacagctgtgagccttgcttgctgtgtctggccactgagaacacagagtgcaaagatgcccataaacagcctgctgttgctcccggtgaccagcaggggttgtgttcagtgcttttaggacttgaccttgttgctcaattttgtgttccatggattcaaggaacaaatgaacatgtgaccaaagtcctcctcaactaaggagtcttttttttttttttcttgagtcagagtctcactctgtcgycctggctggagtgcagtggcgtgatcttggctcacagcaacctccacctccccagttcaagagattstccygtctcagcctcccaagtagctgggattacaggcacccgccaccatacctggctaatttttgtatttttatttgagatggcgtttcaccatgttggccaggctggtctcaaactcctgacctcaagtgttccacctgcctcagcctcccaaagtgctgagattacaggcatgagctactgcatcggtccggtcaccatcatcttattccacccagggactgacacataatttttgagcctctctctctttcccaccaccaattgctctcgggatttaggttgctcccaatttcccagggctctcagttagtttgtgatgagcagcataaccctttctccatttcaaagatcattttgttcagatatgttcccttagtggccggaggatgtggataggttctgatccaactcattgggttatttccagaaggaccacagcacatcagtcactcattcatgtgccctgcccaagcagtacccagcaaagccaccgtgtagtacacctgggctactgctgggaataccagaggttatgaaaacaaaaatgaacctaccttgctgattgggagagggaaaatgctatcctctttggtataaattttatttattattattattattattattattattattatattgagacagagtctcgctttgccacccaggctggagtaccgtggcgtgatctcagctcattgcaacctccacctcccgggttcaagcaattgtcatgcctcagccacctgaatagctgggattacaggcacacacgctaatttttgtatttttagtagaaacagcatttcatcatgttggccaggttggtctttgcccccttcggccaggcttcgccccctcatcggcctcccaaagtgctgggattaaaggcgtgaaccaccacccctggccttaatttttttttttttttattattactagtgagactctcatttccctacgtcttcccgttaattgaaatttttcttgtgtgaagtgcttcttccccaccttctctgtttggtccgtttgtgggttctctatcatcactcttggctaagtatacctacaacttttttttttctttccagtttgtctatcttgtgtgtgtgcgtggcggagggagataaggtctggctctgttgcccaggctggagtgcagtggcacgatcacagctcactacagccttgacctcctgggctcaagtgatcctcacactttagcctcctgagtagctaggaccacagatactcaccaccacacctcctagctaatttttttttatttgtttgtagagacagggtctcactatgttgcccaggctggtctggaactcctggcctcaaggggtcgtcccaactcgcccctgccgggattgcgggcatgagccaccacaccggcctgcttttgtattcttgtatgtaactcttcactgcagctggagtgtgtctgggcttgtggagagaaaagaggagctcgctgccagggaggcacagaatgctgggctgtttggtaccccttctaactcctgaccgcttcttggaatcccagggctttctgagcagggccctgaaacatgctttcttgtaggaaactagggcagagggccaatttgacgaactgactttaaaaaattgttgattcaagagtagcaacttggctgggtgtagcggcttatgcctgtaatcccagcactttgggaggccgaggctggtggatcacttgagctcaggagttcaagaccagcctggccaacatgatgaaaccccatctctaataaaaatacaaaaattggcggggtgtggtggcacacacctgtagtcccagctacttgggaggctgaggcaggagaatcacttgatcccaggaggctaaggttacagtgagccaagatcacaccactgcactccagctgggatgacaaggttactgagactccatctaaaaaaagaaaaaaaaaagtagctactaatcacaaaaggacaaaaactttattattccacttataggaagtactttccatactcaagttcatagaggcagaagtagaattatggttcccaggggctgggggcggggcaacggcaagctgttgtttaatgaggaccgagcttccttttgggatgatgaaaaagttctggacacaaatgttggatggttgcatgacaatgtgaatgtacctaatgccactgaattgtacacttaaagatggctaaagtagtaaatcttgtgttttgtatactttaccacaaataaaagagcatagcctagaggtggaagagttcaaggaggcttcagccaccccatcatacatgatgtattgaaactcacaggggaccaggcaaggcagctcatgcctgtaatcccagcactttgggaagccaagacaggcagatcacttgagctcargagttyragaccagcctgggcaacatggtgaaacccagtctgtacaaaaaatattaatacaaaaacagctgggtgtggtggtgggcacctgtggtctcagctcctcagggtgctggtgtgggaggaccgcttgagctcaggcagtcaagactgcagttagccgagattgtgccactgcactccagcctgggcaacacagatagaccccacctcaaaaaagaaaagaaagaaagaaaagaaacttacaaggacctggcagactactgtgtcatcagtgggtgggatccttatgagcttctgcctggggacagtcggcctcgggccttttgttgctgctgctggctgggtggcctttcccttttttttgagatgcagtcttgctctgtcgccaggctggagtgcagtggcgggatctcggctcactgcaccctcagcctcccgggttcaagcgattctcctccctcagcctcccaagtagctgggactacaggtgcccaccaccacgcccagctaatttttgtatttttagtagaaatggggtttcaccatgttgcccaggatggtctcgatctctcgaccttgtgatctgcccgctttggcctcccaaagtgctgggattacaggcatgagccaccacgcccggccggtctttcccttctctgcacctcgcttccacctgctggaaacactctaagtggatggttttattgtccccattttgtggatgaggaaactaaagttcacagggtcaactgtctggctccaggtccctgggccagttagtggcagagccagaggtgagcccaggggtctgaccctacagccctggcacctccttcatggacccccttctttcttctccaaccagtttgaccttgaaactgaccatggaggctgcctgccaagacttgcccaggatccctcaccttactgagcacttgctccatgctggacatggtcaagagcccctcacacaccttgtgtaactctcaccacatcgctaaggctaaggatggttttgcccattttgcagatgcagagaaatggcagtcagtgttccactagagaaacagaaccagtaagaggtaggaaggtagacagatggccaacatacctaggaaaattgacttatgtgatggtgaggctggctaagcagctgaaactcagataggagcagacaccacagcccacaggtgaagttcttttttttttttttttttttgagacagggtctcactttgtgggtggcccaggctggagtgcagtagtgtgattacagctcactacagcctccacctcctgggctcaarccatcctcctgcttcagcctcccaagtagccaggaccacaggtgcacaccaccatacccagctaatttttgttgtttttgtagagatgaggtcttgccatgttgcccaggctggtcttgaactactgggctcaagcgctttgcccgcgttgggcccccaaagtgctgggactacaggtgtgagccacctgggctggccaccagttctgttcttaaggcctttcaaccaattggatcggtcccacccaggttgtctaggatactctcttttatgtaaaatcaactgatatagaatgttaatcacatctacaaaatactttcacagaccagcctgggcgacatagtaagaccccatctctacaaaattttaaaaaatcagccgggggtggtaatgagtgcctggcaggtccagctactcaggaggctaaggcaggaggattgcctacaactgaccattacagtgggctcaggttaattagctcttagctcacccgaggtcccagtcaccaggcctttgcagcttttcttcctttttttttttgagatggaatcttgctctgtcacacaggctgtagtgcaatggtgcgatctcggctcactgcaacctctgcctcctgggttcaagcaattctcctgcctcagcctcccgagtagctgggattacaggcgcccgccaccaygcccagctaatttttgtatttttagtagagacgaggtttcaccatcttggccaggctggtcttgaactcctggccttgtgatccacccgcstccgcctcccaaagtgctgggattacaggcgtgagccaccgcgcctggccctttgcaggttttcamatcttctttccgacaacgagagcgacatggttggaaaagcatcagccttgggagcaagcggcactgggttcgaatcactgccctgccacttactctctcagtgaccctggacagatcacttctgtaggggtccccagctcctctgtagagtcgggtggggctgtgggggaaggtcagagggagcctgcatgkaccctgggwgcccacccgcaggggcctctgactcctccttcttcctgtgctgagtgtctctgtccccagacccatgatgatggctctttcttgcctctgccaccagcaacatgaagctgcactacaagagggagaagccactccagcccgtggtatggtaaggagactggcatttcctcttttgtggccgtgagggtggtggctctcctccayyactggtccttcttggttgcaggtcacagtaccctcagcccaagctgctggagcacaggtaggtgtcatggagaggcctgatgggggcgggggaaaaggacaaaagagctctgatttataaggtggggtagtggaggtgctaacatcagggtggccttggggcccagagagttagggactgtggaaagacacagggctgggagtcagggacctgggctgtgtgaccctgggcagcgtacccaactgctctgagctttttctgtgcaggtggatagtagtgcctagctcactggagtttggaggagcagatgagaggtattgtaacatctgcaccgtgcttgcactcaggaggtgctcaggccattgttcataacaacgtggtcttgccctttttaatgaccctcatttattaggggcttggcacayatgaataatgccaggcttctccttggtgtgcgttaaytcctggtactcccaaccctgctgggaggtggctatcattatccccactttccatatgaggaaagggaggcccagagatggggacgaagctgccccgggtcacacagtgtgagagccagggctgggatgagacttaggctttcacaggggagggtctcagtgcccacggcccccctgctgccaggcccacacagcygctgacactcacaccctggttggcgcccatcgtctccgagggaaccttcaacccagagcttctgcagcacatctaccagccactgaacctgaccattggggtcacggtgtttgcygtggggaagtgagtagtgggctggggaakgggagggaggtctccctgagccacaggagtttatagttgggaagagaccagaccagacgtgcacacaggaccctgctgggcacccrggaggctcggaaccaggtgccaagcagatagaaagtacagtgtagggtgtgatagtgggatgggagcttcctggagtaggggatctggctctagcatagacaggatgcagagtccaggtgaggggacagcaggagcctttgtcaggaggcccccttgcccctccctgtttcatctagacccctcctctgcccttgtctctcccatgaccccacctggccttcctttaggagctgccgcttggcagccttcctctgggcctctgggactccttcctggaacttcctggggccctaaagcatgaccagatgatgaatggtccacctagggtcaggtgacccccttgtccaatgagttttggcctgggggcagggctgtgtcaaccacacccccctccatgcccccagcatctagctcaacttgccttcccttgattcgtccacttacctgcttcttcactactttcttctctgtgatcctcaatgttcctgcctgtaaaatgggcatgcttatgcagatcaaagatcataagaattcttagaacgtcgctgggcacttagaaattgctcagtaaaagttcacctggcctaggagcataagaatctctaccaggaacatgctyacaacagccgtaagaggctggtactagcattttgggaattggacaaatgargacccagagggccagagcagagtgacatcttgagatggggagctggtaagtggaccccagcctggctgaccccagcacacagtggggaccctggcaggctgctggtgtagcagtgggtgaccgggtgatcatcactaggtamactcatttcatccagtccttcctggagtcagccgaggagttcttcatgcgtgggtaccgggtgcactactacatcttcactgacaaccctgcagccgttcccggggtcccgctgggtccccaccggcttctcagctccatccccatccagggtcactcccactgggaggaracatccatgcgccggatggagaccatcagccagcacattgctaagagggctcaccgggaggtggactacctcttctgccttgatgtggacatggtgtttcggaacccgtggggccctgagaccttgggagacctggtggctgccattcacccaagctactaygccgttccccgccagcmgttcccctatgagcgcaggcgtgtttccactgcctttgtggcagacagcgaaggggacttctattatggtggggcagtcttcggggggcaggtggccagggtatatgagtttactaggggctgccacatggccatcctggcggacaaggccaatggywtcatggctgcctggcgggaggaaagccacctgaaccgtcacttcatctcaaacaagccgtccaaggtgctgtcccccgagtacctctgggaygacaggaagccccagccacccagcctgaagctgatccgcttttctacactggacaaggatatcagctgcctgaggagctgaccacggagctgggggttgccatggatggggacccaaagacctgcagccaccagtgcttcactagcgtgcagaccagccctgtcccgcctccctgtcagtcaggcgaattcaaccggaaaagggacgtggaaaggccactgtgaactgcagagggctgtgcacacagtagcacacaggatctcacagtaacgcggcatgggaacagtgagacagggggaggggaggcgcagttacaaaggcagggcccggcaggcttgccacgttctgcagccgtgcctttgcggggcaggctctgaagcctcagcccgactcagagtgcctgaaccctgccgcgccagtcccccgtttattgcatattgcccttaacgtagcatttctaataccctggtgtgaaggcgccctagaccccttttctctggtcacaggggtcctgggtcctttgatgtctcccaaccacatgtagccaattcctcactcaggcccccagagtgagcctttgaaatggaacaggtctaggctccctcggtttcctgcaccccaaagtgagccgcactctcaggggactagccacctccttcttaagagggtttggggcagtttataataaagggggcgtgtgctcaaccctagctagggtgattttttttgttttgtttttgttttttttgagaccgagtttcgctcttgtcacccaggctggagttcagtggcgtgatcttggctcactgcaacctctggctcccaggttcaagcgattctcctgcctcagactcccaagtagctgggattacaggtgcccgccacacccagttaatttttgtatttttagtagagacggggtttcaccgtgttggccaggcttgtctcaaactcctggcctcaagtgatccacctgcctcgacctcccaaagtgctgggattacaggtgtgagccactgtgcccggccactaaggtggtttttacctgcacatccagcctgcctgtgtccccagtgtctgttccatcaggcagtggggacacaggcagactggaagtcaaacacaatcgaatagggatatagttactccagaaaatctgagctaaagctagaggctacaacggacaggatttcattccagttctccagggagactgggtgaagtggagcatgctggcagagccaccacactcccaactgtgtagaggggtatggagcccagcagccggacaaccctgggagctcccgtatccagggtcactgcagccctgtgaggtcaccagtgggcgtgggactctgagccaatggtgcaggccaggattagagggcatgggaagatgacctctccagtctggatccagaaggacttcagaggcctacagtgtggttctgtctgcctggccacgcagagatggggtggggtatgggttcagggcttggcggcctggtgctcaccgccctggagacagcagcatctttttcatggaaggagaagacagaaaggagggtggggtagactctggtcatactggaacgggcaggcacccacccacttggtcacccgtggaaaagctggggccagccctgagttcattcttccttcacctgtggtttggctggcgagcagggacagacccgaagagcgtggacagatggagtgaccagttggaggagacagactgggctggagaggcctggagtcttgaaggggcactgagtgcctcctgggcagaggggcaggaatggaaccatggcctctgtgtccctcatagggagcacctgctccaggggaggggttctgtgctgaaggagtaggccctgcctccgaggagcttctgttgaaagcacagagagggccatggagcgctggactcagctgggtggatggctgggagatgggggacctgaggtgacagcagactctgaggcctgggcagctccacctagcaggggagaagtcccccatacccccctcaccccacttacacccagctttacccctggcacaccctcccgggtgggagtccctgactcattttcagtagaggaaactgagactctgagaggtcaccatgagcttgcctgtgatgtggctcagctgcaggtttgaacccaggtcatctgggttcaagactgtgctctgcacagggtgggaggagtgcagctctgaaggtgagtgcattgtggaggaggatacagggaggggcagtgctggcagggggctctgagaggggcaggggcttgatggggtccctgggtcaggatggccccaggaggctagagttggggtatagggaccaggtcacacagggttctgaatgccaggctaggaggcaggggtcaccgcaggcctgtcccagcagggggatcaatatatatggggcccaagcgctggactcaggggatacctggccagcgaggccccaacacaggatgaggcctctgatgaccagctcggggatgagtgacggggaagagccatgaagtgggggtcaccacgcacagcagggcctggccacttacagctgagtggcctgcagtgctggtgccttggctctggtataaaattgaatgaagccgggcacagtggctcacgcctgtaattgcggcactttgggaggccaaggcaggaggatctctggagcccaagagttccaaaccagcctgggcaacatagtgagacttcatctctacatagtttttttaaaaataaaaaaggccgggcacagtggctcacgcctgtaatcccagcactttgggaggccaaggtgggcagattacgaggtcagaagttccagaccagcctggccaacatagtgaaaccccgcctctactaaaaatacaaaaattagccgggtgtgatggcacatgcctgtagtcccagctactcgggaggctgagacgggagaatcacttgaacctgggaggtggaggttgcagtgagctgagactgtgccattgcactccagtctgggtgacagagtgagactctgtctcaaaaaaataaaataaataaataaatcaaaagggttggccaggcaaagtggctcacgcctgtaatcccaacactttgggaggccgaggagggcagatcacctgaggtcagaagttcgagaccagcctggccaatatggtgaaactctgtctctactaaaaacacaaaaattagtcgggcgtggtggtggcagcgtgcacctgtaatcccagctacttgggaggctgagacaggagaatcgcttgaacccaggaggcagaggttgcaataagccgtgatctagccactgcattccagcctggtcgacaagaaggagactgcggctggtgcagtggctcatgcctgtaatcccagcactttgggaggccaaggtgggaggatcacctgacgtctggagtttgagaccagcctggccaacatggtgaaaccccatctctactaaaaatacaaaattagccgggcgtggtggcaggtgcctgtaatcccagctactcaggaggctgaggcaggagaattgcttgaacctgggacgtggaggttgcagtgagccgagatcgcgccattgcactccagcctgggggacaagagtgagacttcgtctcaaaaaacaaacaaacgagactccatctcaaaaacaaaagtaaataaaaaataaaaagggacgaaatcagttagccctaataacactgactacccccaacagtcgctcaaccccagtgtgaggcctccttcccccaggctcccttgagccccatcttacaccagctgaagctgcagctggaccttgtggtcccgggtgctgtcagggaagacaaggagggaggtggggaagaggaggggaaggggagacctgactttctccctgcccaggctgagttcgctgtcacctcgggtcccccagctcccagccatccgccgagccgagtccagcaggtggcatcggggtgctgggcgccagggtgaacgtgtatatttggtgacgccggcgcgccgactcagcggcccccgcctggctggggcgaggttggccctaggtcctagcggggtggggagtactgagcaggcggctggggcggacggacacgtgagatcggccgcacatggcgctgggagcgtggcgcgtgcgcgcggcgaagcggagtgacgtgcacgcgctgtctgcggtcccgcgcaggccccgtgtgcgcgcccggccttggacaacaggcccggctgccccgcggggggaacacccgcgtcggcccgcgggagggaggcctgagcgcgcccccgagcgcgtccccgagctcacgcggcggggcgcgcccctcgcacctgcgggcgggctggggcggggccgcggctgtccccgcccacccgggcccgagcccggggagccggggcggaaccgagcggcgaggcccgagcggccggagcgcggcgcggcgcagacaatgggagcggcgctggcggctgccggggcggccccgagggccgcagagtcctgggcccggcggggaccggaggccgcgccatgagccccgcagccgggcgcacccctgcgccgcgcgcgggcccaggcgagcggcctctgcgagccccgggtcccgccctggggccggcgatgtgccaccgaggctgaggatgatggtagattgccaggtgagtgcgcgccgtccccagcctcgcgtcgcgggtggagggaggaccgtatgccccagcccacacccaccggggggagggagcccggcgccgcgtccacgctgagcgtgcgcttacgcagctccgcgtccaaccccgcccgggacagtagggaaactgaggacaggagaggggcagggactcgcccggggcacacgaagttggcggagtccagagatgaagggagggttccggcctcttaggccaggaagggctcggctcacccttcccgtggggtttgctttgggaatgacagcctctaagatcctggggacccctgcccatctcccatgtgggctcatttgcctgggcttctccgcgcacgtacaggcgcaggcctgcgcatacatgctcacacacacgcagacacacacaccacacacttcctggggctcagagtaggacgggacgctggggaagtgactgggggaaagaagaaagagggcgggggctactctgccacgggcaggggcatccagtacccagcaacatgcctggggccatggcacggggtggggggcaaggggaggacacgccagcttgatgggcggggattctccaaggttcccaggatctgtctgggctggggcagcctggagaggacagattgtggggttctgtgttcaccgctgtgatcacctggaagcaggaaaagaccccttcagtgtggacggggctgtaggaaaggaagcctcaaattcctgctctataaattggaatgtttggcctgggtgactccaagggtcccacaggctcgtagacgtgtctgtcggccttaggtctccactggggatgcccccactacccaccgaggtctgtggaaaatgccttcttcttggaggttcttctgagcaagagaagccgggggggctgaagggctgagggcctggggtggtgcagagcgtggccaagcactggacaactcttgtgggacaagactgtccttgttggagcctcagggttcttatttggaagtggggccagagccgttgccctggttggagtgaggaggcctcacgagtgaactggacaccccaggaccagcagagggaaagaggggagcaaatgaagcttctgaggckccttgaattacccctggagcctgcaggttctgctcctttgaccccctgggactcaggagagctgctaccttgacaacacccaaacaaaggtgtgtgttttgttttctgggttttctgcctgaggctgctgctgctgtgctagtgccggccaccagggggaggcagtgcccactgtactcattggagcaactggagtcagggagagcccggcagggtccctctgggggaccccggcctctacccaatgcacaccccccattactagcatccctctccacaatgttagctgctcagaggcgggagggggctccaagagcttcctctttcccttcagcaggtgtgcccaagcactcaccctgggttgtgggggggcagcgttgggcttgggygtggctctgaaagtgacccaggggggcctgccctccagagctggcagtctggagggggcgatggacagggcacaaaagcaaacaggcacagaaaggaaaaagcagtgctgcagcgaaaataatgccggggctgccatggagggctggggcctgctgggtggggatctgagaggtctcgctaaggggacatctgtgctgtgaccagaagacaaagcatgggccagccctgcacgagtctggacagtgtgatggagaaggctcagcaggcagggctgggaggcagaaatgagtttggccagagaggagtgagaaaggaggccagtgtggcccaagtgagctgggggtgggaggggcagcccaggggcctgtggacagctatgtgacaacactaccctaatgtacagcttccagcaacagacattgatcatcacacagtttctgtggacccagatccagggcagctcagctgg

SEQ ID NO: 95516 - DNA, 88704 bp, Homo sapiens
aataaaagtcacttgaatgagtttaaatgttcaagcctagaggaattaccctccaggacacagaaagcacttggaagacattaactcagaaccacttactacatcctagatgaagtctggacaactggggatgtatcagaaaatcagagtgcaacaaagagttaaaaaatatcccccatggctgggcatggtggctcacacctgtactcccagcactttgggaggccgaggtaggtggatcactggagaccaggagtttgagaccagcctgggcaacatagtgaggccccatctctactaaaaatagcaaaaaattagccaggcgtggtggtgggcacccataaccccagctacttgggaggctgaggcaggagaactgcttgaatctgggaggcagaggttgaagtgagccgagattgcgccactgcactccagcctgggtgatggagccaggctttgcaaaaaaaaaaaaaaaaatcccccaaatggtacataaataacaaaaactacagaccattaagcctaacagaaaattcctcaatgtattaacaaatgaatagtttgtgcagacaggagtgatgattagaaacaagcaaaggatggctgggcgtggtggctcacgcctgtaatcccagcactttgggaggctgaggtgggcggatcatgaggtcaggagatcgagaccatcctggctaacacggtgaaactccgtctctactaaaaatacaaaaaaattagccgggcatggtggtgggtgcctgtagtcccagcgactcaggaggctgaggaaggagaatggcatgaacccgggaggtggagcctgcagtgagccaagatggcaccactgcactccagcctgggcaacagagcaaaactccatctcaaaaaaaaaaaaaaaaaaaaaaaagggtaactggaatagtctattcttattctcttttctgctaaaattgctagatgacataatagataagcaaataaaatgaaatgtaaatagaaaattgtccacaaaatagagaactaacttttcctacagtgtgtttcacagtacactactccctttaattgtcccttgaaaaatagttctatggccaaacaagctttggaaatactatatttatatgtcgttctcccttgaaaagtgacacgaggacactaaatgcctcggccagggaactactataaagacctactgagccacaggaagccaaacttttttgcctttttaaacaacagagccttttttttggaggtgagggaggcagttattaccctttattatccaaaagtatgtggaatactttgggaatggtgttttaggcagtgtatcttgattttaggaaggcattttaaagtagtctcttggatacactatgaaacttgctggagaatcatagactgaaaatgccaattaaatgaggtgtaggtggctggcttggaaataaaacaatgctaatcaaagcccggtgctttctacaggcagatgaaatttgtgagatgacataatgaagcacaacataataactgaaaatctgtgctatgacgccagactacctgggttcaaatgctggctctgctacataccagctctgtgtgcgcaaattgcttaaaccttctgaccttaatttcctcatttataaatgagactaatacatgtcccagaaagttaggaaggttaaataagtcaatatatcaaagcatatattaagcgctcaataaagttacctatgataattgttaatatactctgaggactaagttaaaaaaaaaacttttgagattcctctctgtcaccctggctgcagtgcagctggcgtgactacagctcactgccgcctcaacctcccggggtcaagtgatcctttcacctcagcctcctgagtagctaggaccacaggtgcacaccaccatgcctggctaatttttaaaattttttgtagagatgcggtctctctctgttgcccaggctggtctttaactcctgggctcaagcgatcctccggccttggccttccaaagtgttgggattacaggtgtgagccacagcactcagccttaagtaaatgttaataagatatttaatgctaataaaagtatgcaaaaatgcaaggtagacataaagttgtgtaccaaatgaaaggtagatataaaattgttcatcaaatcctttaatactgtgaactaagcaatactccttagaataggttaaatttgctacaaataaaagctactgtagaagtaaactcacaggattggtaacccaaagcagcagcacgggatgaaataaaggaagcttaagcaacccttggtcctactcattgtgggaagaattcttgacaggatggagagcagtacagatcttgactggtaggaaaaagtcttagggttttgtgtagcaatttctgacatatgtttcaactagactactgaacctccctccaactctccctatcacaaaactgttaacaaatcaagtattcagatgcccaaggagtatacttaaaaagtccagctcccagaggcctgcccgcagccaatcatttaattgtacaccatccagtttccagttgaccactattaggttggtgcaaaagtaattgcggttttcaccatcacttttaatggcaaatacttttaatactaactgttaggcattttgtaagcacctgacaaaaattcacttgaagcttttagacagtaagcttcttgaggacaggtaatagagtccaaagacaggcaacagttatttaacttaatgtagcagatgaagttaatactttctaaggctcctaacaattgatgcacaatacaattcggtacacaaatattatcagaatttggaactatacacaaatgtctcactagatgagtcactaaatcagtagtccaatgggaaaaacaattctgacattcttaaatcactatttcattgcttttcagatttatactgtccacctttatatcatacaatcttataaaacagctgataattaatgtctgaactattacataactgcagattttcctgcaaattcataatctaaataacagaattatagagcaaaagcttcaaaggtgtttagtacctagctttctaacagtgctacactaaaactgtcatctgcgctgcagactgtccaccatttaggttagygcgaaggcatgctgcacggcaccgagcagatttaaatccacagactgccaatgggtggagtcatcaaagtgctgacacagacttctttacattcctaccgtcacaccagttttaacccacagagggctcttgtagaactgcagggtcaactcagcattcattcacttcaatcagtctaaaaagactgctaaatgactgatggtttatgtgatgtgcatattaaaaaaaaaacaacagtacagaaggggaagatgttactaattaatttcatagaagccatttgtcaactataagagagctatataaggatttcctgttactagttagcagttgtggtaaatgttaactgaggcaaaatgacagtcaaaattttatcagaatactcatgtccacaaccacgacattaatccagactcctactccttcatacctgtataactgcattatattttctttctttttttttgagacggagtctggctctgtcgcccaggctggagtacagtggcgcaatcttggctcatagcaagctccgcctcccggattcacgccattctcctgcctcagcctcccagtagctaggactacaggcgcccgccaccacgcccggctaattttttgtatttttagtagaaacggggtttcactgtgttagccaggatggtctcgatctcctgacctcgtgatccgctcgcctcggcctcccaaagtgctgggattacaggcgtgagccaccgcgcccggcccaactcattatattttcaccttgagcatttacagcgtgccaagaactgggccaagtgattatgtgtgtttaatcttccaaaaaacctaaacaacgcttcattatcccccttttatagataggcctatcttgtgccaaagcccagtctcttcacttttattttacactgatcacaacaatcatcttcttgcctctatccagtaatgttcctgaaccacagcaggtcactctatgctaatgaaactgtaacagcatcttaaagacttcctagattgaagccaacttcctcataccgaccttccaagtccacaaactggtctcatcttactttctcggactctctagaagacctacttgagctcatgtactgatccgtcattatacaaacaataattaattatgttcatgacttaaacgtgtatgcacatgggatgaatgcctcattcctgccgcctggaatgccctttccttccttcctcttacaaaccaaacactaccttctttaggactgctgcagattcaccaccagatgacctgccccataagtctctccccttactactccctcctttctttacattctctctgctaaggtattcgatgtctactatactgacatacatactttccttgagttgctgtgcggatgaacatccttggaaacagttaagttcctttacagcagaagatacaccttttaaatcacctttcttctgcctccctccttttgtatttctcaatttcatagggttgcatctgtctatctgatttgtttacacttgaacaaatgtgttcatatcttcttcaagaagatcttagaggaagcttagtcatacaagctgactaacaatctaacaacagaaagatgtttgaaacttgaattaagtatgctacaaagtgatgagggttatctgcaccctacctatagctaatgactcatattttcaatggttttccaaaataagagtttacgaacacataaacatgttctctatgtgcggatacacatctttacagtgcttatcactacctgacaggaccttatcatttgtgcttgacttgccaaagaatgtaagcttcatgagggcaggggttctgttttgtacactgctttatttccagaacatggggcagcaccaagcagaatggtattcaaatatctattgaatgtatgaatatacactgacagttcacatgtaagcgtacacctctatcaaggatatatggaaagtttttacacctctaagcaactaaaaggaacgctatggcttactacttgaccttgcgcttgaagtttaagataggcagttgtttcgaatctttattttcattcaacatcccaaagatgtttagctagtaaagaaaaactaaagtacaaaccccgagatccagtatttacccgtttgcccaaggagaggcgaggaccattcataataaagtcactgaaacaattaagacaatggatgggaccagtttttcttttctgaagctaaagaggcgcgagaggaggacacacacagtagacaaagccagccaagaacctcggaaagtcggccccaaacaatagcagcaacgacagaggcaggccccgggttggatctacagggggtggagtctcagaaagcaccatcgagtaacccgctccatgtgcgggcccgacggaggggcgaaggaggggttcctgggactcaactccgggaagccccctgggtgtgtacctgtgtttgcggcggcgggtgacctggggaaacagggtgcagacagctgcagagcttttctttttttttttttaagctgtggtaaccctggctgcttaataaatccccagcgctcggtgcgaagagggaaatccccggacagagtgtgggatcggattcccctgggacggatgatgcggccgcgagagggggacaggggaagaccccagggatggcgggggatgacttactttgaggagacagctgttgagcggtgcgggcaccgaggtgcggtggataaccaggtcctggcccgggttgtgcacgtcgcagatgagctccagcacagcgatgctgcgggccgtggacacagacacgcggtggtcctcggaccaagccagcggttccaggccgctcaccgcatactgcagcttcacggccggctcccgccgagtcaccatgaggcggaatgcagcgctgggccccggggccgcgtccgctgctggctccttcccgcccgcctcgccgcccccctctccctcctcctccccagacggcgcaggcccgtcgtccgcgggccccacccgggcctggtcggccgtgttcatcttctctcaggtgcagaggtcggacgccctggcgctccacgcagtcgcgcgaccacctcccggaccgccgccgccacccccagcgccctccgcggcggttttctcccctcaggccccgagcgccgccgagccaagaaggaccccgccgttgccagrcaacgcggccctaccaggtggccaaggaactgcctgtccagaaaaaggacagcgagcggggagccccgaggacccccttttccctgcccagggattgagctccagagcctgttagggagctacccagacaggctttagttcctaaagtgctgaggaaacgcacggggcggtaaaggggaggctcgtcggtgagatggcgccggatctcgcttctcagaggcattcagagagcttccccagcgtgaactctcggccgaatgtaattttgccaggccgcgagggacgcagaraggggctgccaccaggcgggggcacgcgcggtagtcttgtccctacccgcccggtgccgccgtccccggctcccctcgggacgagtccgtacagctggagccgttccggacccggaaggggcggtggcgcagggtcctcgcgcgtcccacgtggggtcccgggcccagcagtctgcgcaccgggctcgctgctgcaccacgcgtcacccacgcagaccatggcagccgccgacggttcgctcttcgacaaccccaggacgttctccagacgtcccccagcccaggcgagtcgggtgagttctgacccggcttcagctccgtccccacccgcggcccggctgtgggcgcgccgcgagctgcagccgtgccttggagtcgggtttcragtcattcacggagttaagcgggagaaagacaccgggcagcttcgggacaagttgcgccgaaasacgtgtctctaaccggaacaccacccgcagggatgcgcctggragcggggagtggagcggtgtggaggggcggggagctggctcctgcgcctagaaaagtaaaggaaggaattagaggctgtttcccgtggaaggtaggacctgaagttccggcgcaagtcccaggccaaagcttaacttctctaagccagtttcctcgactgagtgcggactaagctctgatttttttttttatcttgcccacattcctgtctgggaagagtcatgccctacaaaccataaattctcatcagatggctttcatttaaccctatatatcgtgacttactttccaaactggctctggcctaacattatgtgacaaagaagaaagttaaaatattacccctaaacatgtttctttgccacattttgaaatggctttgcaaagctgttctttggggggggcgggcggggtggacatttgcatctgcaaagaatctctattaacatagctagatctttttcttccaggccctcccaatcctaaagagattaagagtctaccacctttcaaagatctgaataggaaacacttgtctgttgtctctaagggcagccactaaagacttgaaaagaaccttggtctccacaatcttttatcttaacctgagcattttctttgtatccatcccaggtgtttagacaaactcaaccgtcaactagaaaatgtttaaatttacctatagcctggaagcccccgctttgagttgtcccacctttctggacaaaaccagtgtatttctgaaatgtatttgatgtctcatgcctctctagaatgtataaaaccaagccgcggccgggcgcggtggctcacgcctgtaatcccagcactttgggaggccgaggcaggcggatcacgaggtcaggagatcgagaccatcctggctaacaagatgaaacccccgtctctactaaaaatacaaaaaattagctgrgcgtggtggtgggcgcctgtagtcccagctactcgggaggctgaggcaggagaatggcgtgaacccaggaggcggagcttgcagtgagccgagatcrygccattgcactccagcctgggcaacagaacgagactccgtctcaaaaaaaaaaaaaaagctgcaccccgaccaccttgggcacatgttctcaggacctctcgagggctggatcatgggccatggtcactcatacttggctcagaataagtctcttcagatatttttgagtttaactcttttggtcgccatgaggaaggttcgtttgtttcaggaatgaggactggcaactaggagtttttttgaagagctttcaaaaatgggacagattttcatccccatgcaatggagggggataggaaaatcggtttcattgatataatcccattgctagagaggggtaagatgccctagaattaacttaagcagtaactgaaaactggtttctaggatagttgatttgtctcttagaaaagaggactacaggacagaaagactgattaaaatcataaagtgatcatcaaactttaggatttagatgtttggcagtaaggagtccagctagccaagtgtagctgcatctgggtggagcggggagaaggatagaagagccactgggagcatgggatttggaataggatacacttgggattcggatgctgcccttgctgcacactagctctgtgaccttggagcaagtcacttaatctttctgattctcacttttcctatctataaaatgagaacaataatttctactccatagaagactattgtaaggattcattgagatagtatacatgaagactatacgttgtctggcccatagaagcacttaataaatgccaacagtataaagtagttttggctccattttggataatagattgctacatcaggaggtcagtggggtgcttgtgtcctctgcagagcctggtaactaacacataagaagcattgagtaaatacatataggctacctagttttatggttatcaaaaggggattaattaatgcagtgatgacaggtgtctgcggtggccttgtctagatctacgttttttgttttgttttgttttgtttttttgagatggagtctcgctctgtctcccaggctggagtgcagtggcgcgatctctgctcactgcaagctctgcctcctgagttcacaccattctcctgcctcagcctcttgagtagctgggactacaggtgcccaccaccacacccggctaatttttttgaatttttaatagagatggggtttcactgtgtgttagccaggatggtctccatctcccgaccttgtgatctgcccacctcggcctcccacagtgctgggattacaggcgtgagccagccaggcctagatctacattttcrttgatgtcgtgaatgagaatgatggatatgctgatgagacttgccagtagcctgaacttgagatgggtagctaatatactggatttagaaagactaacagcttaaattatgctgtatctaacactatgcagaaattttctctctaaaaatactttctgggctgggcgaggtggctcacacctgtaatctcatcactttgggaggccgaggcaggcagatcacttgaggtcaggagttggagaccagcctggccaacacggtgaaaccccatctctactaaaaatacaaaaaaaaggcttggcgcagtggctcacgcctgtaatcccagcactttgggaggccgaggccggtggatcacgaggtcaggagatcgagaccatcctggctaacacagtgaaaccccgtctctattaaaaatacaaaaaattagccgggtgtggtggctggtggtgggtgactatagtccaagccactcgggaggctgaggcaggacaatgctgtgaacccaggaggcggagcttgcagtgagccgagattgcgccactgcactccagcctgggcgacagagcgagactctgtctcaaaaaaaaaaaamaaaaacaaaaaacaaacacaaaaatagctgggtgtggtggtgggtgcctgtgatcccagccactcgggaggctgaggcacgagaatcacttgaacccrggaaccagtggaggttgcagtgagcagagatcactgcactccagctggggtgacagtgtgagactgtctcaaaacaaaagcaaaacaaaaaaaaatttctgatattaatacaaatttattatagaaaattaggaaaaaagatttttaaaaacccactcataattgccatactcagacaatgcttgttgccattttggtgtatgtccttttagagaacaactcaaaattggaatcactacacatgatgttttcttttttttttttaacttatcaaaaattaagaattattatgaagctctrtttcttcagacagtctggaataaggtgcaaaactgtacaaattgaccagcaaaggagaaaagagagcccagaagcagaccaatacaaaaatggaaattttattcatgaccgagatgacactgcaaattgcttaggaaaagctgacatttttaataagtggcactggaacaattggttgtgtggttgtgtgaatttaaaaactgaaattggaaccttatctcgcactatgtataaaaaaccaaatccatgtggattaagactatacaaggcaaaactataatgttgagcagaaagagtaagtttccagcatacacatgttttctaaagcaaagaggatgcagttaataaaagggattatagtattgttgtgaggcctctagaatgtagaatcatgatgcctggggaaagcctggttccttcagtgattctgggacaaattacgtcacatctctgcctccatgtttgcatcttaaaatgagatgataacagtacctgtgttgataaatgagagaatacatgtgagtacttagtatactccttggcatatagtaactactcagtatgtttattaatatcaaagccatggcatcttagactctcaggtcttgatgggccctagaggtcatctgccaaaatcccctcattttacaggtgcggcaacagagactcaaacgaattttttagtagatttttagtagattttagatttttagtagtaatttttagtagattcagatatgtccttgctccctctctgctcagaggctacctcacgaagcattcttggttttcttgcctccctctcctttgccagaaggaggccatgttagtctagcttttgttggtgctctcatagccttttttatgtacctcttctgtagcaccaatgtagaggttggatttatgcctttatacttttgtctcctctgctagtgtgtaacttcctcaagggcttggcaaatctactttgtatcttcagaacgaagcttcttgacaactgctaaatgaatgtgttttggatgctgggggagaaaagctaacaagtagtagaaccgtatccagctggtggaaagggataattccattgtgtgttattcattcatcttacaagtatttgttgagtgcttactctgccagacaggggcctatacaggggatacagtgctatgtaggacagactggcccctttcttgtggagcttacaatctaacgggaaagacagacataaaacaacgagttccgtgctatgcttattattttgtcgaatgctatggaggagaatacgggtgccaggagagccaagaacagagcaccttggcttgactgggtgaagagaggtcaggaaaggctcttctgaggaaggagttggtcagcctccatctgaaggatgagtacagggtggccagccagagggcagagtggagtcctggatgtgggagtagcatgtgcaaaggaggaggaaggagcacagcacattctaggaactgaaggaagacccgagtggcagagagtaaagctgaagctggtgaggtggccagaggtcagattctagaaggctttgttgatcatattacagtttttttttttttttttttttgagcgagggtcttactctgtcacccaggctggagagcagtggcatcatggcgtcatcacgactcaatccagccttgacctcccgggctcaggtgatgcccccaacttagcctccaggtagctgggactacagacatgcaccaccatgcccagctaatttttgtatttttttgtagagacagggtttcaccatattgcccaggctggtctcgaactcctggcctcaagcaatcagctcacctcagcctcacaaagtgctgggattacaggcatgatccatggcacctggcaatattacagattttttagttyagcctaagagcaatggaaaacctaatgggtttaactctgagtacttgcttttagagagatgttgacataggaataaagggtgaccaagatgataaaggatctaaagttgtgtcctgtttgaaatattgagtccaaagaagaaagaaaagagagttatgtgatatatgaaggaatgttatgtgttaagaggaagtaagcttgttctgtgttgctgcagaaagtatacctcagactattaggtagatgttcaaggatgcagatcttgcataaatgtcagagacagcttcctgattcctagaatgggtcatgaacagaatgggctgcctcatgggatgcaggaggtgtgcagggagaggctgccagtccacctgcccgggactgtcaggaagtccatgtatggcgggagtggcctttaagagtttttgtgctccaggagtcctgggtctgtaaatcaggtgaagtctgcacatttcatactgtcttgcaaatgattcaacaaacctgaaacttgatttcatctctttctttaatctgaaaattcataaacttgagattttgtaaaaaataaatttgtaagatggaatatgtccgtttttactttattaatattagatatttgaagttgtatttaattacttaggtaaaagaatccttagggaacaaagaactgttgttattggtaggttagtctgaagctgacagtcatggctaaagaaagccgacatgtaaaaccaagtcattatttcaagcaaagaggaaaataacatattctgagagaacccaaaactccagaataacaagcactggctactcaagggatgcttttatattcatttgtaaatcagaaaagaaggccaaagaaaatagaggaattggatgttccttctcctaggggaagtttggacatcatgcatttaagcacattcctgtaatggaaataagaagcaacaggcaagagatccctagtgctgtgtagcctgtaatcsgcaatcaggcagagactcggggactcagagactcgaaaggcaagggaggtaggaagtaattgtggtagaggtgatggatggagcagcattctcatttggaatgggaacagggcgtaggaattttctccaggccgtctgaatctggaggagcagcttgagaggagagaatgagagagatccaggcgctagggtagaatggtaatgaatgtttccgcttcctgggcacgggctgagatgcgcattccccctcgcccctctctcctgtgcggtctccagtgtgctttgttggtggagagaaaagattcgttttcccccacccctcttttctccttgggtgaatgggttcctaggaatatggattgacacacccttcacaaggtggattcttgcttcccttaaaacagactccattagttaacattcaactggaaaaatgctgcttcttcatccttaccttatcttgattgatttaacagttaagaatggctggtgaggtctggtagatgagtgagctgagacttttttcttttttcttttctttaccttttggaagaagctgagtcaaagagtctgattgcaaaccctaaactgttgcttgacatatggggcataatgatctctgcagggagagatgcaattctgtgggcagtcaggcttcactccgagctctgttttcatggactaatgcatctcttgttgatctttccttctgggaacaacgcagcaagcaaaggctacgaaaagaaaataccaagcrtccagtgaggctcccccagcgaaacggaggaacgaaacttcatttctcccagccaagaaaactagtgttaaagaaactcagaggacttttaaggggaacgcacaaaaaatgttttctccaaagaagcattcggttagcacaagtgatagaaaccaggaggagagacagtgcattaagacttcatcactgtttaaaaacaaccctgacattccagaactccacaggtatgtccaggggcggatgcccttcaggaagaaaaaaatgtgttctgccttttctttgttaatattggcactgatgcctgggttcttgttcatcatttgcagacctgtggtaaagcaggtgcaagaaaaagtgtttacttcagctgcttttcatgagctgggcctccacccacatttagtaagtacctttcagtgttttctgggtcagttttttttggtgtgtttgtccgttcagaaggtctgtgaaatggccgctctaggaggagagatcagagagtgtttgtttctgctctaagttacctraatgaactcagattgatatgatactcttctaggacagttcaagggtgcttaggttactgttcactgttttctggcccccccttcccccatcctctgtttttttgtgtttttgtgtgtgtgtttttttaagtattgaagacttwcctcgactaacgtgatttagggtcaggacatcacttgctaaacttaaaacagctccctatttactggatagttgtagtggtgaagccatttgtggtggcagatgtcacagtggccataggagagggaactgtgctggcatcttgctgttaaaggacgtccacagttttagagaagtaagggaagaagagtattttggtgtgtgttctacaaacaaatggacactttaaaggaaaaaaagtgagttctccagactcatgagtaagaagaaaaaaatatattaacttttaggcaggcttggtttcctctgcactttcggttacagcttactaccccttctgtagggtgggttacctaaacttgttttctcacctgsggggtggatcagggtttctcagccttggtgctgtggacattttggactaggtcagtcttagttttggggactgtcctgtgcactgtaggatgttcagcagcatcccaggcctctacccactagatgccagcagtgcccccctcccctggttataacaagcacaaatttttccagactttgccctgtgtccccagggagttagggcgggtggcagaatcgccccaagtagagakcaccacctgggtggaggaacttaatttgatcatagtagtcaatgttctctcaatagtttctcctttcttgtgtaatttccgttaaatattttgtatcraaatattaattaaagctttttcatctcctcttttagatttccacaataaatacggtcttaaaaatgtctagtatgaccaggtaagaacttcaggctcctcttgatttcttaggcattacgtgggtataaccggaygaaacctgtgtgtgcaaggcagagcaaatttgtgtcttggcgttggaacacagtgccaggttatcgaccataaagggttgtcgtctcacttagctactcattctctccacctgttaaatggaaagactggctttccatccagttctgcccttggctctgaaccgcaagagacgtctcatccagaaggtgggctgcatgagcgccgctgttttctgtgcttccctgaaaagaatttggccaaaatatagcatgtgaccatgtcgtttcttagtagtaagaattagggtcaaccaaaaagacaagagtaaatgttcagttggatagagtgggatactgaaaaaatgttttcaatgtttgttacagggaatgactcctggaaaataaagaagtaaaataggtgcgaggagatgagcttccttgttttgagtatttgtgcttctgtgcattttcataatgattttttacttttactagtaaaaattaataggaatattaaagtccaaattaagggacctccccacaagttttttatcaaccaaatttaagtgatttttgtgtctcttttgtttcttgttttaaaatacatgtgtagacacacatttcagcatgtmcataaccttttcctggagaatggacagctgctgctggctctctgaatagttggcragcttcctcctgctatcctgcatggaaacctttccattatgtttcgttgtgtttcatattcctgttagtgagggcaagagtgtgtgatacacttggtggtaactctgatttgttgtcatgcctgtttctttttctttttttttttttttttgagacggagttttgctcttgttgcccaggctggagtgcagtggtgcgatcttggctcactacaatctctgcctcccaggttcaagcgattctcctgcctcaacctcctgagtagctgggattacaagtgcgtgccatcactcccagctaattttttgtatttttagtagagatggggtttcatcatgttggccaggctggtcaaactccttacctcaggtgatccacccacctcagcttcccaaagtgcagggattacaggtgtgagccactgcagtcggctgcctgtcccatttttaaaagaattagtttaatagaatggccagtctctggtttgcctcaccattttcaggctaagttctaaaaatataactagggtttgatctttataatcatcaaaagtttcttcacacctttatttgaatgctttgatagcttctaaggaggcagttgccagatgaatccaagtgtgggcagttgccttttatgtatcctgcgtctctgccagtaactgggtaatataggtaaagtgtgttctttttttcgggtggcccagtgttcagaagcaaagtattcctgtgttgctggaaggcagagatgctctcgtgagatcccagacgggctcaggttagtctcatttcatctctgccctttttcatctgctcaggcccatggtcatgcactaggttttgccatgcggtgtctgggttggtggtggtggcagttttgtttcgtttgggggagggaggccatgcttttgattagagccctgaatgtgttcacataatgaaaggaaggggacagttgatggtaccacgatgagaaatgattaggaagtagtcaggttcggctataatttcctcagagcctatttcggggctttaccaaggtgtggtggccacagttgcccattctcactctagtggagaatgaatgtcttcttctggtgttaaacacagagtgatttctggcctgagcgtacactgatcagatgccagttgtgctcgaggacagaacactgtttctgccgtgttccaggccagtctggacttgcttttttgrccctcatgtgccctcagtgggcagtcagctatcctttactcccaccagctcggccaccattcagaaggctggatacccaaagtttttgccatctgttggtttctctgcaattagagattagctctagagtacagactggctcccaatcacatcagcactgcagagatgtaattgaccactgaagctcatctgagagggtagggaggacttcaaaggaggaattttctggctcctacagacagccatcaagttgagcttctgtgtaatttgggagacatatcgttatctcttgttagatgaataaaggaactgaagcttctagttttttagaagtactcattttacaaagcaaaattgggatttgtggcagacaggggaagtcccttttcacttctcttggatgtataatgggcagtttccctttccctagaatttagtactactggaagatagcagagcctgtttcctttacatcctttgcttttcttaaacatctgtagggtgtgtgattttaattgcttctgctttttttttgaaaggtaaaactcttgcctattgcatccctgtggtccagtcccttcaagcaatggagtcaaaaatacaggtgtgtatcaaatgtgtttttctgtcattgctcatagtgcataagcaaccatcaaactgaagcataacagaaatattaggactaaaagaatctgttttcactgagtatttttttcacctccttttaatttatttattgcataaatgtgttgtatctrgagactgtgcctagagkagaataaatacacttcacaattgtcatagtaagtgtaacagggaagcttkrtragatgctccccgtgtgtcaggcatgatactttgcatgtgttcccttcttgaatctttaactgctctctcccccactgtgttataggtattactgttatccacattttacgaagaagaacagaggcttaggaaagttaaataaccaaggccatgcagcaagtaatggaggaactggatttctacctcagttctgtttggctgcagagaccaagctccttactcttgtgtgaagacttacagtgaaggttaattcctggctcctgtgctatgtaggggccatgcatctgtgtcttccacagtacctaacgtgggaccttttacagaatggtcactcaataaaggtgatttggttttgcagctatccattcatgcttgagtctgtgttgtatataaagcattatattttaaccttctaagttccaatgtggtgtttgcttttgaccaagaaggctgaacttcatatttaaaacagtggtttctcatgaacagtaaatatgaaaataagcagccatttagytgaaatgttaatatgaggacaaattgggctacctcatttttgagattatgtagaatttatctttagttgtraaacatgttaagttagtgcctgggttgagttccctaggaggccagttaactgctgtgatccgtgggcagaggcttcatctcaaacgccagcccaggatcctacaaatacagcctcgttattctcagctgagagggagtggtgagaccagaaatagaaagtgaggtgactgcaaaaaacagacaaaagctaatcgattactgtttttctcagtttggatatgcagaattagcagtatatctagcctacctgatatttgagtgacaataatagtgttgcattacagtctataaactaaaacaaaatatccgtgagttcaaactgatacaaataaattattgaataaataaatgagggagaaggtagaattcttctttatgtagaactctaataaataaatatacaaatgatagaaatagaaagtcaccatttggcaaatgccacagtagtattgtttcaggcgtgagttatcatagatgctaaaatgagtggatgaaagtgttgataatacatatggagaagctgagagaagggtgtgtggaaattccttgtatttttttatgcaaaattttgtaagtctgaaattataagcctgaattcattcaaaatgaataggttcagaatttttaaaaatcagttaaaccctacaaaatcatccagagatggaaccaagtatagccattaaaaaatgatactttttcaattactatttgtgaacttgagcaaatattcttgctttgttacttgaaaaagggcaggttacaaaatgatgtgtatagtgtgaccccagtttcataagtaatagttgtgtatgcatgcataaaaaggctggaataattcttagcaaactgttaacattggttttctctgagtgaggaattttacttcctaaaggtaactgatttttttccccctattaagtgctttacggtgagagartttgtgtaaagtgcttagcattgtccctggcacatagagaaaaataaatgtaaattactacaatcatgtagtaaagtctcatccacttacgtactccaggagagcatcttgccagtggagaggtttttctttataccagttgaagagtttggactatttgagctggaatggcttatacagttctagcctaactctaatttcatagatccatgactggaggatgagagagatttgatgacatacatatcaggggaatggtgtggtgggcagctgtgctcaatcctgggtctgagggtaacttgaggcaaattgttcatcctctgtgcctcagtgcctttgctgtggcacagggatggtagcggtcagtgcctgtctccaagggctgggatcagggttgagctaatgcatgtgcagtgttgagacccgacgggcagtgcatggtgacatcatgctttagccatcgtcagcaacgtggtcatgtggctagttggaggggcagtgatttgattggttatatgtcatattttacttgctgcaatattttaaaaaatcacgaacaggtcggtcattctattaaagactggaatattctgtagaaacacagttttccaagcctcaatttaattcacttatttcaagtaataatatagtcccttggagttcattgtaaaatgatttgacctgtaaaaagcttatctggagggcacagcaaatttaaggcacccaacagatccttaaattactttggtgatggcgtgagaacggactgcttttctgtgttcacactcttcagttattttggctctgattttttttttaacatcatatccatcctccctcacttacttgtgccctgtgaggaattgatttttctttcttcttctctatgtagtaacaccttttgaaatgtcagaatctcctaacgtcacacagcggcacgttgctgctgttgtactagcatatttaccattcctagcctgcgttcagtgtagtctcacaaagtcgatgttgagtacagacaactctggtttgaattccaaatccttttcttcttttgggtaaatgtttcttatgcaaaacacgaaaaccatacttgtaattgaatttgctgttaactctgtgcttagctttggcastaacgttgttttgttcattcattcagtgtctttgagcactttgaatgtgcaaggcaccattggcttaggggcctttttcggattactttggtttcttctgttttttttattaatactttttagatataatgtaccatatatgttttaaaaatttcaaagagtaccaaaaatatatatagcgaaaagtaaagtcatctattcccactttcccttagtggcacagtttgcttctcaagatgccatggtggttattaccagtctcttgtatatcctcctggggaaattctctgcatatcaagcaaatttgaggatgtgtaattcctcttaccaattttgtgaagttttttgtttttctgttttgcttggtttgatacatgagtggttgctttgttatgcaggatgttctgtgccttgctttggtttctttgatgtgttttgggctccttaattagcaccatattgggctaccttgttctttttgatgactgcctagcatttcattgtatgtatgtaccgtgaattactgactcattctcttattggttggtggaatttatattatgttcagtattttgctacaaacaaggccacttaaatactctacagtctgtaaaatattctacaacctctttacacacacatatggtctataggagaaatttctgtaagtggaatgtgcatttttattttagtagataatgccaacattaaacttgaaagggaatatgccagtgtgcactccagcagcggtgtagaaggtccagttttcccatgccctccaatgctctcagctgctttatgtttcttcttcttctttttttttttttttttttgagacagagtctcgctctgttgccctggttggagtggagtggcgtaatctcggctcactgaaacctccacctcccggattcaagcagttctcctgcctcaggctcccaagcagctgggattacagatgcctaccaccacgcccgcctaatttttgtagttttagtagagatggggtttcaccatgttggccaagctggacttgaacttctgacctcaagtgatccacccgccttggcctcccatagtgctgggattacaggcatgagccaccacatccggccctttattcatttttctatttgaattttgttttgttttgttttgttttgtttgagatgaagtctcgctctgtcgcccaggctggagtgcgatggcacgatctcggctcactgcaacctccacctcctgggttcaagagattctcctgtstcagcctcctgagtagctgggattacaggcatgcaccaccacgcctggctaattttttttgtatttctgtagagacagggtttcaccatgttggccaggctggtctctaactcctgacctcaagtaatccacccacctcagcctcccaaagtgctgagattacaggcgtgagccaccgtgcctggccaagttggtctttttttaaagattgaattacagggctttttaaaatatataaattaaggaaattagctctttctctcaggtgtggcatattttctccccaggttatcatttgactcttggttttgtttaggtattatttttccattctgaaatttaaaattcttaggtaataaaacgtatcagtgttttattttaaggtttctgagttttatgtcatctgttaaaaggacaattccagctttgttttcctaactttatttttttctcacaggacttttgaattaaaccatctttttcttgctgatataaaatggcccttatattattttctaaattttgttatctatttgattctattctcaactttatttgctattataatctctattcatgtgccagtatcattatttgtaattgctgtagctttaaattattttaacatctgatgtttttcataaatgtcttggttatttttgtacatttatttttccatatgaactttcaaatcaggttgtttggttatatatgttattttatatatacacatttgtggcatttttattagcatcacattacgtttatggagtgatttagagagaattagcttatatgtactattgcatcctcttatctggaaatagggtgtatccttccatttattcaaaatttactttatgcccctcagaggtgtttttaaattttcttcatatagattttgtatattttttgctaagcttatattccttttatcttttttgttgctattaactttttatattggaaggctgttgaaattttttttttttttttttttttttttttttttttttttttgagactgagtttttcacttgttgcccaggctggagcacaatggtgcgatctcagcccactgcaacctccacctcctgggttcaagtgattctcctgcctcagcctcccgaagagctgggattacaggcgcccgccaccatgcccagctaatttttgtatttttagtagagacggggtttcaccatgttggccaggctggtctcaaactcctgacctcaagtgatccgcctgtcttggcctcccaaagtgctgggattacaggcgtgagccactgcaccyggctattgatttttatatgttaattttgcattcagctgcttgacaaaattatcttgtttgtaatagattttacattagttctcttatggtttttttttttgtaagataaaataacatctgctaacaataattttgtttcctattttctaattttatacatcatatttcttgtctgattgtatgggccaggacctctagaacagtattctagaataatggggttagtgggtgtgttagtccatttttacactgctgataaaaacatacccgagactgggaagacaaagaggtttaatttgacttacagttccacatggctgggggaggtctcataatcatggcagaggacgaaagacatttcttacatggcagcagcaagagagaatgaggaagacgcaaaagcagaaacccctgataaacccatcagatctcgtgagacttattcattatcacgagaataaccggcccccctgattcaattaccacctcactcctgcccccctgcccttcctcctacaacatgtgggaattctgggagatacaatgcaagtcgaaatttgggtgggggcacagccagaccacatcagtgggcaaccttattttgtccctttcttyattaagagtgcttctgatgttctacaaccggccacccctgtgtcctgtccgtttggagtctgcctttgtttatcctgctcatggcattttttttctgtgtgtcaacagcgcagtgatggcccctatgccctggtgctcgtgccaacgagagaggtaagcaggctcccttttgggacaagttttaagcacatgctttcactaatgtcccgttgaatttaaaagtggttttaccatgtttctccctactgcacaagccactgcacaccagttccatttgcctggaaaccatccttctggttcttgtcaaggagaaaaattcaagtagtctctgagaatcataagtatggaaaagtattttcctattgtctagaaactaatgatactattaaatgtctgtttaattgggttttgaattaagttgctaaaaaaaaacctacagaaatgcaattttttagcaactttattcaaaaccaaaagcagttggctctgaaaatgaacctttattttttttaagaagctactgctaccaaaaatgttacttgttcctaaaagttaaacttttcaatatttttttctttcttggtggaaatctcttctatctgatctattttatttgcctacagaggcaacttcagattagggtatgtggtttctatatcaaatgctaatcacttccttacagagaattgatcacagagatgatttgaagtcagcttttcatatagcctgcagtcccctatctcagctcagtccaatgaaggagcaggcacagaagctattaaaatttttacagcagcaaacttgctacttctcgaggatgcttcatgaatactaaatatgtggaaactgtatatacgttctttaagaacgggattctgtatgaggcatttttgaaggttgttaatggttgtagcctactttaattttcacttgctttgttctcaaatggagctgttggtttgcttttgttttattgatataaacttgaggagcgaccatctcccaggcttcagatatcctggcacagttgtagaatacagtcatcgctccttgagagcgaagttcccagaggctaccctgttgcgtcactattgtggtttactctgcgtacatattatattctttctctttctaaggagagtcaaattcaggttactttgtttcattctcttacgtttttgtgcaccacagacttgaacttctctgtgtggcactctgggaatttgagccagcagagggagcacaaaacactatttttgtgtatgtccaagaaatagaagtgttgtstttaccctctttgcccaaactgacaggttgcagaaccagtctaagaacaaggtatattagattctgtgtataggattttttttcttcttaaatcttaacttgaggtccaagtttggatcctaatcacattaaattgtctttaaaaaaaaaaaaagggggatcctgttcatcatctataacttttaaaatttttacagctagctctacaaagctttgacactgtccagaaactgcttaaggtaaggcaaaccatgagttccatttcatcttgcttgctgactttgaggaaggatttaatatactacagtctattctttattttcaaagagataagaattatttccttttgcctggatatctctgctctctctaggcagtttataggtttttactgatctaaacctaccaatttctagcttagctgaattatcagtgactcctggtgcataaagtcctgcaatttgttcatcatagtcactagcaagccacatacagaaattcacaggtacagcctgatggtgatccagtagaaagcaacttagctgcaagtaggatttgtttaagaaaggagagtgaaggcttcagaatcaaagccagccagctcaccaaattggatcatgaattgatccatcctttcttttattaggggtggagagtagggaagggtgttgcttgggtttttatcttaaccccaaaaatggcagtagacttactgacatgtgttttcagttcaggctctgtgggaaaagaaaggcaagctacttgaatgatttaagaagctcacatttctctctcactgtggtagaagctagttatatacctataattcaagttactgctgatagtgaacatgggtrtagcaatgcctaggaattgtgtctgcacaataacaccttatacaatgagaagcaccagttttctcccatgccttgtttaaggaaagggaatttggaatcaatgtctgatgttagtaaagggggctttgcactgactgtggtctgctgtctttctgtagcctttcacctggattgtgcctggagtgttaatgggaggagagaagagaaaatcagaaaaggccaggtaggaagaggtttgttggttgttgtttccttcttgaatgtgtcctgccttcctattcagtaaggctgggtccttctaaacctgctgagagctttgtctcaggctctgcttcctagtcccggtgcacagggacagattgagtcagtggggagcggtcacctctagacggtgctgttttttaaaatattaaacctacaaacaggtttccttctgatgttgctagtaacagtgctgtcaacttcttaactcccacctacccaatgctctatagcatccctggtttagtatacatccacctgcatgccactcatttttgtggacattaagagtttggggttttgttgtttgcttttacaaaaacaagatcattcacttatataatgctttgtaacttgctttttacaaccgaatatgtttgttcctttattaggatttgtaatgggtgtcagttgaaaatcgttgcaacaagtaaatctcaaattgtcttcattcttttgaaaacatttttattgtattatagcttaataatcagtactcaataatgatgcatgtagtctataactgaggagtaaatatgaaacctgaaacctcaaagcattggttaggattagactcagctgtgaataacaacaataataacaaataacagtggcacaaacaatatacaagttttatttttctttcacatttaagaaatctgacagagccagtccaaggctggcctggtgctccagtgtcggggaccaagctctttctgtctttttgtgccactatgggaggattccatttttaagattacctcatagtcttagatagttgcaggcaytccaaccattgcatctaatttcttgccagcrggtacagagatgctcatacctgctccctctgaaggtgcttgtgtgattggcgtgttccctttaccttttatcccattgctaaaacaaacatgactatacttaactgcaagggaagcttgaaaatatatccagctaggctgggtgcagtggctcatgcctgtaatcctagcacttagggaggccaaggcaggaggatgacttaagaccaggagtttgagaccagcctaggcaacatagtgagacccccgtctctacaaagaaaaaaaaaatgtgctaaaaattggaagcttttattacggtggactgacaggaaaatggttgtctggggaatgagaaattagatttattgtatataacccatgggacaaagctgagccccgttgaatggaagttacataaagggcttagcataagaaaaaagtgtcctagcaattggagcacattggcatggaatcacttgctcagatactagattctctggcacagaaaccttcgagaacaggctagactacaatctctttggaaggttctagagaggatttatgagtcagataaagagcattggattatgtagttatgatccctttcaaagttaaagttttatgattttaatgtaatttcagatcttaacaattgcatttcacagtacagggaaagactcaagtacagctttctacccagtttttatgttttgtcatgatttcaggctatggcacgtttgcactgtacatgaaatgagtctgtctattttgcctttttcctgtgttttctactggcgtggccctgtttgatttactttcttttatgatatataattttaaacagactccgcaaaggaataaatatccttatctcaactcctggacgcctggtggatcatataaaatccacaaagaacattcattttagtcggctgcggtggttggtgtttgatgaagcagacaggtgagcctcgtcccaggatgataacaggtagaagagaagggctgtttctcctctccttgttgcaacttctgtagccccttagaccacatctgctcttcatatagttgaaaatttctttttttttttacaatcacagaatcttggatttgggttttgaaaaggacatcacagtgatacttaatgctgtaaatgctgaatgccaaaaacgacagaatgtcttgctatcagcgacactcacagaaggtgagttgaaaagaagtgatgggtccttctttgttcttaatgaagaggaaggacctagatttaacctgggttgtttgctgcagtgattctcaacctcagggaggtgggggcagggagagagctgtccttagaagactgccttttcaaactctatgttctacactcccaacttccctctgcaagtcatccaagacagatatgttccccagggcatggggaaagggagaaagggcagggatgaggacgagaaaagactggctgctattggcttggtggtttcatgaggtttttgtgcacttgcaacccatggagagcagggcccttgcactgaagatgatgacctcttatctgagtgcatttttaatgtaatcactcttcctcctatagagctattaaacttaaaaaatatatcaatgaagcgcttctctgtcttccatccatgtgagatggaaattcttagctctcttttttatcactgggaacacgaaggcttggaaaagttgtatcactctaccagatccaccccacacagtgagtcattgaccagcagtgcagctttcacgtttttstgtctggtttccttgatttactaggccacattatgatgtgcatgtaccagatgccatgcatgtggtccctcacagttcccyatgttctaatttttgagggatgattcacgaagaagggattctgtggtcaagaaagtttgagaaatgccccacatccctcccttggatattctcagggcacattaacacaataaaggccctgagagggctgcttatagcaaaaacgcttttgtgaaacctttgaaatccaagatttgccataacttacttgaccaaagaacccttttgggaggtgggggtgggcgcagtatctgttgctatcttttggacgctgttccataggtgagtgtttatagaatggctatggaaagatacgttggtagatctccctgcaacacacacgttggcactagggcggatcagtgctgggactyggtgatacccatggggtaacatacgtagtcctaacatacatgggtgggtgctgtatgggggtacrcttttgtgaccagtttcatggtgtgtttgttgtctgctttgccctthttttatccaaggtgtaacgcggctagctgatatcagtttgcatgatccagtcagtatttctgtcctggacaagagccatgaccagttgaacccaaaggacaaagcggtccaggaggtctgtcctccaccagctggcgacaagctggacagctttgcaataccagagagtctcaagcagcatgtgrctgtggttcccagcaaactgaggcttgtctgcctagcggccttcatccttcagaaatgcaaggtgggactgtgggctagagcmgacttgattcagggaagaaaggcctgctttcttgtgttaagccattgggagcaatgagttgagacaccaaaaatcagaggttttccaacttatgtctgcattccggatgcagactttgatatacatcctttcagtcaggttttaggattatggtaaaaactcagaggtcaatgatagccatgatgttcagcttgaaatgttctcgatacctttcctgggactgatattaggaacatcacaggtggcgggaacagctggatgtgaggcagacrtaggggcttgtgctcatgtttctccaagagtcttggcatttgtgtatttatttactagatttctgcgctgactctgagatgtgagaaaatagtaagtggaagggcttaagggtgaaggttttctgcatatgtagggtctcagccaggtagtgttgcatgtggcaagccctgggcgaataaagggaacggagctcccacacagctgtgctcccaggtgtgtttatttttgtcagataarggaaacctgtktgaaatgatagctgtgtcgttttcctctcctgcattctttgtagagtggagtatcactgtttttgtttttgtttttttaaataattcaaagatagtcacctttatttccaaatgggggtcagcatgactgtatagtttagagaaatattcgttttggcgtcacctaatcttaaaatatgtckgtttttcctccctttgtatcgatgtagtttgaggaagaccagaagatggttgtctttttctcaagttgcgagctggtggagttccactacagcctcttcctacagaccctgctgagcagctcaggggcgccggcatcagggcagttgccatctgcctccatgcgattaaaattcctacggctrcatggcggcatggagcaggaggtgagcactgatctccctgtgcagcgacaacactgcggccccacgtggagatgggggcgaacctgagtccggcaaacctggtctttaggctcagcaatggctacgacccttgcacactccactgggcaagtcaagaatgagacgaaaatgggtgacccactgaaactagaggggatcacactgctggattgatgggggcaaggggagtctattgttcccatttgcttttgctctgggagctggtctcttccacccgagagagctcacaggccctggacttggcctgaatctacctcaaccagctgttaaggcaacagagtaccactaagtagctggcaccagggaagggttttgcctttttagtacccagtgtgtaattagggcttgatgtcttcaaattaagagcattaatggagctaaattgtggatcccatatggtactgctgagcacggctgctgtcattgtcaacaagacacagcgctgcactcagaacactttcggttgggagagggtaccgtgaaccaaaggggcttcgggttcccagttctttctcggcacggagtaagatttctgttcaggaagaagaatacaacatttcccctattttagggacttggctatgtgagtcgcattcctccactcttaactaggccgtttgttatggagtcggggtggaatatgggagtgagatatactcactggaattgggaaagaaagaacgagcaagactcgaaataggagccattttgccctagaggagaggttaccaggcagcttcaaaaattagaaagtgtgaaagaaaactagaaatcaggatgagatttgacttgagccagcttaaaagatcataagatttttagagctaaaagggacactagaggtttgacacgatcctaaacaagtccagcctctctttgcttttgctcttttgttttaataattaagtaaatagaggcccagaaaagcgaacttgttcaaggtcactcaaggacaccggttatttgccacaagattatatagaaatccctgaatattccagcccttgcgcattaggtaaactcttggtctttacctttggatccctgattcaatcaaagttgttggttttatttatttaataccgttaatggtttggggttttgtttttgtttcaagctttgtttactaatcctgtgaatccgtttttaccagaggcattctgcggcgtcgatccaagcgtggttggggggagctgggtatggactcagaatggtctaggaattcgctgtaatagatcacacacaagagtctatagcttcattatacagaggctgttcatctcactttgtaacaggggagtagtctagcgtgctgtttatagctgtgccctctgggggcaccctgcttgtggtcttgtcctggctgtcacttgctggctgtgtaatctcaggtaaatatttaacctctctgtgacctagtttccatgtctgtaaaatggggatgataattgtacttcctttaaggttggctgagttaatgcagacaaagccctccgtacagggcctagcacacaggaagtgctcagtagatgttaaagygcctttattactattgtttttatctgtctttcaggaatagytctttttttatagtttaaaagttgtttttttatagttaaaattgtgtttttatagtttaaaaagtagaatgtctgtgtagtatttagcctttgcagtggaagacaggaggttatagtatccctgtgttttcttttgtaagtattaggggtgagtttcttgttccagactaagctgaaacagtcccacttaaattttcctgacttattaccctggccactgtcctacaaggccttagcatggtctccttagatggttgacatggttctaaaaaagtttatgagcattggatagacgttactatttgcatggtagttgtgatgaaagtctagagtttggtaggttttttttttttcttaccccaaatctgaatacatcataactagtctttaaggtgtttcataagcttttatgaactttctgatttttttctgattttgattctacgatgcagccattaaaaatgatcgtttataaagaccgtgcagcagactggacaaatggatctgtccttttgagggtctgagcactgactccggaacacagctccctgggttcggatatcattccggccctttaccaggtgtgcgtgtcctttgggcaagttccttaacctgtctgtgcctcagtttttttcttctggaaaatgggggtgatgatagtacttacacatagggttgttgtgaggattagcaaagttcagaygtgtgaggtctggtacatggtgggcactcgatgaatgtttgttgtttgtatgtctttatccagtgtactcagtgaggtgtgccccgggcttccagccatggacaaaatctacgcacrggaaagaccagaaagacatgccacagcacatagtgactgtgccaaagcggcagagactttacttttttccagattttgagtagtttggttctatttctttgtatttgctgctgacaggtgaatgtgaccaactcaagtgcatagagcttcatgactgaagagcactcagaatgcgccgtttcaggctcatactgaaagcattctaggatgctcaccttttggtccagcgagtctgtttctaggaatttaacctaagggagtaattaagaatctacacagtgacttatttatagagatgtttatcacagcattgattgcaatattaaaaaatcagcagggcgaggtggctcacgcctgtaatcctagcactttgggaggctgaggctggtgagttgcttgagctcaggcgttcgagaccagcctgagcagcatggcaaaacctcgtctcttcagaaaatacaaaaattagccaggcattgtgtgtatgcctgtagtcccagctactcaggaggccaaggtgggaggatcacttgagcccgggaggtggaggttatagtgagctgagattgtgcagtgagcctgggtgacaaaatgagaccctgtctcaaaaaaaaaaaaaaatcagagacaaccttaattgccataatacaacattggtcacgtaaataatggtgcatccatttagttgaatactatttcaccacagcagatgacctggtctttggatacttattggcatgaagagatgttcatattctgttgctatataagagcatgttaatagtataaatagtaggatgccttttttttttttggaaagctgcatatttggttatgttatgcataaaatggagactcgggaaacgtcaaggtgtccctggtggtagtgggggtttgccttgagtggtattatattttcttcctctaatgtaaatatattttctctccaattaaaatacatagttttataaatatctaatcttttaaaaaactgcctgtagagaaggttggttattctttattccttcagagcacttgtaggagaatgtttagaataaattgcacgcaggcttgaagccctgcatgcagtaacttgtgccttcctgttcttgtttttggccattcctggagagtgtgcctgccctggtagtgtctcacaaaaatgcaccctcaaagcrcctgctacttggctgtagcctcaagtccggtcctgtaagtacagggtcatcttagaagatgtaaagaatccgcttcttcctctttcctggcaaacctctctgtgcctgaaaatagctctagcagtaggagatggagagagctagggagatgtaagcctaccttgctggagtttgtctctgagttgtaaggctctatttttccttgtttttgtaggaaagaacagcagtgtttcaggaattttcacattccagaagaggcgtccttctttgcacggtacgtatcctcctgtgttccatgtgaaggctgatacatttctgtgatggctgtgtaatctttygtctcttgacagtttgtcctgtsgtcagtcctacagggcccaggaacactaggggccccttggtggggctggcctctttgcacctctttcttgttacctgacagggctgcagatagccagccaccaccgtgcagaagacttggcaatttgctcactaatagtggcagctgttggtctgaaaatgtgtgaatcttggagatttctatccaccaaaaacttgtaaattacagctatcgggagtaattagagctgagaaagtctttccacaacaaaatgactctgattgcctctgcttaccttttcttaaaggaaaatcggtgcatttgggccgattttatttgctgctgtctccgactatcatttgtcctgtgatttcagggcctgctccctcagcctcaggctctgcagtccgggatagctgcctcctccagcacaacactgaccttttaaactcatgcctcttgtgctcttttgagattaaaaactcaaaccttcagtgttctctacccccaggctggggattcactttaccgtagttgttgctatctccaaagattaaaatgccttctctgttccatcttggatgatgtaacttaatccccagctggttattggagaagtccctatatacacagtaatgaaattgtaccataaatttagtcaatccagtgaacaagtgctgggtagaaacaaagatactaagctgtttgaatgcccatctaggccacatttgatgcaattactttttaaggaacttgtattccatattcagtattaaaggcaatggagacttttctgtcttaagtgtagagtctctgtatgagtgcagcatggtttcttgtgtgtttatatatgtgtgcttatctgcaagagggggcttattggtaacctgcttatcacagtgtcatttctcgtgtgtgaggcaaacagtggctctgcagacactcattcagacctgaragctgtaaccatggaatacttgcctcctgaggagatctgtgtctgaccaagtccttccctttatgaggcccatccacgagtcagatgctcgagcttgttctaaagccatctttatccgtggtctctagtgaagattaattccaaataatctacttaataaagaaatttgttgggccaggtgtgatggttcatgcctaccagcccaccactttgggaggccgaggtgggaggatcgcttgagcccaggagttcacgaccagcctgagcaacaatatagcaagaccccgtctctacaaaaaatattaaggaataaaaattagccaggcatggtggcacgtgcccatagttccaactactcaggaggctgagtcgggaggatcacttgagcccagaaggtcgaggctacagtgagctgtgattgcaccactgcattccagcctgagcaacaaagcaagaccttgtctcaaaagaaaaaaagcgggggaaagaaatttgtcaaaaatccttattatatctaacaatactttgtggaacctgacccctatttgtctcttttcaccctactcccccttgctccctacccttcagcaaaacagccccctctttcagtcctggaatgtatcatctggctttttctagctttggggccttgattcatgctagtccctctgcctggaacactaccatgattttgactaaaccatctttaggtctccccttaaattttatgtcttcagagaaatgaaactcagaagcccccccattcttccccatggggctgtcccaatgcaccctacgtttcttcactgtaatgatcatcccrcctggtctgcgtgccttcccagccggtcgtaagcatcatgaagacraggactgtgatttgtttgcatttctatcccagtgtctagcacagagcaggcatgcagtaggcgcttggttttgtagatcaaattgggggcgctagacagggccmaagaaacttgatgttaagagctaccagtgtgtgtgtttttctaaagacagagattaatagacttgctcactgggaataagtttttcattcatctggtgttatctgagaagtgaatgttctggactgtgaatattgaaatagaaagcagtaggaacctttggggtggagtttgggttattataggaacagaatattttatctttgacccataacatgctggatttatccctcagaaattgttgagtctcctagtatgcaaacactttacagacatgagtgagttgtaagccttaaagaaaactccaggtatctgaagttctgttgtttgtatttttagtagctctgcgtggaagaaaagattattctttctgaaatagttaatataattctcaggtcaaaagcatacaatcactttccttgttctgtctggctgatgatacctgcaggcacgtggtatcagctagacaaagaatgccattgtcttggcaaagcacagtacctcccagccctctgcgccctgccagtcccaggtgccacatggaaagagaactctccctcgcccacagcctgatttctctaaagccctcagtctttgttcattttctagtccaggtcactccagcatgccgatattctggggactctctttgctgtgtagtgaagatgactggagaagagctgggtggggttcatttctctcggttgctgggccagaacaggagggccrgttcccagtcgtgggaagttcttcgcttcctctcggtgttcctggctcttctgccatgcttgtttgctctagctgatgcttctagcatatgagagctgcggggcgagtgggacacacacgctgtaatagakcatgcctgggtcgggggagatgctgccactctgcgtccttttaagcagcctgttgcttgccaggctatccgaacactctccaggagcctccttggtgttaatgaggaacgagggccacttcaggacgagacagatggagaactggcttcttttgataaagaagaatcgtgctgttaatcgttacatggggattttccccccttwatactgtgccttttgccattttaatttatcatcccgagatccttttaacaaggccagaatgaatgtctttatgaaaatttggaaatagcagtgtgctcacacagaagttcacaattacgctgtttccttcatggttaaaaagtcccccaccccattttccttcttgctaggaacagttaagggtgcatgtgtgtgtttcatttcattttcattataaacatctcaaaagcagggacctttttagtttcatgcagctcgcaagtcctgataatgtggctttgtgtaatgtggctgttcaatgaaggtgtggctatggtaagatggagtctaggcagagcatagctgggggcaaaagaaatcagtgtgtgaaagacgaggagtcctcacacattcacaatgtaatttcgtgtcttctggaaaactagatctaagaaaaagccaagttaagtaggaagtagggatgagcaagaaggagtcattggaagttcaaagcccactttcccaagtggaattaagcaatcaaagggatcagatatcagacactggattatctgcaaaatgttatttcctcctacttacagtgaagaactcaccytaagccagaggaaaggaaccttgcttttaataccatcattatgttgacgagttgataagaagtaccaccgaatggccggaaaatggagtttctaagccacctgattttaaggctgacattaggttttctgttggtctccggtggctgtccttgattgtccctggatggagtgcagtcacctttttcccagaaaggaaagatacctgcagcccgccctgggcgccaactgtcccttggcatcctccttggctgtccggcgcgtgcatttctttttcagaagatgcacctaaatcacctgtgctgctttcctccaccttctccgtatttttttccgcttgaagcatactgttctgtctgtgcagttcttaatttcctctcctcctggggaatttccaccgtgccaggaggctaggagacaaaggagatacggctgtgaagagtcacaatgtcagttctgtgtcccaaataaatgtagactttcgtgcttttctctggggtatgctttttaggtaaagtgtatctttttcgttttattttgtttcgttaatggaaagatcatttggagattgtttgctgtttactcagttacgctaactcatgttgccagttttttggcggctccagccaagatctctcgcctctgacagcttctgcactctctccttcctcctctgattacgcagcccaatctgtcacccggacaacgggggcctggaccctgctgatggctttccacacacggcagtaatgacttttggcaggccgggaaggcgtcagaggcgagtgtgctgcgtcccttctcagagagacggcaggccccctctccctgttagtaaaagcactttgtgaggttcttgggtaaataaatgagtcattttaatccaactgacaggctggcacctgagcaagctgccttccatctgtactcctaggtctcatggaggcagccaattgtcaggcccagggccttcaaggcctcaccgttgagtgtctttcagaactgactttagcaattcttttgctcgaattagcttaaaggaataaaatgaagctacatctaagttctaagagcagacagaacagaatcctctgctgagtcttggtgggtcatgatctcctgttgatctgatgtagctggctgactgtgctccagggagatggagcctctgctgtttccctgggacctctccctgggtagggcgggggcagagaatgagatatgatggaagaggagagtacagagacattgaaatcacttctctgcctaattgccatgataccagttcttacttcaccaggataagtgagatttacagagtctcagaatactgagatttataggtctgaagatatttgtcatatacgtggtctcatttgatcttagcaacaacctcatgacgtacatagcatggttctcccagccattttataggcggggcagctgaggctcagcttgccaaactgacccacgcagattggacagcccctaagtgggactggagcaagcagtccagttctctcttcctagactaggacttgcctttctttctccttattcactgtggtagcctaaagaaatggctgagttaaatctgggggagagaaaacaaggagtattgggcagtggctggccgtcagtgaggttcccccaacacacgcattagtgggagaccggaagattgtgtcttagcctgttgtccagagctaggtcacccaggtaggaaatagagccttgaagacacaatgacaggctgctggcgcccttcatcactcactgttgcgctgtgtttggactcacagtgagtttcatgaacgtcacatgttattttagagtctttagagtcttagtgtttgctggttgaatttactaagccaatgagcattaaatttttacaaggcacgtctgtgaagctcaagcagcccgtgcctacgtggatctcccactgcagtgcacttaaagacaagaaatcagttcttcacaagagctttgcagatgtaagaactcatcagtgtttctaaaaacataaactgtagttggtgtagaaagtggctcccgctcccctttagatagagaacatcctaaattgtgttctcaaagacatcagctctgcaacatcagccttcagcttccagagcctgtgggagctgtctgaaaacactttgtgggtggttgacacacttttagtgcatttaacttctgcttacacacttataaatgcagcctagccagcattcaaaggaaacctgcaaatctcagttacgagtgaagrcagacaaatcctgaggtaccctcagtggtccttctgggggagtgatggtgggatggtgtctccctcaagtcctgcctccgacgctgggggaagcaggagtgtgtttcttttctttttcttcttctctttttttttgagacagagttttrctcttgttgcccaggctggagtgcaacrgcgcaatcttggctcactgcaccctccacctcccgggttcaagcagttttcctgcctctgtctccgaagtagctgggactacaggcatgcaccaccatgcctggctaattttgtgttttcagtagagatggggttcaccatgttggtcaagctggtctcgaactcctgacctcaggtgattcacccacctcggccccccaaagtgctgggattataggtgtgagccactgcgcccaccgggagtgtgtttcttatagaaattttgcatagtattattgtttttcaaaaaagctatgtacaggccaggcacggtggctcacacctgtaatcctagcactttgggaggccgaggcgggcagatcatgacgtccaggagatcaagaccactgcactccagcctgggcgacagagcgagactccatctcaaaaaaaaaaaaaaaaaaaaaagctatgtacatatgaatcctttgtgatacttaacagtaggttgggggtgggctgtttttacaaaagtatcccagagctgtgaaatggatggaaggaatgatagacttaaagagtcatcaaggtaacagtacagacaagggccatcagtaaatgctaaaagccttgggtgaaaggttttaggaaacaggaccatgctattcgcatggtctcaaagtgtaactccccagctacttactcattacgaaggagaaagtcaccttctcaacagagggacccatacaggacagactgccccagtgtgtttcccgacatggaaccatgggaagcacacaccaccctgaggttgtttgtgccagaaagcctaaccgcaaccttaccatgaggaagcagttagacaaatccagttgtccgatgtcctcaggaacattttgatgttyttaaaaaatgacagacatcgaaaaactaagtaagtcaatcaaaggcaggggtgtggttccmaactaaggaagtytacagagacacaacggagtgcgtgacctaccatctgatcctagtttaggaaagaaaaacaactgtaagaggcatyttaaggcgtggtggctcttgcctgtaatcccaacgctttgggaggctgggatggggggatcgcttgagcccaggagtttaagaccagcctgggcagaaagagtytagattagctgggtgtggcggaacttacctctggtygtccagctactcaggaggtcgaggccagagcatcacttgaacccaggaggttgaggctgcagtgagcagtgattgtgccmctgcactccagcctgggcagcagaatgagaccccatcttwaaaaaaaaaaaaaaaaaaaaaaamatcttaggtacagttggagaatttgaatatggactgtttattaraaaatgctattcagcattaaatttctgaggtgtgataatggtggtgtggttatgtagatcagtgtccttttacttaggaggtatgtgttaaagtatttagggttaaattgtcatgatgtttgcaacctactttcagatggttcaraaaaatgtgcttgcatatgtgtgtgtgtgcgtgggcatgcgtagatagaacacagatgggccaaagactggtggtggcagaatctaggtaaaggagttacatctgtatctccttcatctagattgtactagtcttttaacttttctgtaggtttaaatttttctaaataaaaattgtaggggaaatgataagaattcattgttaaagccaaacacaaagagaaaagtaaaaatccccctagatccctctgtccagagataaccacagttggtggttttgtgagcctctatcatggtattggttctccatctgcctatttaatgtgttttgggtgtcgttactcctcctttatttaacttttttgttgaagaaaccagatcatttgtcttttagaataccctacattcaggatttggctaattgtgtcctcacggtgttcaacatgttcctctttcccatacttcctgtaaactagtagttggatctagagacttgattagatttaggttctaggtttcaggttttattttgtttggcgagaatatgtcataagtgatactctgtgtttcctatagtgacagctgtttatctttttaaattatgccaatacacttcggtctgagtcaaaagtatcaaagttcattaaaggaagtgtagcttccatctttatcctgtccttcctcttcttttcctcccctggcgataactgtttttttaagctttgggggttcttcccaccattatttcctactgaaatatgagcaaatatgtttgtattttcccaacttcttacacaagcatactagacacactcaaaatatatcctagagtctccatatccgtatatagaaatctttgttctttttatagctgtatagtactctgttatatgagatattgctgtattttattgaacctgtcttctgctggttgacagtttttttctagatctacaaattatatatagtgctgaaatgaatggcctcatgcctatatcattttgtatttttgtcagtgtatctttttttgtgtggacttttagaagtgatactgctctgggtcaagagcaaatgcacatgtaattttgctagatactacccaattccctgccatagggattcccaccagcagcatatgagggacatgggatcatttttgatggtggaatgcggtataatataatatggccttgaaaaagcaaagcagacctggattcgaggattatttccacttcccagctgtgtgtccccgaacaaaatactttatctctcttaactttggttttgtcatctgtcagatgggggtaatagttgttttgaggattagtcaagataacgcaggtaaaggtctcagcgcagtgtgtggtgggtagtaagtgttcagtaaatgttggctgggacactcttgttacgactgttattcttgaagaatgaatgctgagtacagatgtatgctaaagtcagggaaattcccactttctggtctgctagaatggtgagagactagagagagtagagaatttttgctctttgggtggtgactagttgaaaagatacataaaattaaaaaataaatctccattgcttttatagtttttcagctatctagctaaatctttgaagcgattaatgggcttggcctgtattctaatccagctacctgaagagatgggggtagggggttactagatccttgctgctctctgaggccagaaagcaaaatcctaagtaaatactttgcacttcactcccacagcgaatgccttgaggggagatgttccagaacacacctcaaggccagcttgttaggcgttgctcatggttgtgggcggggggtgataatccatgaatgtgttcctcaagtggtttttcagataaaatgtaaatcaataaaacatgctagaagagttcagagttctttacattacacaactgataattactgtttaagttcctaggctaacctgtggattcttttagcaaagggtgttgtgactccctcatcaatgggttctgtagaatttgcccctaaatcagaatttttaaccacaagaggactgcagtaggtccctgagccccctgaagttgtatgcaggactgtgtgtgtgtgtgtgtgtgtgtgtgtgtgtgtgtgtgtgtgtgtgtgtgtgtgtgrycgtactgggcatatacgtgtatgcccgaatgtgcatgtactgtgggcgggtgaactctcagagtttgcattaaattatcaaacatatccaggaccccagaaaggttcagaaactcagtgttaaaccatattcttttctttgttaaaggatgttgcagctcggggcttagatctccctcaagtcacgtggattgttcaggtaattttttagttgttaaggtgtaagctttaggcaggaatatatgatcatgagtagatgcattggctttaagtagaataattattattatcctcttgggtgttgccctggtaaccaggcagcaaaccagccttatctgttcaattcccctgacatctttccttaacccagcccacctcaccactgcagcaaaacagccagaatgtgcgttcacgagagggaggtggcaggctctcctgcttctagactaattcgtgtcacaaaccaaaatttcaacaacctgaaaataatgggaattacctcggtccctgggaggcctcattgtgtccagaaggagatggctcagctgtccgagagccgtgtccgtgtacgttgacctgcagggagcaattaagttcctgacagcatcttacacatacctctagccttagacgctttgccagagggtacaggtgttagcactagagtctggtggttttagttttgttttttcttttcattagtctacagaatggtatttttaagcccttttgtgtcggggctgggggacatgccctgttgacgtgagtcatggtttattcacattttagtgggattgcatgcctgtcactggccaggatgtctgatctgctcactgcagatgatcactttagaactggaggcattgtgtcttctttcctgctggccacagagtgaactgaagataaggcaatgacaattttaatgtatgggaggccagacatacagaattgatcatttagagcttatattgtgaatattgattcatttaatatgcctagcctcccatacattatattgaccttggccctcatctctctgatatgtgtagcatcaaagggaaaacatagggaagaatgagtggatggtcaattagctttaatgatgacaaagttattgccaaagaaaacatacaatgctttgcattatccattgtaatgagtgatagagtctgctcttttctctgagttggcagtgctctccgtgcaagcagaagcatgtccctacctgcagggaacctgcccctcacctgcccgcattctgtagaatggccgtcattctgaaggactgagtggggctgctgcaggctggtggggaccagctcctggggcctgctcctggtggcctggcatcagaggtagaccctgcccacagagcagggagccccttcatccttacaccctccagtgtcctctggacacctcaccctgtggccttgtctaccaaggaagtaggccaaggtcatgtggtcatcctggagaaatttacccccacctgcctacattttcacctcatccagtcaccacagtgaaaagatgcaaataagaaaatgaagagacctgtggagaagtaaaattaaaaaggagatactgggatgagaagacgtctcgtttatcggaaacttggccactgttcacatttgcttgtcggagccttgttatttccaatgaagccaggagtttcagggttgggtgacttctccttgtgattgtgttagggtaaccatagcaccaggatttaattcttgggatacctggaggcaggtgaggagtattgcacttccaattaatggcagtcccttgatctatgaatgccttcatttttgttaccctttttagtacaacgctccatcttcacctgcagaatacatccaccggattggaagaaccgcccggattggctgccatgggagcagcctgctcattttggctccttcggaggcagaatatgtcaactcgttggcttctcacaaaatcaagtgagtcagaaacctgaatggggtttcggctggtctcacctaattaactttctgtcgctttttacagtgaatgggccttgtaagctgacraagagccattaacccttgtgatccctaaatgagtcccagaatagccagtggcaaaaactaaaacctttaatatcctcagcacatgacagttttcattgcgttgccagactaagtcataggacgatgtgttgtacttggttttcttttagagagctgcgtttcgtttctcctgctgcaagataagtgtgcaccatcttcgcagcttctgaaaggactcttattcacaacttttatttcttgcaattaatggtttgtatcttcaaagttgatttgtcttttaaagaaataatgctttttactcatcacacaatttccctcccccaggaagatgaacccaggggaaatgattttgaggcagttgaaatccacactacactcacagccaggacattcagctgccatcttgtgtgtcacagttcagcacctcatacctctgcgtaaagccctggattctagacttggtgtgccatgagcacacagcccagctcgctgtaaatgggatrgtcttatttctttttccttgcccagccctgtgttttatgtaaaacatcaaataaaactgcaacacttttctcccctaaagtacagtgctagaaaaaagcactacgttcttcattggaatgaaaacatcctagcaggcagcctgggggcctgttgtggggtgcagcccactcagttgcaggagccgtgtgtggctgtccccaccacacctgccccgtctcccatccgcagaactctgcctctcatgctagtaagacttttcaaaactctttcaaggktgttagtgtgaacacttacggactgaggctcattcagaaaacatgctgtgtgtccttcagtgttgggggaggcaggaaactactcctggttgtaatgtcagggggccaaaataatagtttgggttttcctttcttcagtgtgttctttatcttaacacaatctgtcagttgaaagagtggtttttatttgttaaggaagatgtgcatattgtatcttattagtgaaagaagtctcatatagatcagtcagtcacttttcacccagcgctgcttctccggctgagttctgagctccctcagctggaggctggctggcctctctttgctgccctttcagcatcgaggctgacacccaccagggcgggtgtaccaggaaccctggggaaggtaaaatgcaagcccgctggcgcagccagtttccttttcctccctgaccctgttctcacaggctgggagcccgtcataatgctgctggtggctgcttttctctgtcataggaatttgtgtacatgcagaaagcatcttcagaattttgtgttgtaaccccacaatagaaaatgtagtcaccacaccataacagcctgtcagtcgcttcacacttcttttcctcttccttccattctagagctacaaattccattttcccattccttcctggccgcagctctctggatgttcccccatgctcgttcactttaacatgacctcttcctaagaaaaatgagtgacagcagttgcagagcccaatgataattgtctaatgccagagttaacagcagaggtgcctctctctgctctcttcatttttctctaataacacattcaagtagattgctatgaagggctcagatataaagctaaaattgagaagggaaaacagtgattascaaaggcacgaagtattagggagtcaggtatattttaaagacataacaaataccatcatctgctgtgatgatctygtctggaaaaaatagtgtgcccgcatttacgtgactccctttttaatcccgcattagaaaggagacaactcagtgataacgccacctcttctgaaaggaggaagtaggtcttttggggaggaactctgcagggtggtggaagagcatttgcgtgaggagggagggtccttgcatgagccccacttcactggcgtcggctctgaaaactcacttgtgaggggcctgggcctggactgctgctgcctcgtgggtgcactgtaatcaacttaaacagacatcagaatctgggttattacgttgcagtcatgcattgttcttcccaatttctgtttgaggaaaggccctacattggctgtatctatacatgaactgtttctttgacttaatgcaaaacagcaacaacgacaacaacaaaacccctattaactagttgcaaagtgcgcagtgggaagaagcagactgsaaagtttctagaatccaaaaggtcgactcctaaatattttttgaggaggaagcatgtgcatgtttcgtgcctgagaacatgagagccaggcagaggggcgttgggagggctgaggcaccacagggcagattggagaaggcaggccgaggctctcggcagcaagggccagcacgacaaatggctgcccgccttcctagatcgagcactgcggtgctcgccctagcagttgaatggagcagacagggcaagagacaggttcctgggccattgccacctctgtctagatgctcagaactttgcttctgcattcttttgacttctttgtatttgtcaacttcttaacttttttctgcctcccctttaaatgtgtttctaatgaaaatcatcattggtttattaaaatgtaaatgcttcatcaaaatgtgtatttcttagatcaggcataagacagttccctgaatttatttatttatccatctcgtttcrtactaaggtgaggtgattcagatctgttgatggacccataaataatcatagtagatttgctttgttcctcagaagcagcagtttcttaggaagaggaagaaggcccttttaaactgtaaatcactcccgttccctctcagctcctgtttgcttagggtgtgtggttccccgacgtcgccatgtggacacagcatatgagccacactctggctggaatatcagcacacgcatttgagaacactgccttactgttctgtggcatatttagctttttctgttcctgactgcaaacggcattactcttttctttctgcttcaagatttgactccaaattcttgcatttcttttatttttgtgtttttcctctttttttctcaagaaaaaagtgatgaatagaagcaaatcagaccaagaaaaagatgggactgggctctgttttcaccttccctcggggtgccaggcacaaatgagaggcgagttcaatacccatgcattgctctctcctatgaaaaatagatttcccatgaagtcagggcactctccctctgactcctgccctttcagagcatgctctgcctcctctggttgactctttgctgctgtaaaaaggcttcactcatccatagggctgtgagttggcagcagagagaggatgctgaggggtgagggctgggggtgtgcagggagatgacacatktcaggtaaatcgcygtcagagacgtggcattttcattcatagccttgtcagagtaacctttgggtgaaagggggagaattgtcttctcccacctaagaggttgccattcatgttttaatttgctgttacattttcaaaaaaaaaaaagagcatacaacaaaatcatttgtcttcttatgatctgtttccccctcagaactccttcttctctttctgtttctctttctccctgggaagtatcctttcagcagctcacgtttcttccttcatctctgacacgcaagtctctctttgctccctacattcaaatgctgtggccttgcagttgattggatgaagcggaggctttccagactccactgctaggcaggtctgactgttgtgttctggctccttgtggcttctgttcctgagtgaagcccaagctcttgtctcagtgcttggcacacagctccggcttcgttagagatcctttggtcttcacccatcagtaattaagagatgggggagtgaagctcctccagggtagaagaagaaaggccagtgctgctgggacagggctttgtgccctcgttaccctcacaggggtgtttaccccacagtggaggatgtttggccacccttttcttccttttttttttttttttcctcttcagtataaactaaagagaccaaaatgcttctatttcatcatcatctgctcaaatcaagggagtggatcagtgagtgggcacacttatttggtattcaagatttattaagaaataatgacataatctctattaaggaaattctaaatgtagcctattttaaattcatcagagaggaaagaaattgtcaggaatatcatcctgtccctttaatatcatrgaggtccccttctcaattcctaagggtttaggaaaatatttcctttcctaggaaggtgtcacttctacttcatgtctaattagctcaagaataggccagttttgtgcatcaaggtcttgggtgtttttgaaagagcaaaaagttaccttgctgtgcccttccttttacagcgtttctgagattaagatggaagatattttgtgtgttctgacaagagatgattgttttaaagggaaacgatggggagcccaggtgagttttgttatttattgtgctcgctgccaacagatgtgactcacttgatttggggtagtagagactttgtgtatgggttacttcctctgtcaagcaatacattyattttaagaaccatgaacattagatgaggccaaatcttgattgttttttttttttcctcgtctttgcttctggatgcgtttgccactctcatctagcgagtgggctacggtccattctggaagcctgccagacagcagcaggctccccagaaaggaggtccaggccagaatgagtctggaggcagtgccacacgctcagccccggtggtccctgtccagattctcagcaaggacggctgcctagacctgcctatcccagacagcatggaagaaataagtatctctgtgtctcctttcagacacagttagttcatccattttttaatgtgtgtgtgctatccacagaggaagagtaaagttgagatcattaagaagaaaaatttttattatccatgcagttccatatggagattctgagcaggtgcaggcagccctggacaccctttcctgctccttctcttaaggctgcacccgactagaccattattccctcaccccaccccacccccttactcagtattcccgtgtgtgggtgcagtgttgctgtatgtaattttgtctatgagatattaatcacttgaatattttacatttgtttttgtatgcctgaggatgaactggaaaatcagggccagatagatcaagcttaagagtttctttcatgctttagcatgtgcctgtatttggatcattattctccctgagcagggagggaccccgtttcactgagcctgacttaaattctcttgttttagagagcatctaaggaaatgtatgtaataccaggagaggagatagccatagcctctattagcaaagtgtgtgttcccaacctaggactgtgctacactctttatgtgcacggtcccatttaatcttatagcaatccgagaagttggtgatggccccaatttatagatgaggaaactgagacttagagagrtaaaggaactttcacaggggcacactaatatgctttagtcattctgggatttgaagtcttaacttcaaagcacatatatttaactgtataccaatatgcctttattagtattaactaaaccaagataattgagtctttttctaaataaggaaatgttagtcatatttagaggtgaaatttgatcaaccacagcaaagatccctgtgaacaataaaagctgttaaagactccattggtcatcaggttactttaagcaagtcagtacttcatataagactcgtaagcctctggaccaccctttattaagtttgttattaggggtgttgacctgtgaccagacagatcttcattggtcttggcacacttccgttcttttggaactatcataaattctagttaaggggcttttttggtttcttctttttttttttttttttttttttttttgagacggagtctcgctctgtcgcccatgctggagtgcaatggcgcgatcttggctcactgcaacccctgcctcccaggttcgagtgattcttctgcctcagcctcttgagcagctgggactacaggcacatgccaccacgcccagctaattttttcgtatttttagtagagacagggtttcaccatgttggtcaggctggtctcgaactcctgaccccatgattcacccgccttggtctcccaaagtgctgggattacaggtgtgagccaccgtagccggccttttggtttcttttttaatgttcccccagatacttcattatggctccagggcagctctgtgggatcagcagggagcagatgtggatctgttggaggaggcagtgtagcagagtggctaagagcatggccttagggtcawgttcctcatctgtcaccagtgtgtgaccttgggcagggactggacctctctaagccttagtttcttttcggagaggcagtgtagcagagtggctaagagcacgcctcagggtcacgttcctcatctgtcaccagcctgtgatcggacctttcttttttcttttttcttttttttttctttttttttttttttttgagatggagtctcgctctatcgccaggctggagtacagtggcacgatcttggctcactacaacctctgcctcccaggttcaagcagttctgcctcagcctcccaagtagctgggaatacaggcgcatgccaccatgcccacctaattttcgtatttttagtagagacrgggtttcactatgttggccaggatggtctcaatctcttgactttgtgatccgcccgcctcagccycccaaagtgctgggattacaggcatgagccactgcacccggcctggactggacctttctaagcctcagtttcttcgcacgtaaagttgagataaaatagtgttcttttaaggacgtcagaggattgtgtgggaaatagtcctggagtcccaagtataaaacataggaccaaagggctttttttttttttgagatggagtcttgctgtgtctcccaggctggaatgcactggcgtgacctcagcttattgcaacctctgcctcctgggttccaccgattctcctgcctcagcctcccaagtagctcgattacagacacacaccaccatgcccggctaacttttgtatttttagtagagacggggtttcaccatcttggccaggctggcctcaaactcctgacctcaggtgatctgcccatcttggcctcccaaagtgctgggattacaagcatgagccaccacacgcggcccaaagggcattttttattattactgtaactatcaggattatttgtagtcatacaagttagtagcagatgtggaattaaagcccagactcagggacatgaatcccagtgcccttttttgctgtatcataataagtggaacattagcatctgccagctctctagaaataaaggcaagtagtacaattacacaatgagatagtaagtttgatcaaacgtcgtctcaggtatactctttctgggcctggcattggtgtcagtctttatccccgagtgcagatcatttctctccagggagttgatcactgtgtgtctgcgcaacgcagggaagctgtagaagggcaggaagcctctcctgaaggacacgtccccagagaaggagcggagcagctgcatctccctccactctgtcagcaacaagctacagtcgtttttttttggtagcatctgcccttctgtggccttgcagcataaattcttctccttaagactttccctggcttgaggccagcctcaaggacttcctgagacttgaggagtggctctaacttcatgagtaagagccaggtcccagatagatatgagtttgagtttgaatccttgcttcccagctgttagctctgcaatctcaggcagattatcttctccccagtctcagttttcccatctgtaaaacatacaattgctgtgagatttaaataaaacgaggtataaagtgccctgtagagttccagacctcatagattcttaggtctagaaactctgtctcatgatctcagccccagctcctaccttgatagacagtagtgaatgcttggatatttttaaggtttggtgatttttttttttttttttttaagaaaagctgagtaagtttgggctttcatgatataactggttaacttagaaagctaaattaaccatcctacgttgtaggtgtcatgttggtgaagacctggcttgctgagccaagtttaacttgaattcagaggaaaaagaaaaactaaactaaattgactgtgttactaattatcacatagatatacacaacccgagagagtattttatgtgtgattcatgtcagtagtaagaagaataaagtagatgctggatacaacttttaaatctgttatgcgtaagaaataacgtgtgtcttaattgctgtcctcaatttgagcagttctctagcatgtgaactaatgccaggcatgtaaatgtgggttcagtagctaggcctttcgttcagatagccagacacctcattacagtgcccctctccttcacccagcgtgattgaagcccatggtaaatgtccctttggcacatacatttttgggcttctgtgaacagaaagaaagcgagtgaagcatctgtaaaatgtatatttcatatttaggtatataaaacatatatagctatgtctgggtgtgtgaatgttcacctacctacaaagagaataaatttgatctttcaactttactgggaagcactcagaaggttctagggaccatgggggtaaaactcagcttggcaataaagtgattaaaacaaaacccttccattttgcttaaaaataccttggaagttggcaatatcaaggtgcaggctttcacaaaaacctcccacctttgctattactttttataataaaaatagtccagcctatttatcttagactcatctgttgcttcttgataggtgtgaaatcttcatcatcaaagtatacacacacccaaccatgtttttcctacaagcgtttttgtcctgtgaaatatacctgtaaacttatcccaacaaaggagccgttgctggcattgcgagatcttaaaataagttcagagccccctgctcatcctttctgatggcctgtgttttccaagatcagtaggatgttagagacaaaggtgcattgcgtgcggatggatggttggaaatgtgtttttctaaactacccatggtccactagttgaagttagcttcattaaccagtactgactctgtgtcttggagggtgggagagccagccctgccaggtatccatgtgccctcaggggtttgacccgctctcattataggagcattttacctgtcgggggctgagatggtgctgcataactctgcccccctctgtcttcagtttaaatttagactgtcctccccagaagacaactgaaaaatacctcattcattctcaagaggggcaattttaaaataaggtatttctggaagcaggggttagggaggagtaagattttttttttcctaagtattgtatatatttttttctgccattaactttttcttatattttactaaaactgaccttatcatttcaaacctgtgaacctagttctatcctgttttttttttccctacgtatttcgcttgtatacacactcacattatatatatgtaattttttttttttttggttgggaagaaaagatgcctcattttgaaacctaaaggggggaataagaaaagccctttgtaatatattgccatattatcactaaatcccctgacagttgtgacacagaagcaagtcacctgtcacttaagcttgaggtctctttaattttctcctggaattcgcaccaggctgtctttaatttgaggcctttattggaattctgaaacctctctgcctccctggctctcagatctattctgagagctgttacagaatgtatacaataaccaacagagggattcggagagggctggagctctgtttatttaacactctagagggatttttgtgcttattcggtcctggctgcccggctttcaatattgctttgacaaccattctgcccttctcattaattttaaacagttaaaacacaagaaaaagaggaaaaagttttcattattaaagtgctttactttttaataacagaggattctgtccgccaggggaaagggcatcctcgctaatttcacattcatattaaaaaaaaaaaaamacacagggaaggtgacagttgcgctgctgaggtggcttaacgaaaggagggcagcaaaaaaaagtttgcatttcacatcagttaagagggtaaaaaaaaaaaaatccttgttaatgacaatagcaaatgtccactttggtaacacggctcctgagtgactcttctcctgacattttagcggatagaacccttagggggaccttgtattgaactgtgaaatcagcgagactgtcatcaaccaaacaggtagcaggaatgatttgactaaactaaaaacattttcacgttgttaagtctcttaatatagagatgaacgtcgatccagagaatgaggctttttctttcctcccctttgttcttcctctgtcagccttaaaggtgaaagagaggctcagggagtcttagtgaggccagatgcaggcgctcatacaccgtcctctacaaggttaagcagcacgacccggtctcactctggattttccccgggggttcacaccagggtggcaggtggaagtagaggcactagcaccactcaagtgatcagtgtcacttggcaggttggcctcattgggtggaagaatctgtgttctcttgatttcrcattcagtagaaagcactcatgtttgttttacgatattggagacaaaagccactagtttttagcggggatatttaaaaaggaaatttttttctctggtactgttaaaggatgaaaagaaaataattgtctattttattaacattttccatctgtaggctctttgcatgcacacagatgctacttcttacacagggacgatttgctgcaaagatccaggcagtctttgagtgtgttgtcctggaacagcccactcactccttaataggttcctggccacagtggccatgggctggaggaataaatttgaaacactagaagtctgaaccgctctaggcactgaggaagcctgctctgaaattcaaggatggggtaacttttaaaagcagaatgttaggcaggtcactgtggagtgctcatgaagagaaattgtcggtgttccactgatgcgcgtgagggaaaggtgaagattcctaggagatccaagacccatttgaaaacagctcatgttcagtgatgttttaaatgtctgaattggacttggaaaattccaaagtgtctccaatggtctttgattttgaacatgcatggtaagaggtcaggaagaaaagtaagtaaataagtaaacagacctgatgttctctctcataaagccaccctcatccttacttgactttgacatctctatagctcccttttttcctagtaatattgaaaggattacccttgttggccctaggtggttactgtgtgattttactgttattaaatctattataaactgcttcattattcctgaccttgactctatctctcctttaatccttccgtcgccctctcagaaatcccatgctgttggcccccaggaaatccragagcgagccacagtcttgcaracggtatttgaagattacgtgcactccagtgagaggagggtctcctgggcaaagaaaggtcagtcgatttcctaggtgcttgcgcagtggatagcccagcagagtgctctcccccacyttcacccacatacccccaaaccggttgagaggccaacatggaggtccctgctcaccagccaaagccttcaatctccataattctgcagggtttggaagcaggcacggaaggctttaaagtgatattaaatgttaatttcatccttccccatgttttgcacaaatgaggctttatcttggcttatatcgggactagagttttgaccsaacaacttggatcttaaggatctgttttcctctttctttgaaaaccagatagaagacatgtgacrcgttagtagaaatagttgtagagatggaaattagagatgaaggccagagctggaaatattagacctaagcagttcctatttgaaggcacaaagaaaaacgagaaagaacagtactgaggaagagccatagaccatgaacccaattcctaggaaatttatgaaagagagaggtgttgacttaatattcagaccctttgttggataagttggctcctgggatcaccatacattagatgtagacttcacagttcacgttgagtaataagcagtgtatggctgaagggggtttgtaatcactggtactttttatcatgggatgtcttggccagagactgaccatgtctaatgagacttactccatgctggagtatgcacagggtttttttgttagttgcctgctattttgagaagagtgccaggctggcttaccaatatcggaacactgtagcatcctttctttttataaatagaaatgctttaaaaaccattcatttgacaratatttatcaaatcgggcactattctgagtgcttggaatgcatgcgagatcaaaacaaaaatccttgctttgtgaagccaacatgttagtggggtgcaggggcagcagacagtgaacataataaacataacagattagtccatttaaaggtgacaagagctatggaataagtagaaggagatgggggaggtgaaggggtgacatagcagagtgcatttttaatggggtcagagtgagcctcattgtgtaggtgatacttgagcaaaaacctgaagtgggatgagccccgtggctctctaaaggaagggcattctsggcagtgggagctggtgcagacgagctcgaggaaggcagtgtgggtggaaagggggtgctggccaaggcagaatcacgtaggactttgggtcttggtcggaatgaagggggagcagaagtgtgggatctgacttaggtttgaaagagatcacctggctgctgtgtgagaatagactctagcgggggcaagtgtgaaagctgggagcctggctgaggagcaattgtggtcaccagaaaatatagatgaaaaaatgggttagtcagcaaatattgtcaaggacctgttacatacctttagcacattataattgcaattcttggttgtcgttaaaaatcagaaccacacaaggtaaaagatgaagtccccgtaattgccattgtatatccttctagacttttctctaataatatcctgtcttggcatttccctaaagggaattcaacaattcccaagggttttcctaccttgctacctctagaggagtattgctctgtgtctctcaagaggaatagggtctttgtcacagtgtaactttacagtttggacctttgatgaaagttaggcaaattcagctggctgtgcagtacataacaaggtgttgtgctgctgaattccagggctggtatcaaagttgcagtggaaagaaataaatcaaacccacactgtcaccttcgattttggtgtcagtgatgcctcagatattttggcaagactacaactatttcaaggtgtctcggtcatctgagtggaagttacagtaattcttaaaggatgtggttttgggttttctttcactgttattaccattgaacttgttaataccatgaaacaagcagggtcacttgtcttttgtttaaggaatattggaacagggtcacttcccaatgtttatgtaccatgaaggaaataaacgtatcatgtctcttatttgctaatcaatttccacaccagattgataatgggctgggacaacaccgcctcttacagagctcagtcaccccatttcagacataagtctcgccaccattccttctctcctgtttcttaggactgagttttggaggcttgagagagtatacacgtatttgccaccctaaatgtattgaatttactgcataggaacagccactgcaccccataggtggagacactcttttgcatttcaatctgcatatgcaaattccccactattgacttgcttcccttttatgccatttcagaacccacctcctgaataattaacaaagcagctggcttttgccttgatggcagaaaactagttagaaactgggccaagtatgtatttgttttccttttgcatttttggacccagtcattgttaataaccagcatttaactgtcagtttccagaagcagttaccccttttttcctctgttttcttgcatcatttagctagggattcaagttgtaaaacgagtggtaacataagtttgaattccagattcccgaacaaaaatcttggaagctagagtcctctgcctgcaaatgaccattgcttctgtggcttaatcctctccatcttcaggtcttcctgcagaccaggaactccatgtaggatttatgcctgtttggaagggatgcttctcaaagtctagaaaacccacaccagtgatgacaagtcattcttctcccctcagtggggtcagagctaggctgggcactttaccaaatgctttgtcttgaagagaacagcagggaacctccttttcctccatcctttccgtagttgtcgctgtaggtgttgggtggtcttgaagatgcatgtgcctttattctgtactgaagggtgctcttgtgggagtggaggtggggttgggaggagcagagatgatcttcaccttccaggctggaggtttgtttatttctgtctccttcatcttacaagtcatcataagataccactagtttctgatccaaatgtccaggaatgaaaaaggacgatgtgtccatgtgagatacttgaaaatagatttgccctaattcaggcaccttaagtagttggcaagaaataggaatcagtgactgcaaagtgctgaactctggtggcctgtagcttcrtccgtcaccccaaataaatgtctgctttcattacttctccaccttccgcttktgtgggtcccacagcccctgttccttctgcacattctcgacgctgccaacatgagcacttyctgctccttgaaaggttctgcrgacagctactgcagcgtctttgaaattcctgcttctctgaattatccaaacatgggagtccatgcaagtatgtgagaacaaccaactgtcgctgtccccggtgagacaggagccttgaggacaaggaggtttagtaaaaatatgcagtgtgaaatgctgcctggccagttgtctggggagaaaacacttcctgccacatcttggcaaactcattatccctgtaaagctgttagctgggcacctacatctcctgggacagatgctctcagtgctcagctcataggattggtggagaggaggagaggaagagaggtgaccagggtggaagcccagggactcatctgcatacacagaagagaggtaggaaatgaakagacctagagcgggatttgggtaactgagattttaaaagtgcaggctcttggcatggtttcggcttgacttggtttcggtcttgtcttttttgagaccagagtgagtgttgggggttggggaaagaaaggttgaggagaagaggcttgaatctcctgggtcrcgtagcagtagagcctttccctctgagggcttggctgtggggctctgtatctagtggggctctgtgtactccaaacagtacagaccatttgaagcgttaaagattttctttgaaaaagtccctagttattaaaaaggggagtaagcacagatttaagagtrgggtacagaggagttgccttggttattattgctcatcgattgggaaaaggagttcactttactcagtaaatagagctttgatggattccccaggatccttccaggagctgatctgctaaaatgacactttttattactgttcataaacgccaatctccaggtgctgctgggatattatgtttaagctgtgggcaaacttgccagtccagtggctcaacaaggagagtgaggaagcgaaggctggcattcagtgcttgcctccatcagacaccatcggctgggctctggctcagctggcagaagagcaggattggaggtgaagagagcagtgacagggatggcggggagtgtttgcaggatgtccccctccttccttgttggagtgagaagcgggtggacacttgattttcattgttacttccagatattcaatctacgagaatctttcctcaagggaatgcctagttaagtagaccaaagctccaccctcctgggaatgagtctggcctttttctcagggaggagggacctacaacaaggacccccttttctgaatttaatttaatttagttttccttgagacagagttttgctcttgttgcccaggctggagtgcggtggcaccatctctgctaactccatcctcagccttccaggttcaagtgattctcctgcctcagcctcctgagtagcygggattacaggcacctgccaccacatccggctaatttttgcatttttagtagagacagggtttcaccatgttggccagtctggtctcaaactcctgacctcaggtgatccccccgacttggcctcccaaagtgctgggattacaggcttgagccaccgcgcccggccgctcttcttaattttaaaacggcactgaaactttcctgacgtagtgtttgatgaatgtccctaaattgttgtcagtcctcaagggactattttagagacttagtagttttctttctcctttmmacatttgtttcattcccttttttacacattctttgagcaagaagctctgtattggttaatcctggatacttttagaatgaacttggttttaaaatcccatgaggaaggctgggtgaggttgctcacacttgtawtcccaagcactttgagaggctgaggcgggaggaccacctgaggtcaggagttcaagaccagcctgggcaacatagtgaaaccctgtctctacaaaaataaaaatttaaaaattagcctgtagtctgaggcacraggattacttgaacccaggagcttgaggctacagtgaggtatgatcacgtcactgcactctagtctggacaacatagtgagaccccatctctttaaaaaattttaaatttaaaaagtccagtgagtacacaaaaaactggtatcagggattgcctatggataagggagctggaggtggggcttgtggtgaagggggcattggtggtaatgtcattcattcatagtaaacatgacagtcataagacagccttttgaactttgtaaattttgtaacagactagcatgcattaactattcaaaagtaagtaaaatttaattaggaaaaatgtgttaatataaatgtctaatgattttctcattttcataagaaaacratgtcctgtgttgatcayttcttagtttcttcacctattctctcttttcactcatttacacaacagacatctaccgagtgcctgctggtaccaggtgctgtgctgggccccaccctgtgggattgttaggagctgtgtggtcaaatctgatattttatcgggcatattcaagtaataattgtggccccctgtagtttttttctttttgttgtttaggaattgaagaaatacacagaagtctagattttagttgtttgtatatgttgtaattgtcctgctcatgtttcgttgcctggcaagataaagtacagaagataaccattaggccgggcactttggagcttggagaccccggtcctgacagcttccctccccgctctcttttctttcagctctgcagtccttcatccaagcctacgccacctaccccagggagctgaagcacatcttccacgtccgatccctccaccttgggcatgtggcgaagagcttcggactaagagatgcccccaggaatcttagtgccttgactagaaaraagaggaaagcacacgtgaaaaggtaagatgagctgaattcgtcccgtgacggggctagagagctccgttcacatgatgtgatgtgctagctgccatgctcaccgcaactctcttctcactcatacctgcccttctcccaataaacaagcacttggaatgagaagaaagccacctcatcttgcagaaattcaggggtgcctccttttgggcccaaatgtggtggggttcatagggcccaaacgtagtcggagcttcagttgtgctgcggtccgccctggaaagcatccgagatgtgtatgacacattctggtgtgttctgtgtgacgaggcctgggagcataccttgttccagtgagatggaagggctgagtgcccagcctcagattccaggagctgctgaagcccagatctctaacaggctggctttggggtcagtgctgggctccttgctgctgagttgcacctccagtggtgagcgctcatcaaggcaagagcggtgagcccttcccctttcctcccaaaaagagccctttcctcccaaaaagagcatgttcaggacttgtccagaggtcctggggagaggaaggagagggaggggtattgccctgttcgaggctgggctctgagtctgttttcccagtgctgagatgatttccctcagcatgctacatttgtaaaaggccttcttcctctcctcaaagacgttcttttagtaccagcctcagccctcacaggagccagagcgcgtgaggccctgtgagccactcatgtcagaactttggggcggatggtctcattgtttatgtgggaacggtccgttgaacaaatgtttggggcacagagactttttttctcacctgtcctgatttctgggttcaatcccagaacgttgtggatggttagtttgcattgtttatcctcccttttccacgttaatttacaaacgccgcaggctcccccactgactctgggaatctgcaggcagaaccactctgagctgcctgttcctgcccagtgtccagcttgcctgttcaccgggaaggaccactctgtgcttcctgttcccacacgatgtctggcttctccgttcaccgggaagtgtcarttattccatcagtcttgtcagggccccgtttctctagcctgtcacggcaaagacagagggaccacccagtggagggaagtgaccattggtcttgcagtcagggaagttggattgaagtcggctccgttctgatgtgagtttggggccttcccttttcttaacgtctccgagcctcgatctcaactacactagggggaggaaaatccatatttttagttacttcacgagattgtcttgagaatcaaaatcaggtgattcctgtaatcccagcaccttgggaggcccaggcaggcagattgcttgaggccaggagttagagactagcctgggcaacatagcgagaccctgtctctacagaaaaaaaaaaagatgaggtgacttgtgaatatgctttttgaaccatatagggccctgcagatgaaggttcttacaagctaaaaagcagattcggggacatccaacttgacctctctgggggacttggcacctccaagtctcattggaatggatacagtgttgcctaattctcttcccagttttggaatttttaagatgcttgattcttttctgatactaataactctcacataggacaatgctccagtaattctttgaggaaaaacaaacagaaactgtttctatgtgctgctctactgcagtgcctagatgagtgtggacgtgtcctttgctggttccttctaggccattttgaggttcaggagtgcagagcagggctgcagcccaaagatgtttctgctcatcctctgctcgagccaggctgtcctcccagagggccatgatgcctcagctctactcccaggccctcttggctgtgccaggattctaggctgcggggcctgggaactgggttcccagatcctgtcttaggatctgctctccccagtactcatgcatgttaactttgatttgagtgcggaatgaaaccatgaggcttcccagctgatgactaagagtagcctcatcatcagaagcctgatcattttgttaccatctcggcaatggtgacactttgagagcagaggaagagatctgccaaatgattactgttaagaaacacacatgtggccaggcgcggtgactcactcttataatcctagcactttgggaggccgaggcgggtggatcacaaggtcaggagttcaagaccagcctggccaagatggtgaaaccccatctctaccaaaactacaaaaatcagccaggcgtggtgacaggcgcctgtaattccagctacttgggaggctgaggcaggagaatcgcttgaacctgggcggcagaggttgcggtgagccgagatcgcgccactgcactccagcctgggcgacagagtgagacgctgtctcaaagaagaaaaaaaaaagaaacacacatctttgtttattccgatccctgaaaataaatgcaatcccaagatttcatagttagcagatgatctccctttatgactggagatttcattagcaagtgttaatccagatagcagctcctcagaccggcccagatcttggaaagcagagagggaggcctgtgggcgggggaattggaggcagcattgtccttaccttgagaagccgctagggagagagcagccygccgcctcctgccccagctgaccctcgctagcagatgggcaccaagaccacgatacccctgtgagcaggggatttaacagggctttatttagggaagaatgggctgattagctgataaagagcatgtaagatggtatggggcagcctttgatgtctggctggcgcggcagggagccgggtggtgagtgacagcagtgtgtcacaggattactccgcccgtgacaatgccgctctctgttcttgccatgtccccactctgttacagctactttttcygttgctatgcccttcttttgaaggcatttctcttcacactccttagatcctccccccacccctgcctttcgaaggcagacgggcactcgaggatacagtagttacctttttttattkggggaaatcttgtcactcctggaggaggaatgactttgcagctaatctgcacatggaccgtataattgtggtcagggtaagcggcagagaaaacttgacagattttccacacctcagtcagggtttgagcaaatgccagttgctgctttttgaggactggaaagaaaagtccattaaaccccacaaagtgcttgagttatgctgtggtcacaattactgttctgagctgaaacgtctcctctgaaatccgtctgtcaagaaagagaatgggttccttatgttttgtatgggtgaataaaataatggcactaaattctctaaactattctgcattccattttacggtgtttactgcctagaataattatatattatgtgcaaacctgtgatatctgcaaaccaaatccatcagactaacagaagcctgtctcacctgtcatatgccaagcgggagctcaggcgggtattagaatggggatcgggagcaggttagtgaggaggctgttcggctggtccatgcgatgggagagggacccttygtctcttacawtgcctttagtccttcactcgaccacttttcagaaaagaaaaataaatagttcgtggccccaaatgagatcttaataactaggtttctgtcgacttttccagtgctcagttctgmaagggaacagtaaatatcttcccctacacatagaaatacagtcatagtcacaaaaactcttctgacacctacacgcaaacctgtcaaaacagcccccaccccaaacaccgacatagacatatacacagatagttggtgctgtcggtaaaatattgaatggccccttagcaacatccatcacgaaaacagcattttcccttccgtgaaatgcagttcttattttgaagctatagtagattcagcagtttctgagaagcaaaggtaacatatccttccaaagtccccatctttccaggagatgctgagacccagcactgtctgctgggagaggcagaattgtgttgtttgccaggtgtctatctgtctaggtcgtcacacaagtagaacgtgtcagaacagtgagcaggcacgctcaatagggccacgattctctctcatttcgctgccactctgtggaaaatggctcaataatatagaaacgatgtgccttaagttcttagtgttaggctgggcacagtggctcacacctataatcccagtgctttgggaggccaagcccaggaggtcaaggctgcagcaaactatgatcactgtaccactgttctccagcgtgggtgacagagtgagacaccatctctaaaaaataaaaataaaatttaaaaatgtttaaagatcttggtactgtgacagtacgaaagagcaagtctgctgtttctaaaccaccctattttatgtgaattatatgctgtgctcacacagtagtttttgcccagacgattcagtttatagtacctaagactggttttacccctgacttctgccacctgcctttctagtgttgttcttagagcttagaaacatctgggacatcttcattatcagtaatgcaataattttgtccccctgttgctcctagcttcctctttaaaattactaaacagcaatctgaattgttggaaagaaaagttttatttgtataaattttctcaagtcagcctagcccaaatgttagctggtagctcctgattttatcaaataaggcatggagtctaagctggggctctcttaccccttagtacctagtagatctgggcatgctaagtcagtgctcagcaggcactgatcagtaggaagaggggaagtgggaccagaaccagcgcaccctgtggcttgtgtgccaggccttgcagaggatttccttaacctcccacacttctgaagttctagaagtcatttactttctaaaataaacatcctcgtggaaatcatacacaccagtcgccccttcttcatagataggacaggttcatagatttttcctgtctgaattatcagaaatgcttccaattggaaattttgcaaagctctggggtggttttcwtctttgaaggcctgtgctgtgttgttctctggttctcacccttgctcattcagcaattgtttaatacctgggaagagctaactgtgcagaatagagctctagcttgaggagtctgtacccccgttagccctctcccttgcccctctctggtttcttacatgccgactctgggagaatcacagtgattacatctgggattgaatcacacagacaccaggattgaatcctggccgggccacttacagtctgtgtgcctctggacaagtcactcagcgtctctgtgcctgggtcctctggcctcaaagggaggtactcmagtcgccctttgattgtgggggttaagccagatcatgagtggaaacatcgtggtgtccggcacgggaataagcgggagcatctggtgatcatcacaacgaccatattgtcgcattgcttcttcccccagcctccatcattgtygcgagtacccgcggaaccgagagtacgaaaagtgaacttcaaccttttagcacccttgaacttttcttatcaggaacaaccttggaaacatggaaccgagtccctcaaagacgagcattaagaagctgcagctgcatctccctgtaaagcaatattctcatcattagagcagcttgcctgccaatttttatgtggcatttacaacctccctaatatcacttaattagctgaaggcaaacctggaatcttgcccactgtgaaaactttctcgatttcattgagccagttagcattctgtaaaaagacagattggccaaacatgagatgagaggctggacgaaaccacacttggagacatgaggatttctccgtgtaaatccactgcacctgagtcagtgcttatctactccatctcagccgcrtccaacactgttgatccctcyggcctccttaaatctgtctcttccctccgcttcccaaacgctgtctttatgaatagcagccctcagccccggcgctccatccgaacctctgaaacagtctcccaccgagtcttcctgtggccacggcaccgcagtcagctagcacctccacrgccctcaccgcatcttkccctggcttagcgcctttcagtggcatcccgttaggctgtgattagagcaagccacaacaaacccccctcctcacaaaggcccccagcctttgctgattgttcagcctcatcccacacccctgtttcttatcctttcctcagggcctttgcctgaacatgtcctgggcctggacctctcccctccatgctgtgccctctccagccaggcagacaccctcacgtctctgccctggccctggtctgttgtggtggcagctttgcatctgcttgtggtatttgtatgtgtggtcagcgtctgcccctcctcgaaagtatagcttagagaacagcccctgcctggtgtttgctcatcgtgcaggttgcgtatttctcatccagaatgcttggggaccacaagtgtgtcaggtttcagtgttttcaggttttgtggtgtttgcgttgtacaggttttttgagcacccaaaccctgaactctgcagtgctgcagtgagcatttccttttagtgccacatatcatgcatcatgctggtgctcagaaagctttgggttttggagcatattagttttcagatttgagatgctcaacccgaatgcccagcacctgtcacagaacctggcacgcagtaggtgctcggtaaattttttgtaatagatgagtagaaaccaaaatgtcctataattctgagaggaagtgcacaaaggaaaagaaaggaagaaggaattgttctgacttgaaaaggaggtaaatccctttttattgtgtagtgaatttggaaaacagcaaaccctgcctggtgggaaagtcgtctttcagaactctaggggctgcttgtcagtcattctgtcctaagagaacaggcctggggttgggatctccttccccacataaaggcatcctcaggaaggacagcattccccatgcccctcgtggtccagccgctggttctgttccctggtgaaggaggcctgggatcagcccacagaacacagaaatgagcaggctcaggartggggcctccaccccacctagacaaggccagagcaggcacccaggcagagagaggttgctaggccttgctggaagaccagagcaaaacagttaggaccaccagaagtagccacgaggacagatgtggcagtatatggggaaacagaatgtgctctggaagtctgctggggaatcgtatgaaaatgctctgcccaggctccaacccaggagaccgtgtttcagtaaaatctaaaattatgaagagtgagatagaagtgaccgtgaacttgacccagggacagtccctgggaacttgaaagaatgtggtcctcagagcagatgatgagatgctcttcttcacatggcagggcagcaaggtgctgctgaatatatccgtagtttaaagataagttaggattaatcagtagttttttatgtagaacctgggccagctgcacagatgatagccaagaacatgctctcatggcctctgtcaggggaggcaggctggcacctctggggtccatgctggatcgtgtctttagggcatttctcttaagaataaactcttgtccagcctggagcaagagatcggagcactactgtggaaggtgactgcgtttcttctgagtggggaacactggcctgtagtctcagggaccatttgtcaaatgaatccatctgttatagagttcatgcacctcatgttcacaggcaactccaaatgggttgcacagtgtgggcacatgctccagtgggggttctgcccttcccctctcagcacaccccatgcaaaaccagtttccactgctttaccttccttctacggtcaggtgctgtgggccttgcttttcgggctctggtttaattacagctgtgcacacacagctttttacatttggccttttgcttccaccatggtttttttctatgtgacaccatgcaattaccagctttctgcttcctcgtggaacaaacgcaccctcctccccaccctgctaatgaggcgattagaggatttcacagtgaccctgagcttcctccacacctgggtcacctgcagacagcgggaaccacagggcgtgctttcagtcatgcagtcagggstgacaacaaagaacaggaacccagccagcctctcccgggacgatgctggagacgggcacattcactgctggagctgcccaagcactggaattagtagatgtggctggcctagcacaaaccgctaggtccagatgcggccgtgtgcaacaggagagtaccagctcttcattagctcgtccttgctcagagctcttctagttcatatcatttgagagatcaagaaagaacatgacagtcccccaggtctccccttctgcacgcaggatagttttagtcatcccaaacccctcctgtattacagccgactacctcctctcctcttctaatctaactctactttcattaagttgctttctgcaacrggaaggtgtgtatcccggacccctccacactcttcttcatgatgtcagagcctttccatcttgttataacctgtacgaaatgacttcaagtctttttcagatatctccacgttggtcccaatgttatagctacggtccaaaatgcagagtaatttgttaactacttaatagtcaaaatgagggatacagttgagaaccagcatcccagagcgacagcatgtgacactttgtgcatgtcagttttaagtgctcgtggcggtggcagcagcatctcttttgagggcttacgtgtgttctctgctgagctgagtcctccatgcacattatctcactgaggcctcatccagtccctgtgaccaaggcaggatccgcagtggccagtgtagaactcggagcccggtcatgtgattctgagtcttagagatcctgaagcccaaactctcagccaagggccgtgtccgctttctcgcctgccccgtctggaagctgctggtttctagaatctgtattgggtgaaatagcaagtatatgaacacaaggagataactactcgtgtaaccaaagaaatggccttaaagtaggagatgttttggtagtgtgtgtggaagaatttggtttgaaactgtcagagtatcttcgtaatgggcagcatgtgaatgcttttagtacattagcttttgtaagtgaataaactgggacttagagagatgagtaccttggccaaacttccaagagtgggtcgtagatgttttctattctttggggaaatcattggaacaactttgagaagagatgattataagcaagatttggatctaactttttttccagtttcctctaggtctggaagcagaacggtacagtgctaggagygtgggttttgaagccaacattcctgagtttgattccaactcagcagcttagctgtaaaatggaggtgctgtagggttgttgtgtagggtgtggggaagggtaaggaatgtgcagccttagctcagtgctgatctcagagtgggtgtttgataaacagctgtctgccctgtctcacttcctctctttgatctgtaaataaaagatggaaactacatagagtcttccctgagtctgcccagcctggcccaacctggtcctgtgggtcccactgcacttcccatggttgctgtggcctgtgcttcagcacccctggcgtcccagtgccttgcagcccccagggctgtccattcatggacctggcttgccattagagcttctgagaatgagccagaattcactactttcattttccaccctttggtcttatttccattgtttggcctctgtgagattcaaacgctgtgtgtacatgatttgcaaacatagaagtgatgttattgatcagaccaggccttagttcacatgacaatatgccacatatctgaggatgactcctgtctcctccccttttctctttttcgtgctgttaataataacactagtcagyatttactgagtactttcctaacaggctgtgtgctgaatagagtgttagctcattaatcgttgtaagtgaataacgtgggacttagagaaataagtaccttggccgaacttccagaatcagttctacagcctgtatgaggttgtgccaggacccctgctcagaggggcttgtttctggtgtgcctgtctcaggctgtacgaaggcccagctgcattttggtctgtactgttgcagcctgtcctctggatggctcggctccacccatcctatctgcccaggttcttttcaaagtctggttcgtgaaagtatccagacttacaatggaaactgcccagcaagaagtatggggcaatcacgtctgttagtgcaggggatgataatggcagggatggcggctccactgatggatgctcagcagtggccaggcactggcccccatgatggatggccattgtggtcctcacttcaatcatgatgttatccctgttttacagaggaggaaactgcccatgatggcaccactgtccactgggcagagccgcgattcgaacccagacctctggtttcaggttgaaacttgccaactgaatccctgtccatttgcatatgtgacagttatgccaccctaccttctaacagcaagacctgacatctgtcccagttcaagctcaccttgccagcgtaggcccatccctttggtctcctagactgttgttattttgtcagccagtgtattagctgttcctgcagatgtggtagacatgcctcatgatttcatccagttcacccacagtgtcaaacaggacaggcccagagggctgcgctctggggtgtggggctgggattctgcctcaagctggtccttctcagtcagtattttcagtgtgtaatcataacagttccaagcacaactcactgctgccatgttcaccctgtattctccatcttaacagtaattcataaggctttcacagaattaaaatgtaccgagctctctaacgcactgtaggctgttttaccttcatactggccatgtgcctgtgcataggtcctttctgatgtaccgggaaacgaagcttggagaaagctgctgtgactctacaaggtcatcagctaggcgagtggcagaactgggattccaaccaaggtcatcaaattctggtcctctgcccgtccccagcactgccacctgccatctgaagttcctgcttatgttctgacagaacttcctaagagttttggtcacctgggctaaatagtctcaaagttcccatccatttctggggctctggtgaagcccttcattttcaaacatcggccatatctaaatatgatctctcctctttcccatcatgtgcatggccttccaggcagcaagtgtgccgggccatccgcggtttttctcagttgtggtctgtgctgcctgccactgtgcctgtccttggcccagggctcggagttctgagcttcactagatcttgatctttggcacaaagctgaagtccacttttcaccagcctctgtgtccacagaacccctcctaggaatgctgctgtgattcccatgattcccactgccacagcaggactcaactggagccgagtgtcttctggggctctggtagttttacaaaagctagacttgattggatcctaagaaatcacaaagaaggcatccctaaaacagctggtctgccagcatacttctctaccagaacagaacccagaggttgaaagagtctagatacagttccttttcctcactgaccataaaaggtagggtagcatcctccttgggttggcccatgccaaggtcaagttgtcatgacatcccacaccagcttattctttccctcagctcctctgtgtacaagcatacggagggcccgcttgtcacattcccctggagttgcctgttaccctcactgtgacctgagagccaccaaaaccctacccagacattgctgcctttttgtcctccatagagtcaggcacaagtgtagagacttatagtcagtcccgggccacctgaagtcctcacggtctcctgcgttcactgagagcccaggcttttcttcccatgtgggggacttgcgtcgtcagcagagaccttcagggcctagccgtggccctggaacatgtgcttataagcagcctcgttcagattagaggagtgcacttgactagtcctcattctgaagaacccctgtctgtctgtctgtctatgttttaattgtactacaccctcgcaaaatcaaaccaactcaaagccaaaaggcagacaggtttctgatgagtagaaattaaaatactctggcatttcactataggacaaaattctaccatttgcttttgtttccccttagagtgaatatactgttattttctaattataaaaataatgcatgctcattgtaaaactacaggacatagggaaaagctcaaaaattaaccataagcctacattcaggttaaccctgatacatttcctatatccttcagactttgcacgtatacatacaggcatacagatttatgtatattaaaaacattttatgccaggaacttgccccttgttttgaaaactgtagcatggtgacagactgctatggwtaaactctgtgaagtcagatttcctgagttcaaattccagctcttgcattactgatttttggccctggacaaatgacctaatctctctgtgcctcagtttccttaccaggaagtggggatactagtagtacctgtttcaggcggtggttggaaaagtgagtaagttaaatgcctatgtcatgtagtcggtttggatggctttgattttacctgttttacatttaaatccattaacaacccatgtaattggtattcgcttcaatgttttcatctatttgtagagcccatgaagggcgccattgtggtcatcactgcttttcacacagagcctgcaggaagtgctctagaggagcgtttcaagaccttggggaaaagagttactgttcagtgaccgttgtggataactggataactcttaggaagaaacagttcatttttctattaatcaaaataaaacttagatggaattaaagcagtagcaagctagatgaaaatatactttaatatttttgaaatcctagaatgaagactttcccaaacatgaccctaaagccataaaacatggaagaaactrttgatagccttaacggtacataaataaaatttaaacttctgtcctataaaagagtgccattagcaaaagcctgaattagaatgggtttttacctaggaagatcattgtgagaatgtaatgataaagttgggagaaggccctgcgatctctcttctccagtggtcattgtaacggggtatattgatttactaattaggctgtgatttcaccttattggtggtgcaagtggcatctgcctgtcttgctgagtaatccagcctggtaactgagggggggtttattcagccttcactacaagggagttccctgtggttagataaactgatctgttgcttggtaactacaggattactatggtggatgctcaggaaggccattggagaggggtgcgggtatttggagggcaaggagggcgagaaagttggcaggttcctgggagcactgcagcttggcagaaggagaaattgagtgcccatcgcatgcttgggtttagagcakttcatcttcccatctgtacttcgccttttcagcattgggccttggaacaaaggaaaaggagacagggagctggccaagggatgaatgggttttgttgaggtggctgtcatgacagcaggtgaaacccctgcagggttggcctgagcttctcccacctaaggaagaggtctgggctagaaaatgccaccctctgcctgcttgctgaccaccggaacctctgagtgagtggactgctggctttgcatcccaggtcaaaaggacattgactaacatgatgaaatagccaggaaaggtggtgatgataactgaaggcacgtaggacccatctccaaaaggtgctttcgaacggcgtcctcttccaccacgtgggccctcctgttcctattcagtggcgcaatgtacgcaccagtggttgccttcctccaccccagacccacggtgtttgtgaagggacrggtctggaggagctgtagaagtggccccggtggtgtctgggtgtctgcctgttgtgtaggctgcatttgtgggtgtgggcttctgctctgttgggtggatggcagcctgggagcacgggcgcactgcctgagcgctggtgcctggaagatgctcccgcagccygcaccgcttctgtaggcaattagtgtatcagtcactccagtaagatgctggttctttattttgccttagcggtagcaggagccatcgttgaagtgctggagcttatgctggggagcatattttgactgaaattttgcatattttgaaacttaggttgttacatttaaaattatacacattgtgaacctggcttcaaacaagagggaagaaaaagcattccttccwgtcagacccttttcactctgtcacataacctgactaaaaataaactacaggcacaggaactggcagccttcagtttggaacaagttgagtgcgcccaaccgcaggccctgtctcccgccacttcccaaccacaggtcagcccccagcagcttggacctcctccagggacactggtgcacatggtccgcactgggcgggtgacccatgatgagactcgctgctcttagggaagtggtggatgctctcagaagagccccagcccagctgtcaggggccgtagcaccagtcctggctcctgtgtggctctgggggaggtgcgtggcatctccagacctcagtttcctaatgtttaactgtgactgcgatccacatgccaaccaccagctacccccttatatgtcttgattttttctaatcctcacacctatgagtgccattctcagtgaggaaactgaggcacagagcctgagtcactcattctgtgtcctcagctgatgagtgatagtcaagttccaaccctggcttctccctcctccaccctgcagctctgctgtctcccctcaccactccctactcacttgcctggctcctgccccactgtcctgctgaagtagtccttaggagaccacagaggacccctcccatcacatctcaccattttccacccttggtccagctgagtcctgcccccgctgacccggcaaatcgttctctgccctgagtttgcctcttggcttctccacttaccagccatgtggtcctggggcaggttaccctccttgagtctttgtgtccttgtctgtaaatgaggataataaccgtacccaccttgttgagcgaggattgtaagagattgtgtatgtgaatcatttcccacagaccccaggaagtcttccctgtatacttctaatcttctcactacatcctgccctgatgtgctcaccccataaactcctggcctttaaatgttatctgttcattgtccccttgtttcagatcttcttttcctgcagaggttggcttgaatgtgtcttcctgtatgttgcaatagaaaacaccattgtatgactgtcaccctgtcctctggagtgtgattagaaacaggtattattgctttagctcgtttataatgggtttctacaagctttcacagtcaggttaacaacacactattagtcttatttctaattcttgggttttaaaggcattgttacatttattttgaccacagtttcagttcagtttattctctgattacagcaaagaaaatgctstaaatgtagtagcagaacgtaacatatgtctttgtgagaactccatgacactatagtatcctaagacattgccgttttggtattgaaggagttgccagcaaggaagtgtggatttattggtaattgttttattgttgttgctttggttaaaatcctgtcttaagaaacattgttttactcttcagttttcataatcattcttcttatgtatgattgaacatctacaaatttcctcctctgatcttccgatcaaatggtaaaattgccatcttttcagaacagttatcaggattcgacatcggaaattgattttcaacctttggcattttctgagtgacttagggtagggagagacctccctctaacacccgggtttgtgtgggctgcagaaagctgctggtctaatcctagatgcagacattgaccaggctgtgccctggrtttgggttttgtagggtcagaaatatgtttaagagttttttccgttcataaagagctatctggctgtcatcccagccttcactgtggaaccctggagggctgcgtggaacttgctggactctgctcccgcagggctgagtcctgaagccctcaggagcccatgaggaggccagttgctttaagctgcttaggggttactgggaagctgccgtgagctttcactgcttcatgttgttgagtgtgacggtgggtttttccctgtcctttggcaaaccgctgtatcatacacctcatttgccatcagagcatgagggtgtatagttctttttttccccatgaaaacaacacagaacaaagcctcacttttaaaaatgccatgatattttgccgctgttatgaaaatctgtcagcgccgtatctaatcttctggtgcatcgaatatcaaaacaagtactattgaagggattgtacttctgttaatacaaaaatgtcagcttcacagtctcagaaccagctgctatcagcctctttccaaatgggaaagaaaaataataaagtttcttttccctctctgctgttactgttcttcaggcctgaccttcataagaagacccagartaaacacagcctcgctgaaatcctacgttcggaatactcaagcggcatggaggccgacrtcgccaaggtcaaaaagcaaaacgcacctggagagcctggtggccggcccctgcagcacagtctgcagccgacaccctgctttggccgtgggaaaacattaaaatggagaaaaacccaaaaaggtgtacagcrggacagcaagacttcccagaaagtttaaaatctctctgggtcttcgagtggaacctggaagycccgggtggcagtggattgatgtccagttcttgtcagaggagscttgtgaaaaataactgcgcctttgcctgaataccacgtccccaagaatcagaggggccacagcccttctcctccatgggaggccctggagcctgatagaaatcagtggtgtggggcactgtagagactagccagctcccgacggaaggggtctgtgtcttgtattgatcccatcagtgcccggcactcccttcacccaggtgctgacgtgccggggttgagctggcaccccgggatgtgatgtaagaacgccctgcgcgtcagcctggaacgggcttgattgctgcccttaactgtgttctgaagtttcacagcttggcttcagcctatcagcgcatacattggcatgaattttgtgaattagggtgttaaaaacyggaattgaatttgtacaaaaagagaatatatttatcactaattattttcttaatgtaggaatgtaccgttaaaaaggaccaaaagtttttggtctgggtcaaaaaatacgaatgtgttctcaggctcgtggtccctcttattttcttctggaaacacgaggttgcatttacatgcattgctccctctttcatgtccactgaaaactcactctctcagggctaattgatttactgttggctttttattatttgcctttgaagtcaaaaggcaccagtatcccaagctttttttccctatcgaatcctgtcttgtcttcaagaaaggtctgggggtctttgtattgtgacccaggccacagctgcccgccccccgcccccgacccaccccrccctgcccctgcattatgttttctgggaggtttgaaagaggccccctggagcatattgatttcccaataaatgtaagatttgggcacttgcagaggggtccagaagagaaagggttggaggcctccacacctgtgggcaccgctcctgtcctctccactgtgtcttgccttctcagtttccttctcctctgcagtgactgtgccgccctctgtggtctccccaggaccagtgttgargcaccacttcagtagatcccccccagatccttggaaggtctgagtggccacgagagggtggtgagagttggcaaggtgggccttcctgcagggaccacggggggtcagcatccttgcctccgttctagacacaggtgaatgtcagtgggcacccacactggcggagactccagtgtgagggcaaggaggagcctagtgagactggatcctctgcaggtggaaaaataggaccttctcagagttggctgtcacatacaaattaacagggactgtgggtgacgtttctaacaataataattaaaaaacaacaaccctgcagcacatgtcagcctggcgttgggcaagtctgccacctttcttttatttcgatgtgtaatggttcacatgatttggatgagaaaaggagggatcaaactttatagacaaaacccagctgtgtgaaaaacaggattaatgccagtgattggggatgatcaaagagaaaccttactttttctcccccagtactcattccactaaagggcgaattggcagagttcggcatccctggggggaaagagaagtgctagaatcatgcaacgtgtgagtgacgataattccaagatcaaaacttacacacttaatctgctaactcttatggtgagggtttcttgccatagatgctatgtgggtctgtttctaagtagaatcactatattaccccagttaataaagaaacatggatttagcagatttaaggttaatattgtttaaatttaaataaccttaaaataaatctctttctcttctattatggctcttgacagattatacatttcaggcaccaattaggcaaagctttagcctaattccactgtacatattctaatttttgtgtatgtttaatcatgcctctttttaaaatttcccaaacttactcatgtctctatatcataagcctggttcccatatttagagtcacacagaatttggacatttaatagaatgttgcagcctaaaagcgtttcccccgagtgggcttgtagaatgtttttttggaaaccaaaacatcctcatgtttgccacagccttagcagttgacgggcctcattctcacgcactgaagggcagagaccccttgctgagagatgaagtccgtgctgatgtgcagacagccccttgcactctagagaagcaacgaaccaaccaaatctcagtaaaggactttttttttttttttaacgaagcccagtgggttattttgatttttttcttttccccctggggtgaagggaggagaactttagggaagaggggagtaaatgagacctttcggagcaggtatctcccaaactgccaggggcctccccgcttagcccttcaggccacagtcagtggaagccattaaaatccgggcgttgctttgtagagacgcaagttggaggcttttccacgggagaagttgccctgcttgaaaaggcttcttaactggtcttgttaaacctcccccttgatcattagacattatctcttaatctgctccacactaggaagaatccagagccaggcctgtcgctgtggggggagtggggcaccctgaaaatcagctcaggttctcaacttgccccagtcctcaatttcccttgcgaccgagggccagcagggagctctaaacttcttttcaactttgttgccccctccctgttgagtcggcgtttatgaggggggatgggtcagtggcagagcgggggaagatggcttctcagccctctcctattgtcaggcctgttggggtcccacattcattctttttttcttacacgagagctcgcccarcctcagggttgggaacagaaaccaatttagccttctaagtggatggaaggcaggagcccacctcactgcaaaggttgtgaagttattattacagatgggatgtgcaggacaatttaaaatattctaattataaacttgtagggaagccttgttcttcattaatgtaggatatgaaatcgcctctgaggtacaaggacaattacatagttgagaatgtgtctgtggtttgcgctgccactgtgtaaatgtgagggtggttgctacggtctatctccttcactttcacaaaatgaaaagcacaccagtgcaagttgtcctttgatagatttttaatatgattttaaagagttttgtttggtctcattcttattcaatgagattaatttaaagcacttatcccctgggtttaagtcaatccatgtaggatttgggcagggtttgttgcatggggggttttgtttgcaggaggctatgagagactcctttcccacttcattaaccctgagttggggacagtctctcctcaccccccaccagagccagagctggggatttaccaacccccattcacatgcaaaagaactcgaaagccgaggggctccttgacttaattagctgctgtgcattttgcaaaattagaataataccctcgccatcccaggaaagaaagctgctgtgcgagggtgtttcggggcagggaggaaacagtagcggacctggctgtgggtatggttttcgagaggggttatagtctgaacacagcccccgtcttcagagaaaccctgcccccaaactagaggggccacggcttgccggcccccaaaacttcccagcgctgagggttagcgagctgcaggtggtgtgtgggaagggagcacctgcgcccacctccccagagagggagcagtctcaggtgaccgtggccctttggacgtgaactggaagcctcgagtctgactcgggacttaaacccctctcccctgagatgctagagctgcggtctggggcagccagaagagatggggcagacgctgggatttggctcccctctgggtctcatttccaacctcctcccggggtaaaggggaggtgagaagatgtgggagtgggggtttacccgatgtggcgtctggttcgcagcgaaggcgcgcggagtcctgcctggtgcgggaggccgggaggcccgggccgccttggcgcccgcgagcgtcgggagcccgagcgcggccggacgctgggcggagggtgggagtgatggggggagcagcctcggagcccatctgtcggcccgcgcccggcgggccggtcaccagctgccggggcccttgtcgcggccagatgagtcggctcggcgagggccccgcagcccggcccgcagccgaccgaggccccgcgctgacccccgcctgttccggcacggacccccgccccggccctcgggaccgtctgggagccgctaggaaccagatggagacagaggaggaggaggggaacaacgagctggcctcgctgtagagatgggaagactgaggccagggaggggagacccgggccccagcgagtcccgtcggggcccccgcgcatgtccacagcaccggggaagagaagggggacaaaaatgtttcgttattgaggatggaaggaaaccgagtccccaggagagggatgggagaggggttgagtgcggacccagcgacgcgagcgcggacaggcgcctggtcatttgtaagaagtttatttcgacatttaaaaaagagagaacccgagaggcctggctgcccccggaccggggctgaggctgggggctggggtcggggtgggtgggcaagccccctyggccccttcctgccccgcctgggagtggggagggcacaggccacagactcactaatccacggacacggtcacgggctcatgggtcacgaataaataacttcatatacactttgcacacggtatgtacagctcagccgctggcccaggtgctcgaggggtagggagacggggctccgcactccccttctctccctggcgggggcgcggggagaggggctgttctccacctggagcgtagaaggggcgtgggagagagcgaagcctgggaatcagccgcacccgctcctggggagaaaggggttgcctaggggagccggcagaggctgggggtggggagtggcagagacgcgtatgtacacccggcgggtggggatggctcccggacagagcggccgcgagagaggacgccgaggggggctggggagacgcagtccggggtccgggcctcagtggacttggcatttggcccttcggggggcactgggctggggcgccagggagggccgggcagggccccctcccgggaaagggcgtcgaacctgcgccctcagaaaggcgggcggaaggggccacgccgagcccgcgggaggaggccccggagccgacgggcgcctcaccgaggctgcgcggcgcgtgggaggacgccggccagggggggcagcggcgggggcggctcgctggcgccctggagtccgtggatgaggatgcggggcaccagaggtctctggagagcaggcggcggcgcgctggggccgcggtacaggtagagcgccgcgccggggtccaggttggaaaccagactctgcgggtagaaataaggcgacgggaacatccgctggagcgctgagtaattgcctgcctccgccagcagctccaacccgacggccgtctgtcgcttccatttagtcctgggggccgaaataaacgcgtatggcgggatcagggctagggcatccagcgaccccagcccctccccactgcttggcccagagagcctgtagggaggccaagagggatcgtactcatttgttaataaataaccgagtgccaggcaccatcgcacgccttacgtgcatcctctccttttatcttccaccggccttccgtggctcttaccccactttacagagaggaaaactgaggtctgggccggttttcaaaaaggagcctgggttttaagccctgctgtctgaccccaaagcccggctctaactgcgccttaccctgcccaggagatcgcagaacgaacccttggagctgggtagggggggctcctccctgcgcgtgcctctttatgaaggtaggatcaccctggagaggcctgaggggatgggggggtgctcttcagggaagggaatgcgattgattcctctgcaggctggccgggctgcaagctagcagaagcgagcaggcctgaaatggcaaccggagaggacccgctcccggctcgcacgccctgccggctggagcaggctgcacctgccatcctccagggctcgcactgcgagccctgcgcactgtctggccccaaagtccagaggccttggccagccaacggcctggggtttggagaagtcaggcctggaccctaggctcacctgcaggtgaggctaggcggaccagccagggtcccactaaggtgggctcagccacaccagccctgtttccctccctgaattattcatcatcatcataattgtgtaattactgtaacaggccttaattattgatgcccggagcagtaatcagtatttattattaatggggcgatgtgttctgaggcttgtttatgaaaagcaccattcctgccyctgctaagagcgtgcgagtgactgtggggctgagcgtgcgtgcgtgtgtgactgcaagttgtattgatgtgtgtgtcggtgtgtggctatttgggttgagtgtgtggatgcctctgtgtttgtacatttgcatctacgtctggtgagtgtgttcgggagggaaattaggaaacgagttcaagtccggtgccccaacacccacttcccagtcaccctgtccccaaggaacaagggctt

SEQ ID NO: 95517 - DNA, 85934 bp, Homo sapiens
  misc_feature (1)...(85934): n = A,T,C or G
caagagccttccattctcctgctgcaaactgtgtcactttgacaacaattaaattttaaaataaaataccacgcaaactgtgtcagagactactagttgtccaccaaaattattctttctttcctgaacaacaaaacctgggtgttagctagactcattgctgcctacataaaggttacatttgtatgtacattgggattaagttttaataaacatgagacaagcagaaatgtacagtattttcaataattatccttaaaggaagaaggttcgcccttcttcttctcttcttccatcctgatgcctgaatttggatatgacagctggagttctggcagccttattgtacaatgaagatgagatccacaacacaaaagggaggaagctatgggctgaaaggagcctgggttcctgatgactttacagagctgcctcaccagctttgaagagcttacctctagccttttttttttcgagacggagtctcgccctcctgcctgtcgcccaggctggagtgcagtagcatgatctcggctcactgcagcctctgcctcctgggttcaaggaattctcctgcctcagcctcccgagtagctgagaatacaggggtacacaccagcaggcccggctaatttttgcatttttagtacagacaaagttttgccatgtgggccaggctggtctcaaattcctaacctccagtgattttcccacctgggccttccaaagtgctgggattacaggcgtgagccaccgggcccagcatcctctacacttttatgtgagagaaaatatgtgagagtggctcttatttaagccacttttgtcgtgtgtgtgtgtgttcctgccatctgcagctgaggtgatgctaacaaatacagcaaatcagcttgaagtccccctttcctggtcctttctcttcagctatactgccaacccaaagcgctcatttatggaaactctggagctcacaattttaacaagctgccgagaccacctcggtaggagagaacttaacccagcggtactagaggaattaaagacacacacacagaaatatagacgtgtggagtgggaaatcagaggtctcacagccttccgagctgagagccccgaacagagatttacccacatatttattaacagcaaatcagtcattagcattgtttctatagatattaaattaactaaagtatcccttaagggaaacgaagggatgggccgaattaattgaataggttgggctagttaactgcagcaggaagacgcccttaagacacagatcgctcaggcttttgtttatggcttaagaatgcccttaagcggttttccgccctgggcgggccaggtgttccctgccctcattcccgtaaacctgcaaccttccagcttgggcgttatggccattatggacatgttacattgctgcaaagattttatttatggccagttttggggccagtttatggccagatgttgggaggcttgcttccaacaacaagcagctaaatttatttgcaagagtaaatgatttcgtttttaaattggggccaaacaacattttaaaagatctactctaagaaaaaaggaaagatcaccaccaaaaaaagcctctcgcgtgtcctcctgtcatgcattcaaagcattccatacattgtttttgactaatttattatatcaattattaggaatttttaaaggacttttcctatgcaaactctaagagctcaagttttgttttgaatagaaatacaactatatttaccactatttatgtacatctcaatacattttctaataaatatttattgtatactgactaatcctcatttcattcttaggttctgccttttttttgttttctaatttgggctgaaacaattacgctctgattttgctcactgaattcactcttatatcccctcttcacaaagtaagaaactttctggaaactttggcctctgccatgcactgggaacctcctcttcatctaatttgtctgactaccatcttgaacccagcaaggacaactagatgtgaccccttcttttttaaaaaaactattattaaaagtctatcatgtgctaagtgctagaatagatgcttcaaatgctttctttttttcttctaatcttcatgccaaatttgcaagtgaggtcttgttctctccattttatgggtgatcaatcgtgattcagagtgattaaaacgaatccaaggtttgtttgcctctaaagtctgttttctatctcactttaagaaaatctctctctgattttccatacctctgtatcattacattcaagtcttccacttctccaacttcaactctatttcttttccctgcttcccttttgcttctcactggctgtatctggatatttcaaaagtacagaataagttgttcaatttagaagggattctgaaaacacaaatccaaattttacaaagtaaaattatgacatgataataatggtgcactctgaaataaagtgcacagaaaatgccaaagaatataaaaaccaaatataaggcagccccatccatttcagatccacaaggtcacaggattaggacctaattataaataataacccaaataactcttttcctttcagaaagcatacatacatacacacaaccctggagaaagtcttttccaactacagtcctcctcccactccccaaatgcattaacttcaatgttttagaaagcactagagtcactgccaaatagttgaggttatccatcagatgttccccaaggtgagccttctcctgacaactacagcatgagattattgtgtatatatagatcactgtcatgcacaggacaggcacatgacaaatgtgcattaaaatgaaggctgcacatggcaccactgtagccctagactgcaaactcattggcattccaagaacttcacaaatagcacaataatgtgacttttcttttttaaaaaggacactatgtagcttgtaaaattaatcttagaggcacatcatattaatcatggttccattacttagcagtcttcattttcattcaaaatatgaaatttccaagattaagatgatttggatttacaaatcttgtaaaattcaagcatttgtatgagaataaatcactactaaaggaattgatgtcatcaatatcttttactccttatatctaattgcaacactgggcattaaagtgagagttttactggaggaaggacagcaagaaaggctaattttggagccctggagaacagtgatcaacaggagggcagtgtaatgagatagtcataggagagactgaaagtgggagggggcatggaaagggagaacttgaagacaaacataaatgtgatctgttttcacaacatggtcagggcctcactctgctaacatttgtatgtacgctagtacttagtctctatcaggcacagttctaagccctcatttacttaacaatagatactactttcatccccattttatagttgcaaaaaccaaggcccaaagaggttgagtaccatgcaaagcttcacagctagttagtggcagagctgggattcaacaccaggcaccacttcataatcatgaattatcattttacacagcatgcaatctagaacaatcactttcaatcttgtttttaaccataatccttccagtaagaatacatgactcagtacaccaaaacataagtaacagaaatagaagttttgtgaaataatacttttaccaaatgtaatgcatttggtagtcccagctactgggaatggatgaggaaggctgagggaggaggttgaggctgcagtgagccatgattgcaccactgcacttcagcctgggtgacaatgagaccctgtctcaaaaagtaaaataaaataaagtaactttttctattggttatatgttgaaatgatgccttggatatattaagtaaattatattgctaaaattaatattacctttttcaaaactttcttttcttttctttttttttttttttttgagacagtctcgctctgtcacccaggctgaagtgcagtgacatgatctgggttcactgcaacttccacctcccaggttgaagcgattctcctgcctcagcctccacagtagttgggactacaggcatgtgccaccatgcctggctaatttttgtatttaaaaaagtttttttaatgtggctacttgaaaattttaaatgacctatgtggcacttaatatttctattggacagtgctttctgctcattcaggccaaaaaccttggagtcatccttgactcctttctccaccaatcctgtaggttctatcttcaaaatagtccagaattcagcaactacaccacctgctataccacctcccccccatcacccccaaccccccgacacagagaaaacacacacaagtcactttctcttgcttgaataactaaaatagctttctaactggtctccttgcttccttccttgctacactctacagtttattcaactatttcccataaagttgcggagcgatccttttaaaaggtcaatcagattatgtcactcctctgttcaaaatctccatggctttttttccaaagtttaaaagcccaagtccttgcaatggcctacaaagccttaaaagatctggtcacccgtctgtgctcctgatcccttctcctgccccatctgtctgtcctaatctcttaccactctcttcttcactcagctatggtgatcttcttcggttcaccaagtatgctcctgcctcatggcctttgtacttcctatacctctacatgtaaccctctaccttagacttcttctttctcgcagtttggcatcactttactgaacgttatatttagaaatgcaaacctctctctgcttactcttccacacttcccccttcctattatatataggatataacatatccttcttattatataggatatattatatcctgtataatttatttaatttatctgtctcccaccaataaaatgtaggagttccttgagggcagtgactgttttattgctgcattcccagcaccttatgtgcctggcaaatagtaggggccagaaaatgagctgtgggttcccaaagtcagttacggaccatttgcaactagccattctcagaaatctacagaaataaacaaatacttcagtatggggtttttttttttaacttatatcctctttggacctacagtcattccacaataaagaatgcaagaatcttctccacacgccacaagtcttagttaaccaaatcttctgtccattttctcataaccattaggagccctccaaaagccctggaagatgggttttcctttaccctcaggcattaaatctccttaagcatctgcaaaaagttctgagttactggcctaacataagtgcagcttaatctcagacgatctccgggtctatctagtgtacatgaggtacacccggacaccgttaagtatcagtggtgtttgcactctcgatggtttgcagactggccacaccttacctactgggtctgcattcaggaacatgtgtcctgtctgttagcactagaagtgatggacacgtgttggctggaatgtcaaggctgtagccaggccccttattttagacacttagaaatcaggactctgagaacttaggccaagtaaaaattatcaaaacaaagaaacaaaacacgtggtggcacaaaagacaccagaagccaggtcgtttgcccctcaccattcagcccttcccagcaaaagatcctactgtgcagctcaacctagctcgcagccggtaccgcgggattttaatgtgcaactgtgagctcgcaggctgttaaaggaaggccgcgccttggccggtgcaccttccccagggcaaggagaaagcgccgctcccggcctcagccgcagcaggctccaggtcccccggcccggagccgactgagacggtgcggtgcccacgctctcgcgagactagcggtcggggcgggcgggtcgagcctcccggaagtgggccagaggtacggtccgctcccacctggggcgagtgcgcgcacggccaggttgggtaccgggtgcgcccaggaacccgcgcgaggcgaagtcgctgagactctgcctgcttctcacccagctgcctcggcgctgccccggtcgctcgccgcccctccctttgcccttcacggcgcccggccctccttgggctgcggcttctgtgcgaggctgggcagccagcccttccccttctgtttctccccgtcccctccccscgaccgtagcaccagagtcgcgggtcctgcagtgccccagaagccgcacgtataactccctcggcgtaagtgctaggaatgccgctggcctcgcggggaaacgcattctttctatctatagctcgctctgtacatcttctgtctacggcagctattccagaggcaacaactgcttccctctgttctcatctccccattggtggctggcgacccgaatttgggaatggggagattgcccacctgttatctttgagcagactaatctcttgtaagcagaagtgccattcggagtctccagagccctgtggcttggggctgggaatgtccccctgacttcaggctttcctaagtgtattgcttttctctgagaatggtctaggtttttaattttttaattgtaagaatctgtaatacagcatttttatttcggtcttattcgttgtgctcaaaggcaggaaacaactattaatttgccttctcgaatcttaatagttataagattcattctctttcattgctctgctaggcataaaacacacttcgaacatgtaagtgccgctgtcagctctggagagtttaaggcaatagttattttcgatattttaactcctttttgtttcataggggtaactcattcgactgtggagttcttttaattcttatgaaagatttcaaatcctctrgaagccaaaatgggacacagtaaayagattcgaattttacttctgaacgaaatggagaaactggaaaagaccctcttcagacttgaacaaggtcagtagcaagttgttttgatttgctcatttgcgtcttttaaacttttaattcattggcagtcctgttaaatgttttaaagctytaagataaatattatttccaagggtctaaaacttgatttgtgcaaagatggtgctgtgttctccatatatcactaattaatgttgatttgaattaaaaatattttatatccctcgtgttaggataaggataaaatagttctcttttctctgcgtactaattcccacttaagattgaagttaaatatatgatcagaagattgcccatattatttctaataacatttactattaaaacttggtaaattacttcatatgtaattttgctttgggtatgcatgtagttttgcctttgtataactgtctcttttcctttgttgaacctttgaattgacaaaatagattgcagcaaaaagtatagtaaactattgtttatgtatatcaaaaacttctcaaatgtggagtaggtaaaagctgaaaatattttcttagcaaataaaaagtgcaataactcatctggttatgttgaactatatatagttgatctgtatttaaaagatcaaattacttttctacaaggctagttaatagatgttttattttcttagcctttgtaatttttcaacattgaagaagtgtaatatatgaaaaatccagtcccccttattaatgtaccaaatggatgttgctrgtcataaacatttcaaaggaatttttaaatttcgctaatgttttaagaattaaatttttgaaaaaaatttcacacatacaatgtgatatcttcatgccaaatccgcgcctttttccaactttggcatttaaaatcactgagtacctactccatttttggctttcctgactctgcacttttctggttttgatttttttttccccctcccctgttgcatattcttgtcaacttggtgtctcttactaggctctcttcctttcactttttaattaattatgggtatctgctaggaattctttttctgttctccttcaaagaattagttacacagtctcatggcctcaactgttgcctctgtgctaatgactacttttggaggaaaagccttgagctttcttcttcttggaagctttcagcatttgatgacgggtagatctagagccagaattctcctggctctgctgctaacaagctgacttggggcaagttacattaattctgagcattcatttctttttttttttttttttttttccttttctctttttctgagacagggtcttactctgttgcccaagctgagtgttgtggcatgatcatggctcagtgctgcctcaacttcctgggctcaagcagttctcctgcctcagcctcccaagtagctgggactgcaggcatacatcactatgccccgctaattttttttttttttttttttgtagaaactgggtctcactatgttgcccaggttgatattgaactcctggactcaagcaaccctccctctttggcctctgaaagtactgggattacaagcataagccaccgggcatggccccaattctgagcattaatttatttattggtgagatgaaagtggtaatttctgttcttctacctttctaggttttgagactcaaaattaataatacatgaattttttgtgataaagccctaaataaatataaggcattgatatgaatcactccatgtattcccaccctggaccttggcttcaacctgatattatgcaatagaatagtattaggatagctcaacttggatatgcttaaatctagcatgtccaaaaatatcccctgcccattctcgatcctttatttctcagcttccctgtttatttcgtggcatctccatttttatagttcccagggtagaaaccttatattctttgatgatttcttctcttttcctgcagtctctttttaagcttgcagtttctttccaaatatctctgattgcctgtctattctgtatggctgaatatagatgccagaataatcttatgcagtctcttccctttgttattaagtggtatgtataaaatcaaatttaaatacctctgtctgacttctaagacattctgtaatgagactacaccttccttagccaagattgtatctcattctccatcattaatgtcatagatctttacagttgcccaagtcattcctgttaattcccttctcagcaggytttctcatgcctgtccttatacccgtactcccatcagattcctttatatctgttaaatctcatttactgtcagtctatgtgttgcctaagtttcaactttcagctagaatatcacctcctttgtgaagtctttccctaatttttcactgtctgcttcctttgatttccaattacacaatgagcacagaactattaagtgctgaataatgaagyagtgtctaaaggcttgttagtcttacagtgtcagactagggtttaaaatctgtgagaattgatgagggcaggtgactcacacttgtaatctcagtgctttgggaggctgaggctggaggaccacttgaggccaggagttcatggtcagcctggacaacatagtaagactttatctccacaaaaaagaaacaaaattagctgggcatgatggtgcttgcctgtggtccccagctacctaggaggttgaggctggaggatctcttgagcccaggagttaaaggctgtagtgagctatgatcccaccattgcactccagcctgggtgacagagtgagaccctgtctttaaaaaacaaaaataaagggccgggcgcagtggctcacacctataatcccagcactttgggaggccgaggcatgtgggtcaccccaggtcaggattttgagaccatccagcctgatcaacatggtgaaaccccttctctactaaaaatacaaaaattagccaggcgtggtggcgcatgcctataatcccagctacctgggaggctgaggcaggagaatcgcttgaacctgggatgcagaggttgcagtgagctgagatcacaccattgcactccagcctgggcaacaagagcaaaactctatcttaaaaaaaaataaaaaataaaataaaatctgtgaggatagggacagccttacaaacttagtgcagtgtactgctgattgattactagaactctagttaaaactagcaaaaattgtaaaagctaacctatttgaagagggaaattgaaggatttatgaaaaaagaatgatgtggttgactttataactctggttaaaaccggtaaatgtatccaaatgttataaatgagaatgtgccacctttttttgcagtaatggtgtgatcattttgttttagaagataatttgaagccgggtgyggtggctcacgcctgtaatcctagcactttgggaggccgaggcgggcggatcacgaggtcaggagatcgagactatcctggctaacatagtgaaaccccgtctctactaaaaatacaaaaaaaattagccgggcctggtggcgggcgcctctagtcccagctactcgggaggctgaggcaggagaaaggcgtgaacccaggaggcggagcttgcagtgagctgagattgcgccactgcactccagcctgggtgacagagcaagatgccgtctcaaaaaaaaaaaaaaagataatttgaaatgtgaaagatgagtggaagagtggtagagaagggacattggagacaagaagcattgagaaggctattttaaaaacacatctgattaaagaaaaggattgaacagcctgagttgaaaaagagaggacaaggccaggcgcggtggctcacacctgtaatcttggcactttgggaggccaaggcaggcggatcacctgagttcaggagtttgagacctgcctggccaacatggtgaaaccctgtctctcctaaaaatataaaaattagccaggcgtgctggcgggtgcctgtaatcccagctacttgggaggctgaggcaggagaattgcttgaatccaggatgcggaggtttcagtaagccaagatcgtgccaatgcactccagcccgggcaacagagcgagactccgactcaaaaaaaaagaaaaaagaaaaagagaggacaaagtatgagttattttcaagttcagaggacttggtaaccaatcaaatgtgaggaaaaactctggcagtttttggctgtttcatatttaattggtcatcaaagccctcatatttctttccttctctcttttctacaagaaggaattcctcctcgtttttaagactgatatttctatagattcttccagttcaacaagtacaagaataaataatgatcttttctagacaaatcatagctttttcgcttatttcctatctcatttagtggtagaataatgaataaaatcaggccgagcacggtggcttactcctgtaatcccggcactttgggaggccgaggcgggtagttgacctgagatcaggagttcaagaccagcctggccaacatggtgaaaccccatctctaccaaaaatacaaaaattagccagatgtggtgacatgcacctgtagtcccagctattcaggaggctaaggcaggagaatcgcttgaacccaggaggcagaggttgcagtgagccaagatcacaccactgtactccagcctgggcaacagagcgagactcggtctcaaaaaaaaaaaagaataatgaacaaaataagtacttcccaaatctgaaattcttccatcttttaagtaggttgatgaaatttataatttttactattttttaaagaaaatatttagacataaaggttctttgattagaagactgagtttctataaattgagtggaggggaaaagatagaacatatttatttacaataatagtttaatcactcattatgctagttgcctacaagagagacatggctaatgcaagttaagtatcctagcattagtatgaggaataagatagccacaccatgtactgctatgacctcagctaattttagcaaactgagtcatggaatctgacctactgtaggctctctgatgtttcatttactgtatataaaaattttagtttcagtgatttgcattagaggtcwacagagtggctatgtrtcccttggggtatgcgctgatatatctattgggctacagaaagaaaatataacatcccttccttccttcctccctccctccctccctccctccctccctccctcccttccttcctcccttcctccctccctccctccttccttctttccttccttcttccctttcttttcttttcttgtatttatttatttatttatttatttttattgatcattcttgggtgtttctcgcaragggggatttggcagggtcataagacaatagtggagggaaggtcagcagataaacaagtgaacagaggtctctggttttcctaggcaaaggaccctgcggccttccacagtgtttgtgtccctgggtacttgagattagggagtggtgatgactcttagggagcatgctgcctccaagcatctgtttaacaaagcacatcttgcaccacccttaatccatttaaccctgagtgaacacagcacatgtttcagagagcacagggttgggggtaaggtcatagatcaacagcatcccaaggcagaatttttcttagtacagaacaaaatagagtctcccatgtctacttctttctacacagacacagcaacaatctgatttctctatcttttccccacctctcccccttttctattccacaaaaccgccgtcgtcatcatggcccgttctcaatgagctgttgggtacacctcccagacggggtggtggctaggcagaggggctcctcacttcccagtaggggcggccaggcagaggtgcccctcacctcccggatggggcggctggccggacagggggctgacccccccacctccctcccggacggggcggctggccgggcagaggggctcttcacttcccagtaggggcggccgggcagaggcgcccctcacctcccggacggggtcgcagccgggcagaggcgctcctcacatcccagacggggcggygggacaaaggcgctccccacatctcagacgatgggcggccgggcagagacgctcctcacttcctagatgggatggcggccgggaagaggtgctcctcacttcccagactgggcagccgggcagaggggctcctcacatcccagacgaagggtggccgggcagagacgcttctcacttcccagacggggtggcggccgggcagaggctgcagtctcggcactttgggaggccaaggcaggcggctgggaggtggaggttgtagtgagccgagatcacgccactgcactccagcctgggcaacattgagcactgagtgaatgagactccgtctgcaatcccggcacctcaggaggccgaggctggtggatcactcgcggttaggagctggagaccagcccggccaacacagcgaaaccccgtctccaccaaaaaaatacgaaaaccagtcaggcgtggcggcgcgcgcctgcaatcgcaggcactcggcaggctgaggcaggagaatcaggcagggaggttgcagtgagccgagatggcggcagtacagtccagccttggctcggcatcagagggagaccgtggggagggggaggggggagagggagaccgtggggaggtgggaggggggatagggagaccgtggggagggggagggggaggggggaagagggagagggctcttttcttttctctctacctgttttagttttttaagtctgttatatgttagcaacattgaattacgttaatatatgaattatgctctcagtttgtatgtcagataagttacaaacaaaaaaggcatactcagaagaaaacgtagaggttgtaggtctggaaggggttgacaatcacaccctcatttgtttgcagtatgttgccatgcattgcacttttacttaagctaggttaagtagctttacgggttatattatcttaaataacagtctctatattactttgtaaggagaggtagagtaaccaagaatagttcttttacctcacaggagtgatcgaacttaaaagatgagttagaaagtgtttgagattcgtccttttcagaaataacaagtagcattagatagtatgatacttagaaaatattttcagaaaaaataaaaacttaagtctttgatgtaaacatgagtgagaaagttaagtgcttttttgaaggaaattgatgcttggagcagagtttggcacatattttcctgcaaaagttcagatcgcaaatctttgcagcttttcaggcaatgcactccctattggagcgactcaactcccattgtagcaggaaagcagccataggcaaacatacatgaatggatgtggctgtgttccagtaaaacttcatttacagaaatggggattaggctggatatactttgccaacccttgctatagtgaaagcattttgaatatatatttttagaaatgcttctttcatcattatatgattttacccaaaataagtagaacttgaaatctttgaatcactttattacaaaatattaaaaccaagactttttaaaataatgaaatttatttagttacattttcactgagagatattatcaatattaatttttagtgagagccaaaaggttttttctacccactaataaataaaatgtattatttaaatattatttatttcatttatatcttatcccattaagttaacttttatattttataatttacataatctatgagaacatcatacatatatattatataaataaatgacttagcttgggaattattggggttttttcctgaaggtagagcactgatccaaatactgttttggagattttagatgagttttaacctttgctctgcaagttctctgaatacttgtgtaattataaaaacagtatttgtataaacttaacaggggacaggttgtacacatatacccagacagctaatctctgctgtttgtacttgttcaaaatgacactatttctcctaaagataaatttagtcattcttgtgagatgtaaatgtttatgcttctcagtcactaagtattttacttcatgttttaattctttctgtaattatttcttagtctatcccttcataattgtagctctaattttaaaatgttttccctaattataaaattatgcaaatgtataaaaagcattttttctgtgttttttttttaattaggattatactatctaaacaattttgtaacctgcctttttccygtttgtagtagtattatggtgtatgtactctacctccctgcctactgccatgtttcagccatacttttttccagaagatattttaaaagctctacataaatgtgtacaatgtaacaaaatagaataaattaaaagtggttattacatttttttttaatggagtcttgctctgtcacccatgctggagtgcagtggtgcgatcctagctcactgcaacctctgcctcctgggttgaagcaattctgccccagcctcctgagtagttgggattacaggtgcacaccaccacacccagctatttttgcgtttagtagagatggggtttcaccatgttggtcaggctggtctcaaacttctgacctcaggtgatcctctcgcctcggcctcccagagtgttgagattacaggcgtgagctactgtgcctggccaaatgtcttttgataacatgatttataatggctttacaatatgccagcttgtagatttaccataatttatttaatcactgccaatcattagatatttaggttgttgtcagtttatttcatttcaataaatgaggctgtgataaatatccttatacataatctctgtttacatcactgatacttttctcaaaaaatctatrtaaaattcctagatcaaaaaatataaacattcttaatatattaatgccaaattgtattatagaaaaagtacatttagttgcttagagaagaaattcttagtttcactatagagcattctcttagtgtcttttactgaaawcttttgttcacagaaaatatccctgttagtatatcctcttttattactttgttggatgtttaataagtcaaggattataaattataaataatatatattaaataggtaaatattagtttttttcctctcaaagaaattccttagatattaaagattttactcagtggaactaaactttcctgcctcatcagttattattgcccattattaattgaaagttatattcgtgtttaaaatttatatgtattatatttctaatagacttgaccatagtcagtattttygtattctaataattataaagaaggtttaaagtctgctttaaaccaaccaaaatgtttctttcacagtacagttttaactgtaatgtgcttatttgttttcgcttatggcaaaatatttgtaacacattgcacaagtctaaggtatgtttttttaaaaataacctaacttgggcaaaagtagaaatgcattggctctcaggattacaagacagctttagtaactaaaccatgaagcayagggatataggcagtagtgtgttggaggtgcttttgctggctyacaagagctgattgtgcacatcccttcccacttccacgttcaatgttgtcgtgttggtagcttaagattgcccatgtcgggattatttccaccagaaagtcagcaaacactccaagtcagaggttcccaccaccctagtcagttgctaaatctttattagcacatcactggacttgagcagatatcagtcgggttcagttgccttcagaactcctgttagaatcctgaattctgcctctatagaggttgacttctgtcagtgaagactagctttctcagtatggtgagataatagtcccatggtagctcccaagttttacagactatcacatactttctgacaccatagagaaactagctttctctgttgcagttagaaaaatactagagaaggtctctcctcagatgcctgccattgggtacttaattcaggggtgaggatgggggatcatggtaaatggggttgtataagaatttgcacatcccaagttgctatgtgaataggaatgcgtttccaggggaaggagaaagagacattacagagcagacagctctatgatgtttactatacttgctaaaatgtgaaattcagctaaattggaatacaaagtagtgccaaaacagcattaggtttgcggagttattttaaacataattgaaaaatcaaggttttttaatactttaaataaaacatctgtttttcaatgtggtaatttaagtcctaygatgagtttattaacatgtgctttttatttagggtatgagctacagttccgattaggcccarctttacagggaaaagcagttaccgtgtatacaaattacccatttcctggagaaacatttaatagagaaaaattccgttctctggattgggaaaayccaacagaaagagaagatgattctgataaatactgtaaacttaatctgcaacaatctggttcatttcagtattatttccttcaagggtaagtcaggtgttttgtttgtgagaaaaaaagttaatttgttctgtaatttgaagtcacctaacttgtaaatgttactgtatgaaccatggcagtgcaatttttatagtgcttccttgagatgcaaatagaatattctttgatttctaggaggtaattttatggtccattgcagagctaaagtatcaagtaaatgtattttaagtaacatmttaaaatgtagtaatttcatgcaacctgattataggttgctgtttatttgcgtgcccttgttattactgataggttttagtatacttatatttcattaaaccaacattcttggatattttgtgtattatacatgtaattatgtagattgtgaaagggtaaaagtagcttttccattaagttttgttgcaacttttaaaatgattttatgygcttagaaataaatacattttatttgggacaattaaccttttagttagagtcagactatattatatgaggattttttttctatcactgactgaaaagtttttgttttgttttttcccttagaaatgagaaaagtggtggaggttacatagttgtggaccccattttacgtgttggtgctgataatcatgtgctaccctwggactgtgttactcttcagacatttttagctaagtgtttgggaccttttgatgaatgggaaagcagacttagggttgcaaaagaatcaggtaatgtcagcttgctttctttttcttatttaaaaaaataaatgtaattatcctctgtgatatagatttcaaaagttttgtgtattagtccattctctcattgcagtaaagaactacctgagactgggtaatttataaagaaaagaggtttgactcacagttccgcaggctatacaggaagcatggctggggaggcctcaagaaacttacagtcatggcagaaggcaaaggggaagcaggcatgtcttacatggccagagaaggaggaagagaacaaagtgggaggtgctacrtgcttttaaacaaccagatcttgtgaaaactcactcactatcatgagaacaagggggaaatccacctctgtgatcaaacacctctcaccaggcccctcctccaacatcggggattacaattcgaatgagatttgggcagggacacaaatccaaaccatatctttttgcctstatgtttaattttgtttcttattatttagtaatataagtagatagaaccatattaaaaaaaaattttttttttttgagacggagtatcaccctgtcacrtaggctgcartggtgcgatctcagctcactacaacctccacctcccgggttcaaacgattttcctgcctcagcctcctgagtagctgggattataggcaccygccaccatgcctcactaatttttgtatttttagtagagacggggtttcaccatgttggccaggctggtctcaaacttctgacctcgtgatctgcccaccttggcctcccaaagtgctgggattataggcatgagctgctgtgcttggcccatattacatttttgatacttaaccatttttaacctataaaaatggcaaattttgtggttcagcttaagaaatgaaggaactccataatgaaacacttatcatttctaagactttaccatataaaaatcagaaataagctattgaaaagtgaaggaaaatgtattatcattatgtatcattttaattcaacaaacattggttaaccatcttttgtgtagaagacatgtgctaccataaataccaagagcaaaatgaaacttgtgtttcattttggcgcaatctcggctcactgcaagctccgcctcctgggttcacaccattcttctgcctcagcctcccgagtagcttgggactgcaggcgcctgccaccacgcctggctaatattttgtatttttagtagagacagggtttcacggtgttaggatggtctcgatctcctgacctcatgatccacctgcctcagcctcccaaagtgctgggattacaggcatgagccactgcgcctggccttttttttttttttttttttaagacagtgtctctgtcacccagactggagtgcagtggcctgatctattttttgtagagacaaaagtctcactgtgttgcccaagctggtcttgaactcctgggctcaagyagtcctcttgccttggcctcccaaagtgctgggattacaggtgcaaaccactgcayctgatctcaatattaattttctgcttttaagttggataatacatgaagaaaggaatgagaagttcactgacataactaaaacagaatacaagtactatggaacattaaaagtagtagaaacacgtgttgatatactcgtagaagataaatttactacatgttaagtatataaattttctaataggcagtgtgtgtgaattttttcaaatattatctcattatctctgtcttgtatatgaggacacatatcttgaaagatttaaataaacttgcttaaagtctcttgtggtacagttaggatttgaacccaagtgtttgacctcttttccagtakcatgcttgccttgctatttataattacttaagaaagtttaaatttatattttcttcattttagsctggttttgtttgtttgtttttacagtggtctttcctttatttgctttgcaggctacaacatgattcattttaccccattgcagactcttggactatctaggtcatgctactcccttgccaatcagttagaattaaatcctgacttttcaagacctaatagaaagtatacctggaatgatgttggacagctagtggaaaaattaaaaaaggaatggaatgttatttgtattactgatgttgtctacaatcatactggtatgagcttcattgactgccttcattaattttgatgagaatttatgcacayacacatatacacacaaataagagaaaggaagaaagaaagrgaaaggaaaggggctaacataaattttaaaaacacaaatgatgattaggtgtccttcygtttaaaaaattaatatttttcctttcaaagaaaacattcttaattgaggattaagtcaatatataagtatcttgcatctgttgcttataaatacaggagagtgatcatagaaggaacataatgatcacatatttcaacttacagtacagtagtccccccttattcgcagttttgctttctgaggtttcagttacctgcagtcaatcacatttcaaaaatattgaatattccagaaatcagcaattcataagttttaattttcatgctgttttaagtaacatgacaaactctcatgccatcctgctctatcccacctggaatgtgactcatccttttgtccagtgcatccatgctgtaaatactacctgtmcaccagttacttaatagcctgctcagttatcagataaaaaaacacaaaatatcaaaatatatatatatatagggtttcatactatctatagttttacacatccacttgaggtcttggaaggtacccctaaggataagaggggactactctattaatcctttcccaagtaactcatggatcctatattagcaggagctctggtactatagtactatagcatatatgaaaaaactgaatgacttctattatttggagagaaacttattagtaaactctcagaagttgtatttggaaattatgtcttctacatgttaaaagagcttattaaatttagtctgttttggttcctaagattccttagtggtatataattctattaaaatagatcagatttttccagctagtgatccttgaggaaatggttgctcccctcacctgtcagaggagctgagcctggcctggcctagcctgacaaagcgtggccatcagcagctttgggtttaacccagtttaccttacaaatgttatcttgtgtgtatgctacaatgtagaaaagtttggaaaccactgatttgcatatgtaaagaacaagaattctrgttggtacaaacatttaaaagatacaatctgctgtttcataaaacagttctccaagtaaccatagaaactatgaagatatttaaaagctcatagatctggttcatcaatataaataaaaatctctaatcataatggcaaagttaggtaaagaaataggtacattctaaaatttggtgtttctgcatgtacctagaaaccaagcctccagttctacrgtgaaaacttcataatacctaagaactcagtattcttcatttgaaaatttgacattattaagccaggtgctgtggcttgcacctgtaatcccagctgcttgagaggctgaagtgggaggatgacttgaggccaggagtttgaaaccagccttggcaacataatgagacccccatctcttacaaaataatgtaaaaaaattgtaaaggaaaatttgacagtcttgataatcactttgagatctataatattattgaaatcagatttatcaaaccacataagggcattttatgagttataaattgtatgagttaggatatggcataagcagctataacagaaaaacatagggactaaaggctaaaattgtatttatttcttacaaaagattagataggcattcctggactaggatggtagttcagtggtgatagggaactagtttctctcatgttgctctgcagtctccaacacttwgcttcaaattcttagtcagatatggctattccagctcctgctaccacattctccccagtggaaatgaggaaagggcaggcatgtctttttgggtatgatatgatatatattactgtgttcatattgcatcacaggaatttgtctcttgccatacctaccttaaaggagacctgcagcgtagtcttgagwttgtcagctatgtgtaaagttgaaccttgggaattttattactaaagaaagaaagggaggataaaactgagtacagcagcagtctctaccacagactgtatttctgagacatttgrgagattctgtgcaatgtaaaagaagtaaaccttgccacagccttacttgaaaagtgttgcaaatcgtaatatcctttctgtgaaacaagttttcttttatttatttattttatttattttatttttttttgagatggagtttcactcttgttgcccaggctggagtgcaatggcgcgatctcggctcaccgcaacctccaccttccaggttcaagtgattctcccgcctcagcctcccaagtagctgggattacaggcatgcaccaacacacccagctaatttttgtatttttagtagagatggggtttcttcatgttggtcaggctgttcttgaactcccgacctcaagtgatccgcccaccttggcctcccaaagtgctgggattacaggcgtgagccactgtgcccagccagttttcttttaaaaaagtattatctagcagaattcaacctccagaatggttatgtgaaggcttcacacactctttacgtagtgaaacaaccctaactggtgaaaattattttaagacaatcacttaaatccccttgaaattgtcctacggatatttagcatatggagaaacatatgaagatctactacatcttagtaagaacaggagtccttggtgattgaaccaagacctgctccattatcttacacaaatgcctctgttatggaagctgtatcacaggtgctccactcctggtaggtgtggccaagarggagacattctctcctcccaactcccagcctggggttatagtttcatgctaagaggcacagtctatgagtgtttttaattctccctgccggccctgtcttgcagaagttctttttttttaatttttttttctctttttttttttgagacggagtctccttctgtcgcccaggctggagtgcagtggcgcagtcttggctcactgcagcctccacctcccgggttcaagcgattcttgtgcctcagcctcccgagtagttggaattacaggtatgagccaccatgcctggctaatttttatatttttagtagagttggagtcccgccatattggccaggttcgtctcaatccaccctgccttggcctcccaaagcgtgagccaccgcacccggccgtgttgcagaagttctattccaagcaggcaggtggagaaaaatctccttttctccacccagcccctacttgcagagctgacatcctttcccacaagtagcaggccaagaacactgggaacccatttgccctggaaaaggtcttggttcaaatgccaagactcttgctgttcttatcttaaataaatgtttcttcttatgctgaatgccctaggataatttccagggactaaatgattgtttttaaaattattttcaccagttaaattgttttgctagggacagtgtttgttgagtttcttactgtatcactccagaagtccatatttattttttaatgttgatgtgtgttaaaacatagtttggagtttgactcttctttcatgtagaattagaaaaaaatattttcactacctattgtttagaattctttcattttacagttgatttttgtttcaaaatattgaaaaaagaaacagttttaggattttgctattttaaaaattggggacgggtggagtggctcacacctgtaatcccagcactttgggaggccgtggcggatgggtcacctgaggtcaggagtttgagaccagcctgggcatcatggtgaaaccccatctctactaaaaatacaaaaattagccgggcatggtggtgggcgcctgtaatcccagctactccagaggctgaggcaggagaatcacttgaacccaggaggtggaggttacagtgagccgagactgtgccactgtactccagcctgggtgacaaagcaagactctgtctcaaaaaaagggaaaaatttaaattagctgtgtgtgttggcatacacttgtcgtcctgactacttgggaggctgaggcaggaggatcacttcagctctagagttcaaggctgcagtgagctatgattgcaccactgcactcctgcactcctgggtgatggagaaagacctttctcaaaaataaatggatgaatgagagcagcattggtatttactctttttttttttkttttttgagacagggtctcattctgtcacccaggctgtagtgcagtggcacaatctcagttcattgcaacctccacttattggggtcaagcagccctcccaccttagcctcctgagtagctggsactttaggcacatgccaccatgctcagctaattttttaaaaattttgtagagatgaggtctcactatgttgcccaggctgtctccagctcctggactcaggtgatactccctcctcagcctcccaaagtgctgagattacaggcgtgagccactgcacctagccccaatatttattytttatacgtgaaaatcctatttggacataagttattactacattttgtcattttgaaaaataccttgaatttcagtgattgtgttgatgaatctcggaggaactacttaatgcaagttttgagaattaccaatttaacttttattacaacttctytgctccttacatagcctttcttcatctgagtgcttattatgggtatgaataaatactaagtaaataaatgacttactaaataaatgactgaaactggaaataataatgattctaaaattatataagggtgctcagctgagtaaatgaagcacaaacaattcatttcagcagcagagcaatgtggttaagattgcatattctgaagagrgacttggccaagttaattcctgactgtatgacttgggctgagttacttaactctctgtgcttcagtttctcttttgttaagggaacataacagtatgtcctaatttgtgtggtaggaagtgaggaataataaattagtgtatttaactgcttagaacaatttctggtatgtggtaaatattcagtaattgttactactttttattttatacacattaatcactcatgctcttcaatatgaattcagggataattattagtccattttaaagatcaaacaaattccatgtaactttcattcgtttattttaaattaaaacaaattatctgtttttaaataggtagatataaggtttcactgtgttgcccaagctggtcttgaactcctgcaggctatccwacctccactcccacaaagtgctggggttgagctaccgtgcctggccaaaacaaattatcttcaatgttgtaaatatttggaatactgtgccaaactcctgattctgattctgaactataagctacattcgtattccttgagcgtatttattttagcactttctcaacctcgcttttatccaacttatcaaaacaacgtatttcattaacactttaggatgagccatacaaaagtgttacctatgagagagttgctttttgtttcatcggattttctaagcagaattaaagttagaaaaaaaaaaagtatgctgaagcgaatgataggataccataaccaaagaaaaaacttttcctgtaacagtatcatcgtaaaattgatgtccaatatagaaaaaaatgagtggtagatctttatattttatttcrcctctaaacttaacatagatacagtttcaatttaattatgagatactcctttgtgtctcctttttccttcagctgctaatagtaaatggatccrggaacatccagaatgtgcctataatcttgtgaattctccacacttaaaacctgcctgggtcttagacagagcactttggcgtttctcctgtgatgttgcagaagggaaatacaaagaaaagggaatacctgctttgattgaaaatgatcaccatatgaatgtcagtatgtacagaggagtatcacactaaaacagaaaaaatttctaaagcacacattaaatatatggttgaaaattacttagaacctgtattttaatatgataaacagtatttgcttaactgattttaaataagtatatgtatatatgtattttttaactattgacatttttcagtccatccgaaaaataatttgggaggatatttttccaaagcttaaactytgggaatttttccaagtagatgtcaacaaagcggttgagcaatttagaagacttcttacacaaggtaaaggatacatactagaatgttcctatcgattttaagaaatgtaatattataaagggaaaactctcttttgggtaacgtcattattaaatatgtcattgtattatatttgtgttattgttgatattataaaactgtgattctgtaagctgagagttagcagaaacatctaaagggcacgtcataataatacataacacaattatttcccctgggtactgtatcttactgttagttccatagaatgctcagaatattgtggaacccagtatatagttgttaaatgtatgaatgggaagtaggttgaacaggttatttcagctgagaaaggcttgaaacaagttttgaaattgagagatgtgatagtctcctgttgtctatagtaagaaccttaactgacgtagaggggctcccagctgattttgcgcactattaaggccacctaaccactagtgatattgaagccagatattgacgagataacaaaaggtaacgaagtgagtcttctattaaggacataactaatcaagcagttaatgtgccccccccccaacaaaatagggtaggaaaaaataggtgaaatgagaaagtagggtttgtaggagacaaattagaaaggattattaagagtctatctgcatttcatataggacaacctagcagtgaggatttggggaagatcttaaaatactttttttctcttgcagaaaacagaactagagtaggactcagaaatagtgcctttgaagtagacgtcaatatggcttgagctctaggatactcagtcagcttcatgcatcaacttttgcaattgtgtaacaccttaatacaggaatttttaatattaacttttctccctgtttcattttactaaagggcctctatcttcccttcccccaataacctgtattatttacatgaaataatatgtgctcattgtaaagagaaaaagcccaatagtttaaatgtgtaagaaaatagaatgtatgacctcttctttcccaaaacccacatctcagctactacatattgtttcttgtacttaagactctttgtgaaaaaaaattcaattttatatataattttatataattctatatatggtaagtacataaattttatatttatttttattttttacacatgcaaataagaacataaattgtcaacaacttgttcttttagttgacaatatgaatttattatagctaattatttcttttaacctctgtatagcaatatgctatttttaaagtacttgaatttatttagcctttttgataggttgtttccagttttttcatttttcattcattcattcaatgcatattcattgaaccacctactactgtgtgctagacatgaggattcagtggtaaacagaacaaagtcctttccctggataaacttccagtctcataagctgtactgcagaaaatacatccccgtacaccttatgtttacttgcttatgtgagtcaatctgaaggatacattgttaaacatggaattattgagtcaaagggtatacagatttcaaatataataaatttattttcacagcaagttataccaacttaatattatcactaacattagatatcattaacctttatcatgtttgtcagttaggcaaaacataccttattttaatttacatttcttttttttttttgagactgagtctcactctgtcaccaggctagagtgcagtggtgtgatcttggctcactgcaacctctgcctcccaggttcaagtgattctcctgcctcagcctcccaagtagctgaaactacatgcatgcaccaccacacccagctaatttttgtatttttagtagagacggggtttcaccatgttggccaggatggtctcgatctcttgacctcgtgatctgcctgcctcrgcctcccaaagtactgggattacaggcgtgagccaccgcgcccagccttttaagttacatttctttgcttattaatgaagtatatttttacaccttgattagctatttatatttcttccattaattgcctgttaatgtttcttctcatttttctattgagttgtctctttktttatatcgacattattgattattacacaggcctcaaatatatcccctagtatgctcttgatcttttaactcttgtttatggtgacattttttttcaatgtagtcaaacttttcaatctctgatggcttccaatttcatatcatgcttagaaaagaccttccatcaacattctcttttcttctaatttgtatttttacatttgaatatttaatatacctgaaatttatttttgtgtattatataaagaagatatttaacttgatttgtattyttaaaattatattgagttgaaaatccatccttttatactgatttgaagtaccaccataatacttcatagtgtatggtaatatacaaaatatacakctgttatctgtgctcttccactgatccgtctcttttattctatcaatactaaagattattagtttatactgatggcatagctttttctctttttcaaacatttcttggcagtgttcttttttttttttttttttgagacagagtttcactcttgtcgcctaggctaaagtgcagtggtgtaatctccrctcaccacaacctccgcttcctgggttcaagcgattctcctgcctcagcctcccgagtagctgggattacaggcatgtgccaccacacccagctaattctgtatttttagtagagatggagtttctcaatgttggtcaggctggtctcgatctcttgacctcaggtgatccacccacctcagcctcccaaaatgctgggattacaggtgcaagccaccatgcccggcggcagttttcatatatttactcttccagatgaaccttagaaactggattttaagaattgatttgtattttatgctgttttgtgaggctaacgtgaataaccactacactatgaaacccattattttgtttttttgttcgtgtttttataagtcatttcaaagtctctttagaataagccagacacaaattaattagttaatataaaatcaagttcaatggargcaatcctgtaccagttcttaattttattacaaacaagttccagaaaaagagtgaaaatttccccaaaaaccatttatttcctttttaatttttaagttattatctaaggaatatggttgatgaaaagggaraaaaagtattaaacctktgtgcttcttttagagaattcaaagaaagtcaggttgttaataagacttyaggaagcaaactttgaaagcaatcttgaaaaagaactcctgaggttagaatatttggtagcaccggggaggaaaacgggttccactaaagtccttamagtgtttaaaaaaaaaaaaggtacatgtatacatgtataacaaacctgcaagttgtgcacatgtaccctagaacttaaagtataataaaatatatatataaaaaaataaaaaaagaatagaataagtgaatgctgatgtaggcagaaaagtgggggctgagattgaattgataggaatccttgtgtctttcttttatgttatttttgtctctgtttctttctcccccacacccctcgtgtgtgtttgcgcgtgcacgcacgtgcacacacgtgcacacagcaggatgagaaggggaggaggtaggaggatacctgtgaaataaatatttgttttattttcagtgaaaaaattataggccaaaaattagaaaatagtgacagttataatctctttgtagatatttgcatttaaggtatcrtcttttctttcttttagaaaataggcgagtaaccaagtctgatccaaaccaacaccttacgattattcaagatcctgaatacagacggtttggctgtactgtagatatgaacattgcactaacgactttcataccacatgagtatgtaatgtgtttttttctgtgaaataataatattacttacaaacctttatggctagtatgattttcatactacttattaaaaacgcttaatagaaaatgaaataaagtaattcactgtaattctactatttcagcacatgacattttcccactttttctgtgtgtgggccatgtttctatatgtgtatataaacatttttacaattggaaaacatcatcagccataattgaaatcccgatgaatatatttaaggtttctgtgacctttgttagaaagtttttaaatgtagaatctgtaaagccattaaatattatatctgcatttctccatctgctctagcaaggggccagcagcaattgaagaatgctgtaattggtttcataaaagaatggaggaattaaattcagagaakcatcractcattaactatcatcaggaacaggttttacttatttttgaactgctgcttttccttgcatcttactactatttttttgttgtcttgaggatggtgatgatctaacacaatttaatgtttttcaggcagttaattgccttttgggaaatgtgttttatgaacgactggctggccatggtccaaaactaggacctgtcactagaaagcatcctttagttaccaggtgttgcatttttgttttttttcttattgatggttgaaaactgaaaattgtatttaacttttgaaattaacctaaatgttttctttaacatgtgagttcagtacatttcttaaattgaaatagaagttttgatttggacataggcttaatattaactaattttgttaggcaaatattttgttagagaaactgtcatcagtataaaccaattcatagttattatttaatgtttctggaggactgcatacttagtaataaattcaatattaatcaaattaagcaagcatctggctccttactttgtaagtgacataaagcataggttgggcaactagagtgcagtaaaagcctttgcatatctttacttagagtcttttttaaaaatatctttgcaaagtaacatcaatgcctcaattatgtatttattttttttctttgagatggagtcttgttctgtcacccaggctggagtgcagtggcacgatctcagctcaytgcaacctccgcctccagggttcaagcgattctcctgcctcagcctcccaagtagccaggactacagaggtgcaccaccatgcccagctaatttttgtagttttagtagagacggggtttccccatgttggccaggctggtctcaaactcctgacctcaggtaatccccctgcctcggcctccgaaagttctaggattacaggcatgagccaccatgcccagctgcctcaatgattttttaaaataattttatgaagttttaaaaattgtttaaactgttagccagatatgctgtcatgttaactccctatttctcacatcctgctagatttactcaaaaagcctaatgaagatttttgacctatattgaagtttttttcctataaatagcatcaaacttattttattctattcattagaaaagaagtttagttttaatattgcaaatttatattctctccaaggagtttctttgtatggatttaatatttaattatattttcataggtattttactttcccatttgaagagatagacttctccatggaagaatctatgattcatctgccaaataaagcttgttttctgatggcacacaatggatgggtaatgggagatgatcctcttcgaaactttgctgaaccgggtatgtaatttttaacttctctgtggatggggaaagaatagttcatggcaaggtcaaaataaaatctgctttaytgattttcttccccattagtctattggtttttaaatatttcaccataaakgtaccagagatacatacaatttgagaaagaaaacatggagccaacaaaaaaagaagttcatcttctgtcctctcctttgccttcctaccttttatcttctcaaacagaataacttttatgtactgttttctatattgtgggtctacataagcttttatttggacaaaatattattgcatttttacagacaagtttgaaaccactgctattacaattacattgacataagagatattttcactcattggccagaggtattaagaatttcagtggcaattaaaccagaacctaatggttttaggtcccccctcactctyagtgtcttgtgtttctatagctatttcattaccaggaagaatgttgcaggagyccattgatatatttattttttaacatttcraaactaggagtctatattagtgacattaaaatttattcagaaatcttaatgcttttttttaagagtataaatttgggtgtaagtatctctgccctcttttttctagycattctaaacgaaatcaagccattctgctgtatgccatggatctaatacaacctgttgccraaaataagtaggagggtggagatggagttttaaatgtttttggtagaactatggttttaaaaggcctatgatattaacatttctgttttcccttatgatgcgacttgggtttttgaaattgaggacaaatttttagaagagactgtaagctagagttttttcagaatagctatgagaaataaataattattaattttttaaaacattatctcataccactttagatawaatttaaccaatatatcatttatggcagaaatgatcaaagcaatttaaaaaccagtgtttccttgaagtaattgttttcrttttatttcttgaaccattgaaagcaatctcttttctgaacaggttcagaagtttacctaaggagagaacttatttgctggggagacagtgttaaattacgctatgggaataaaccagaggactgtccttatctctgggcacacatgaaaaaatacactgaaataactgcaacttatttccagggagtacgtcttgataactgccactsaacacctcttcacgtagctgaggtacagaaaaacaatttatctacattaagaaaagaaattcagtgttccttcctagctttccttaagtaaactatgcaggtaaatgtttccttttgctagttggacacaagcattgatttggtggtagtatttatcactattgcataattagcataattctaacaatcttttgcagttgttatggaatactgggctataaaatatttaactagctaattttaaaattttaatttagggaagttgatcacgtttctgataatatggagtgcaatcatattggctactgtgaatacataaaatgttaatttttgttatttttaggttgctttcaatatattttagaagtgactgtgaaggtgaatagcttattacacattatagtggtgtgtgcctatagtcccagctactcgggcggctgaggcaggagaatcacttgaacccaggaggtggaggttgcagtgagccgagatcacaccactgcactccagcctggcgacagagtgagactctgtctaaaaaataaattaattaattaaattaaataaaaaataaacattaacattatagcatattgaagccagtctagcctcatcgatttaatttttattatttataaaaattataagtgtaaacataaacattgtctatttctctttgagctctttacaataacttctgaacaatgccaatacttatagtattaacttctatctaatacaatctttgtaattaaactcataattttcatcctgcttataagttttttttgttatttttagaaaccctacagtggcactgcttataagatttttgataccttactagtgaccagtgtcacttaggtgttctttggaaatgtgtgcttacctaaaaaatgtctatttctataatattaaagcagtattataatatatatttcaagtcctakgatgaaaaattgatttgatttggagggatttagtgaatattagttaagctggtagaacattgtttagttccaaaaaatgacrgctttattttattgtgcttttagcaatagcaaaaagaaatatgcttctaagattgttacatggcagaaaagaatgttcaaacttaatttacttaattttaarttacaaaatctaggattctacttgttagctaatagagtttcragtattttattaatctttgtgcaaatgttgtgtttaacagtttggaaccaatctgattttttattataaaccagtgtttataataaacagctagatagatagcamcagtgttaaacgtaaatcacacaagtggaaattgtaaggtgtaagagtttttaagagttatttatcatcatctgtaggagaaactggcttcagtctggtcagacaaatctaatctttccaacagctaagtaattcaccagcagggaatttatgaataattatttagtcaaccacctggaaattaagtctgattaaagttttaaaaataagcaagcaggcccaggcacggtggctcaygcctgtaatcccaacacttttaggctcaggcaggcagatcagctgaggttgggagtttgcaaccagcctgaccaacatggagaaaccccatctctactaaaaatacaaaattagctgggtgtggtggtgcgtgcctgtaatcccagctactcgggaggctgaggctggagaatttcttgaacctgggaggcggaggttgtggtgagctcacatcatgtcattgcactccagcctgggcaacaagagcgaaacttggtctcaataaataaataaataaataaataagcaaacaaaaaacagggagaaaacctaacagaattgtagtgttatgatttacatttagtaatatgaaactaacatttttcttcttcttttcctctctcatgtctcaatatctttgcaaaatctaatcttcctttttaaccgttttcttctcttgataaattctcttgtttctatgtgttttggtatgtttgatatcttgctgcatatttttctatgtcaaatcatgcctccttttgtctctttscttcctcctatcttgcttttctctttctgttacatttatttgttacatttgtcactgtgctttttacagtacatgttggatgctgctaggaatttgcaacccaatttatatgtagtagctgaactgttcacaggaagtgaagatctggacaatgtctttgttactagactgggcattagttccttaataagaggtaggcttgttggagtgtatttccctctaaaactttagcttttgtttaagtagattaaaggatttaatagcttcatatgcaatgcttaataattttttaacacagttaatgttcttctaaatactttgtatgacatattctaatataactcagtctatttttatcagtataaatttctactttggggtaagatacctcatttcaaattgaaagaccagtaggatgaactgaagactcactaacaaaaccattttttgttgttgaaaatatgcaaacctgtttttcatcttctactgggagatatgatgtaatgtttagatgttttataatcaattttgtatagcttacatcccagtaaacaacatatgttcccttttccttacatgagccatttctccagttaagttatggggaaaacttttttgtcacttaaactagtagacatttgtttaaatccttaaagcagttttattttttataatattgatgtggtctttattttgaaaatcatttatgagaagaaatctaacctcttcctggacataaataatgaagattgttaaaatattctgtaatgctctgcagaggcaatgagtgcatataatagtcatgaagagggcagattagtttaccgatatggaggagaacctgttggatcctttgttcagccctgtttgaggcctttaatgccagctattgcacatgccctgtttatggatattacgcatgataatgagtgtcctattgtggtaagcacctaatctttttcatgtacttattttgctaaatgctttgatatttaactctctgacacttggtcacaatcatacccatatacttcaaaatagtgtcttagatttataactgatttataatacatagttttcagaatgttttacttgtttaaaagcaaattaatttaccttatgaatttatttatgtaattatccttttacttcattatgctatagaatagcactttgcatttgaaagaaagcaaacttttgctttgttgttgttgtcttctagcatagatcagcgtatgatgctcttccaagtactacaattgtttctatggcatgttgtgctagtggaagtacaagaggctatgatgaattagtgcctcatcaggtttgttyatatgttgtttcttaaaacctacatggccaacaactttgggcatttttattaaaaaaaattcattgtaattaagatgtatccatgctaaattttacctttgtccagatttcagtggtttctgaagaacggttttacactaagtggaatcctgaagcattgccttcaaacacaggtgaagttaatttccaaagcggcattattgcakccaggtgtgctatcagtaaacttcatcaggagcttggagccaagggttttattcaggcaagaaataattaaatttgtttcttcaggttcaatttcagagtaagtctttccagtttgagagctaatctagttgttctttctgcttctcaggtgtatgtggatcaagttgatgaagacatagtggcagtaacaagacactcacctagcatccatcagtctgttgtggctgtatctagaactgctttcaggaatcccaagacttcattttacagcaaggaagtgcctcaaatgtgcatccctggtaatgcaatctaaaaattgttactgtatttgtattatattattatattaaattatactgtaatgttatggttatatatcatgtatatatcatatatattataacacagtgctactgtggacgtacttgagaaaaagaatttaaactttttggtaacttggccaggtatgatggctcacaccagtaatcccaacacctcaggaggctgaggcaggmagatcacttgagctcaggagttcaagaccagtctcagcattatggtaacaccctgtctctatcaaaaaaaaagtacaaaaaattagatgggcatggtggcacatgcctgtagtcttggctactcctgaagctgaggtgggaggatcgcttgagcccagcasgcagtggttacactgagtccagatcccaccactgcactctactgggtgatagagtgagaccctatctcaaaaaaaaagaaatttttggcaacttatatttttactgcatggaacaaaacctagacagaaatactttcaaatgttaacattttttgagttgtgaaatatttttgtttatattttatttcctaatttgtgtaaaatgaacatttatttctcttctagcagaacaatatgtatatttgtgttagtgtatatgtatatatgtgtataaatgtctttgtgtgtatatatgcacaaacatacatacaaacatgcgaactaaaatggaaaataatataaccttatgtttaaggcttttcataatccattctcatccaccatcctagccctatgtcagtccactatttcagccaaatagatatttttacttctccccaaatactatgcgaattgtctggatctttcaaggtctaaagttgcacctcctttgttcagtgattcttctgaacatgtagcaattatagtctctatgtattcctctagcatagagagtcaaaaattataaaatacatccctgagatatgtccttaatattacttgatttttttctggataggtgtattttattgtcttacttactattatatgtggcatattacagcatagcatgctcctgttcatgcagcagctggcaaagtttgttgattgattgaccaaatgaaaattcctataaaaatcatcatattctatattggttgctagttgctgaatatgcatagttccggtttttaaaaattatcaacctgaatacctaaaagtttctttaattgttcacaaatgtatattcactatccttatctgatctttgctaatatacgtattcagttttataggacaacaatcactgtgtacaatattatctcaggttttgttttggtcacrgatcattcttaaaacatttccacttcagtccgcaaaattgtgatttttattttgttaaatgttcgtacgttctgttattatgcccttttaaatattctatagtatgtttagtagtgttactaagtgttaaatatacagtaaggataattgttttttcttttaaacaattttcttagtgtatatttacagaggtagaatttctagatcaaaaggttctgttacctgttgccagattaatgacttaaagcttaagttatttaaagtaaggttgaaattttatataatccattgaccctgcagttctatccctaggtatatatctgggaaactttcatatatttccatttgaagatatgcacaagaatatttattacaacattatttataatagagaaaaattagagacaaccttaatagaacagatatattttggtatattcatacagtagaatattatttggcatttgaagtaaatgtgctgtagctgatgcagcagtgtgaatgaatctaaaaaatacattgttgaccactaaaaagcaagttgcaaatatatataacttcaattcattttaataaaacttggaaatagggaaaataatatatgttgtttaaggaaacaggcatgtgtagtgaaaatgccaggggtagtgagcaccaaactgaattgaggttacctctgaaagtgaagaatgggtacacagaggctttattgtatttgtaaagtttaagtgaggaagtagaacttgggtttttaatttttttttgtatccgaaatattccaagttttaaaaaaatgtmagcctttcaagtgatttgcttttctctgctcaaaattaggaagttgttccctagagctaagctattattttgatacgtttctacttcaaaaaaagctttgttaactaagctgtaattttttttacaaatgtgaaaatacaccttgggtagaatcatctactttcagacttctaaaaaaaagtaactgataatttgttttcaactttaagttaaatgatttgaaaccactttagccttcctaattttggatgattccatatgaaattttgttaaaatgtttttatgtattcctaggcaaaattgaagaagtagttcttgaagctagaactattgagagaaacacgaaaccttataggaaggatgagaattcaatcaatggaacaccagatatcacagtagaaattagagaacatattcaggtatttgggactctcatcttactactgtgtttagcattttaagaacattagaactatttgttgaatggatttttttaatgtactttttttcaagcttaatgaaagtaaaattgttaaacaagctggagttgccacaaaagggcccaatgaatatattcaagaaatagaatttgaaaacttgtctccaggaagtgttattatattcaggtatgttaattgagctcaaactgttgactttacttatatttaaaatagtttgcatatcctgttaaatttgaataaattactcctaaaaattaaccactttttaattaacattttcagagttagtcttgatccacatgcacaagtcgctgttggaattcttygaaatcatctgacacaattcagtcctcactttaaatctggcagcctagctgttgacaatgcagatcctatattaaaaattccttttgcttcgtaagtatgccttgtttggtagagatttgccaccttaataagtaagttaccactagaytgaattaagcagttttaagggtcctctatatccttgctactcaaagtacggtccaaggaccagcartgtcagcatcacctgttgttaacattttaccctattgttttataatttgtgtgtgtacctgcatgtgtattctctctatagatatagatacacacatgcctacatgcatacataacacatgcatgcatctctgtatacacacacacacaatttctctgaagtatttgagactaagttgcatacctcataccctttaccacatcattttttaaaaatgtcaacatattattctactttatggctttaccataatttatttaaacaatttccatttttggacatctagattgcttctaattrttccctattatttatgtctttgtacattcatctttacatgaatccttagttattccctttctagatgtttctgcatactacagaagaatataggttttgaggtttagacctaggtttaactttagcttcattactgtcagtatgatcttggatctattgtttagaactttcatcatctcagtctcccatctggaaaattttgtaagaattaaataggataacacttataaaacacttaatacaatgcctggcacatagtaaatgctcatagtttgccatcattagtactagtataaatattttcagaaatggaagttttgggttagacgaggggtccccaacctctgggccacagactggtactggtccatggcctgttaggaaccaggccgcacagcaggaggtgagtggcaggtgagctttatctgtatttacagctgcaccccatcactcgcattaccacctgaactctgcctcctgtcagatcagtggctgcattagattctcatagggacgtgaaccctattgtgaactgtccctgcgagggatttagattgcatgctgcctatgagaatctaatgcctgatgatctgccactgtttgccatcacccccatatgggactgtctagttgcaggaaaacaagcttaggggtcccactgattccacattatggtgagttgtataattatttcagtatatattacaatgtaataatagtagaaataaagtacacaataaatgtaatgcacttgaatcatcccaaaaccacgcccctcacccccagtctgtgaaaaaatgtcttctgtgaaaccagtccctggtgccaaaaaggaccattgggttagactatatccatatatttgaggctgttaatacatactgccaaattttctccagaaagattataataattaatactttcagctctatccaagagtttccatcattascaatactgagtatatatyattataacgtagtgtttaagggcatggagtatagaaccagactaactggrtttgaattccawtgcagactcttattagctataagaagtaagacctggctgagtgcagtggctcactcctataatctcagcactttggtaggccaaggtgggaggattgcttgagcccaggagtccaagaccagcctgggcaacatagtgagaccctatctctacaaaacgttttaaaaaaattagctggaagttgtggcatgcacctgtggtcacagctgttcaggaagctgaggtaacagcatcagcatcagttgagcccaggaggtctaggctgcaatgagccatgattgtgccactgctctccagcctgggcaacagagcaagaccctgtctctagaaaaaaaaaaagagatctttgagaatttataatagacataattatagcacctttcttacagattacttgagtaaaacacaatagtttttgacacatagtgattgataagtgttagctgttactaatcaaactggtaaatataaaatagttaaaaataacatctcatgtaatttaaatattaagctaaattattttgttcattggccatttgtatttatttgttgaagtgttgttttatgtattaccccattttgctattgtgttcggctttctttgttgttttgtaagactttttattgttaaggatattaactcctaattcaaactattcttaataaagtagttgcattcttaaccaaaaaatctgtgatgaagcagctttgtgtttggatggactgcttgtaaaatgcatgttcctcctcagacmtgctcagattattttggagcaaggccaagaaatttgcagttttataagatccccaggtaatttttaggcaaggagtccactggctattgaaaaatattgtcctagaatggagttgatactgagacttctgagtgatttgactcaggcttgactcacaaactagctctggggagggaggctgatatggagagaacaaagcacagatgacaatgattttctaaattgagccagaactaaatgggaaaraaagatacacattcaagaggatatgtgttcacataaaatrgcagtcatgtaaaatgaaattacctgagcatctattatagaagcacaagaaaatacagtttcagctgtattcaggtgtggtcagttatacagtcttactgctaaccaaacaaagggaaatcaaggccatgatagtcttccctctgacagttatcaggaggcatcttaatctgagaaaaatcctggtttcttgaataaacaagctgaggggcagtgcaaccttagagaagagaaaggaagggacttggagagaaatatgaaggyagagagcatgtgatttcctaggcaattaactttgactttttattcctttagtcatcctctgataagtatttttagtatacaataactagcataaaaagttcttgatgtctcacttaggggaatataaaggagagaaatcagatgagaacacataaataaatgaaggaaggaaggaaaacactaagtccaaactagaaaggttaaaaaaacagatttataagataaaggatatagaagccaaaatattttcccagcatacttctaatcaatacaatttggtacttgattatttgcttggtttgggagtaatgtcgcttctaattgaattttttttcacaatttgtcctttaataattacttaaaatgtatgagtataatgtttatttgaatgctgagttcctaaaacatacactgctaagacattttatgattgtaattcagattttcttcttttgtttctattgacaacaagcgawacttcaatatatggttatctttattttccaattcttagtcttgcctccagattaactttggctgagctaaatcagatcctttaccgatgtgaatcagaagaaaaggaagatggtggagggtgctatgacataccaaactggtcagcccttaaatatgcmggtcttcaaggtaagcaaatrgaaggatagctgagctttgtgtttttcttttagggtcatctggtgtcttctttacagacatagatataggctcagagtatgcctacttgggttgcaattatggctctgcttctgctcattaattgacctttggcaagtaatataacctctttgtgtgccaatttctgcttctataaaatttgaataatattatctaatttagaaggtttttgtgaggattaatgagatcattcacataaaacactgaaaacaggatgtaacacaaagtaattacccagtaaattttacctagaaatactagttctatctctttccttaaggtctgtatagctctttatgtatacttggaccttgattaatgtttcttgacctggtttattatataataaacagaatattcttgtttgggccccaagtgggattaggttgtaaatataatccattcacctttttttaaatctaattggaaatatattttattgcatatttgttttatcctgtaaagagaacttacagtaaaacatacagtagttgtaagatgagttaaaggaattaagtatttatcagttttattcatctagttggtaatatttacttagatgtttaagaaatttgctttatcacacctgtattcctggttcatatagttttcacttatgccttttgttcaactctttatttctttctccatctaacctatctttaaggactaatttaattcttgcatctttcataaaaccttctttaactattgctttttacagtaatttctttgtcctccagacaccattgcatttattttctatacctcttacttggcccttgaaatatattgccttattttgatagttagtataatgatttttgtgaatctttatcattgtgattaagaaacaggctttaaaaccagatttcctgggttacattgactagttttataacctgaagtaaatgctctatggcttacttttccmctgcaaaatggtrcctaccacagggattatggttaggattaatgaattaatacatgtgaacagctcattagacgacacctaattcatactaagtaattggaaattgttagccttaaaaccacactaagtaggctgcacactttcagaaagaagaattaagttttatcttttttatgcttcttgtcttttagcttttatactttctgcaaaaccaagcacgtaagcggttctcaataaacttttttgagactttttggatttatgatctttttttctaaaatattctcatttttaatacaaaatgttttgtgctatgagtaagaaagaagtgtatgtgagccagacatggtggcttccacctgtaatctcatgctttgggaggccacagcaggaggatcacttgagcccaagagaggtttgaggctgcagtgaactatgatcatgccaatgccctccagcctgggtgacagagtgagactgtctcaaaaaataaataaatttatttatttaattaatttttaaaagatgtatgtatgttatcagatttgagtaattatctacttcattttcactctgagttgttaaactacttctagttcactacaaagaccaaayttgtgtgtgctctttttctagcctttgtctttcttatagttaagtttggttctttgctaattctccttatctttctaatgaaatgattcttcttatcttttctaaatagaattgcctttacctgtttattttttgctgctttataccaatcccttttccctctgattgtttaatattttcagcaggccacatatttccagcaggctgctaataagagcctcagattaaatcagatttaactactttgttgacctgtctttcccttaaacaaaatgtatttccctccttataatacrgtatatctagtcatgttggaatccaggaatccattttggatctgctcctttcatcctcagtatccaatcagtcattatgatttgtggattcttttccatgttctgttgggtacaccatatcctttttattaccacagttttcactctattctaggactaagtcctatatacaaaaccaactaaccaattttccaaatcttgttacctcatctacaaatcattccattccgttggtcatcatcagatctgtttctaaaacactgttttccttatgtccttccattattcaacagtgagaccaacatttaccgagcattatctgctgtccatgaaaatgcyagggcatatgtagaatattattttatagtcttgtttcccaacatctttatgttttaagctttcttccccagagaagattgtgagccccttgagggaaagaactttatcttaaatttatrtagtttttagtttctcaaaacatgctacatacctagtaaaattcatgcaattctaaatagataaataaatttagtctwaatgaagtcagtgatgccaatataatttttaaggtagcatcattgaaataataaaatctgggaaattctaatgcttctaattgaagactagaaggattaagaaaaaaaaaawatatatatatatacctcattttgatacttcacttagttctaagtacctcctgttaaattttaacaattccttccaaagcatgctttattcttattatctccataggtgttcttgctctttctgaaaccagttctatgacttccttaaatctagcctgaatactgatgaacccactacttttcaacatgaaaaaatacaggcttattacttttctttcttgagatgcttttgggcagggaagccatgccagttacccttgaatattataacattaaaatccaaaagaataagaccagtcccagaagttatgaatcctgaaaagctctttatatctcttgtgacagtagtccccttcagtatgcctttgtaacttggctcaagccagtattgtcatacttatctccaactgtattaagcagtgttgtggactgggtagcccttgtgtgtgcctctaataygtattcmccccaaatcactagaatagagactagcagaatagggactagaggatataggaacaaattgatgctaccaataatacagcrtgacatgtctctgaattttcaggtttaatgtctgtattggcagaaataagaccaaagaatgacttggggcatcctttttgtaataatttgagatstggagattggatgattgactatgtcagtaaccggcttatttcacgatcaggaactattgctgaagtaagtagagctatattatcgtcccaaaaaatcaaggacataataataaatattaccatgttatatataatatttacattgttttctaacctgaaccattttcctccttccttcatcatctttcagttrtaataaatggaaatcgggtttatagattactagataaagttgcacatttagatttacctctaaaaacacacctagtctgtacacataccaaattaacttwcaaatttattttaattacaggttggtaaatggttgcaggctatgttcttctacctgaagcagatcccacgttaccttatcccatgttactttgatgctatattaattggtgcatataccactcttctggatacagcatggaagcagatgtcaaggtatatccaacaaagcttgaataaatgggcatatctgtgttgaaactatatrcagagtcacttcatacatgttcttaaaaaaccmaaccataaagaattgtcatagaactgaaaaggcttgtaggtggatagtaaatttattagcatcctttagtctgtgtagcatacaaaaacaaacttgaatattataaaatctgttctaaaagctaataaaacatattgataagaatattgttttatattgtttctatgtattcactgacttattgagttaattgataaagtttctgaaatctacatgtacaawttttctaatttttcatcaattaggagaaaaaattccactattactatgaatgaaatttgcctttaatgatgaatttccctaaaatgaaaccacaaatttaagtgtactcgtgagagccaccaaattgattaggacataatttcacaagaacaaactttcatttctaccatttgttttacaaccatctgtggactgtaagccagctaaaataatgggtgaaatgaaagcagttttgaaatctaaccaaagttttaaaaatgttaagtaatattactattgttatagatttgtatagaaaaatcatttgaaggaaagaaaccaagtaaaataaaactgctaaaaattgtatttctacaagtaataaattcaatcacttttgttacagctttgttcagaatggttcaacctttgtgaaacacctttcattgggttcagttcaactgtgtggagtaggaaaattcccttccctgccaattctttcacctgccctaatggatgtaycttataggttaaatgagatcacaaaagaaaaggagcaatgttgtgtttctctagctgcaggtaaggaattatgtacaaggttaaaatatgtaaatcratagtattcgcggaagaaaagttataggaaaatgattattttttaaaagcttgtaatgctactcaagattttattttaccacttagtacatttcatagatattcactcataaaaataataaccatgcttactgtttaattataactgtgcaccaggcatttatgtgtgttttttatggctagctgattctycatgtttctattttttccaactcttgacattctgtgtttttttaaatcaaatttattttrctattctcttttctatattttcccccaattttaaaaaataaacccaatcttgtaattatcaagaggtcatgtaagggtccctataaattataaaacaaaacagatgttaaataattttcatcatgtgtctaattggaatcaaatgctttcaacatttgaataaatatcctttattccaactagatttaaaacctgaatcaagtaacaaattcaagtaagcaaaataggctaaaggacaggcttttgttttctttttaatacatttcaagcatatttctagaaagtacttagtatttgaggtgactgaagtttagaactttccaaactaaactgaaaaatatcaagttacaggaagaaagaaatagtattatctgtgtaattccctcttttacccttaaatttgcagctacttagaccagataaaaagacttagtgatacccaacaactaaaatgaaaattacctttccattaaaaatgttcatgaaacattcataaaacgttgtttaagttctataattgtgtttttagattttcatttgactgtttgatctcctggtacccgttgttccctcatgaatccatgcagatgctcatgaaactgaccttagccataggggcaaaggaaacattgatgtaaataacttggttttaaagcctactttttagaacccattacaaaaaatagtaatttcaacctttttgattgtgtactgctgttgttaaacatcttcaaaatatacactttaaacgatatactgatataaactgttacatctgacatacttctcaggtacgatataaaacaaataaaaactaaaaaattaagttgataaacaaatacaaatagaagtgtgatatttgctcctagcatcccaagggartgttttgcctattccatacttgtaaaaaataggactgtattcagatttgcagataggttttttggggttcattttaaactgattggggatgtcttcctttggttatagtattgcaacaacagcaattaaaaacaatggttcatacctgtaatcccaacactttggaaggctgaggcaggaggatcgtttggggcagggagttcaagaccagcctgaacaacatagcaagaccccatctttaccaaaaaaaaaaattaaaaattagccaggcatggtggtatgtacctgtagtcctagctactcaggaggctggggcaggaggatcccttgagccaaggagtttgaggctgcagtgagctatgatcacaccactgcactgcagcctgggtgacagaggagaccctgtctcaaaaaaaaaaaaaaatttgtagcctgttctaataattgacaaattagaaatcacttagaagatatggaatctattagttgtgtactcttagaggtcaaaaagttaatacaaacatttccatayatagtgctagagattttatagttttgactttttcacaaagacagaccgcatatatttttggatataccgattcagactcacctttgaatctacctgtattcatgtttcatacaaggaattaaatgggtcagagtaccaggaagtgtgtatggcacagagtgctatatatatgttagctgctgtcatcactatcatcaaaattaatatcatgtatatatcaaccatatataaaccatattaatcataaataaataatacacagtgtatttggggaaattttgtaccgtcattttggagacaacataggtaggaaaaaggtctaattcttatctttcttaatggaagaaactaacatctaattcccaataaacagaaacttaaattgtgaagtacactcaggaattgccaaaactttcttttatcttagtcaaattctttcacttttcgatctacattttaatatttgttttttatttcagtcatcaaatatttataggtatatattatatacagttacaattttcartgaatacatacttgttggtgaacaargtagatgaggtttctactcataggtcttatttcctactgggaagatatatgcattcaacagatagcaaacaagataattttcagatagcgttaagtgcttttaagatagttataagtgaatgctgtgtatattttatttgtcctcagtttcccctaaccaaaatatgtgttatatttatgctttggcataattttttttcttttgagacagagtttcgctctttttgcccaggctggagtacaatagcgtgatctcggctcactgcaacctccgcttcctgggttcaagcaattctcctgcctcagccacccaagcagctgggattacaggcacccactaccacgcctggctaattttttgtatttttagtggagatggggtttcaccatgttggccaggatggtctcgaattcctgaccttactgttttataagaaaccaaactcaatctttaagtaaaattttagattgcaccattaatcatactattttatcttgtatataaaacctccaattacctagaatgaaggatttaatgtgccagataacttgaagtgacaagtaaaattgtacatattgtgtacagaatataacacttttaagttgttttaaattagtgggaaatttgataatgttgactcaagtgctcaaatgttgactccatatacttaattaggtatcattaaggtaataatttcatgtttaggtttatttattgtccttaagttcaaggtagagtctttttaaatatataattaatatttagtgtttatgtgttaaatatttgatctctgattttactctttagatttaatttataaaagaaagtttggccaggtacagtggctcctgcctgtaatcctagcactttgggaaagcaagttgggcagatcacttgagctcaggagttcaagaccagcctaggcaacctggcaaaacctcattctctacaaaaaatacaaaaactagccaggcatggtggtgtctacctgtagtctcagctacttgggaggctgaggtgggaggatggcttgagcctgggaggtggaggttacagtgacgcaagactgtgccactgcactccagcctggacaacagagccagaccctctctcagaaagaagaaaagtttatctgtgtattcacacctcaatttagataagtatctctctatagctctggttcttaatcttctttaggtcataggttcctttaggaatctgacaagataatggaatctcatttgacagaagttaacataagtatagacatacattttgcaaataattttagagggttttagaggatttgcaggtgcctgccttgtaccccaggtttagagtaactgttctatagtaatggagttcataggtttgtgtgtattattatgattaacatattactttrttgtgttttttttgttaggcttacctcatttttcttctggtattttccgctgctggggaagggatacttttattgcacttagaggtatactgctgattactrgacgctatgtagaagccaggtaggagagcctctaaagtgttgtactgcgagtttatgtctgaatgtcttttacatgctcttcaaactttccttcttgtccatcttttcttaacatttgggagctgtattttctttaggtagtttttattttatttttgtatgttcacttaataggatcataaaatttcaaaggggtgaaaatctttgaagtcactaagttctagtccttcatattacaagtcaggttatctttarcattagctaatttatttcaacaaaactaaaaatgttataacctttttatgccttccatagtgaaggcattgctagttctttgtctgagtcttgtagaagtcttgatgtttccctctatttgttgtcaagccttgtaacctccagttttatgttttctagacttaaaatggttttttttgtttttgttttttgttttttgtttttgagacagagtctcgcactgtcgtccgggctggagtgcagcggcacagtctyggctcactgcaacctccgactccgcctcccgggttgaagccattctgctgcctcagcctcctgagtagctgagattacaggcgcccgccaccacgcccagctaatttttgtatttctagtagagacggggtttcaccgtgttggtcaggctggtcttgaactcccgaccttgtgatttgcctgcctcggcctcccgaagtgctgggattacaggcgtgagccaccgtgcccggccgtaaaatggtattttttttaatgtcacaataatatgaatgaacttattggaggtcgaaaggaaagcactacagcagtgccactcaaaatgcattccacacatcagtagtgtcaccctcacctgagagcttgttagaaatgcagattcttggaccctatgccaaacctcccaaatccaaacctggacatagagagagtagggttggtgggcagaaatctgtgttttcacaaggtctctggatgattatcaacagtctaaggctgaagtttgaaagcactgctctaaaagataaaactttcagcaaaagggcatttatacgataccttgttttgatgccatcaggaaaataactgaagtttgcrtctttacatgccaaaattttatttttgatacttttaaaactgaagtttttaggtgggcatctgaaatgaattgcatttttgttaatccgatatatagtaagacctttttgtattaccattatggagctatagaaatttaggaagctgtttgcttcttccctaaatgctcctgaattactgatttagaagaaggaaatggaacatcagcattcagcatagtatagtggttaagaacttcggctttacaccagactgccagcttctaatcctggttccaaactaccaactgacaaattaccttactgggtacttgggaggatcaaatgaacacatacagttaaggtgcctagagtaatatctgccacatgcctagagtaatatctgccacatgctaaacagttcataaatgttagtttttatcattattaatgtttaggctcccaattatcacctctatgcaatatcacaaatttgtgctgcttaattttacatagaactgtctagattattggttagcaaactgtggcctatcacctgttttgtatggcctatgagcaaagaatagcttttacctttttttttttttttgagacggagtcttgctctgtcactcaggctggagtgcagtggcgcaatctccgctcactgcaagctccgcctcccgggttcatgccattcttctgcctcagcctcctgagtagctgggactacaggcgcccgccaccacacccggctaattttttgtatttttagtagagaccgggtttcaccatgttagccaggatggtctcgatatcctgaccttatgatccgcctgcctcatcctcccaaagtgctgggattacaggcgtgagccactgcgccctaccagaatagcttttacctttttctttttaaagggtcatttaaaagaagaaagcatgtgcaacagaattcatatatgtcccacaaagcctaaaatacttagtatatggccctttatagaaaaggtttgcctaccccgatctagaggtgattcccagagaataatatattatcccagagggtatttgttagggtagtgctagctgccataaattataaacacttaaaatcttaatggcttttcacaaataaaatttatttcttgcttgtagtcgtagacgcatgctcagtaagcagccttctayatactgattcagggaagcaggtttcttccagcttgaggatctgtcagtttccatggcttctggggcctctccaggaggcaagcagagagggaaagagagctgggggaacacacctattctccatacacttaacatgcatcagttctggccacaaccaactgtaagattggttgtgaattgtaggaaattcgttttagtggacatatacctctaccacagatggttctacttcctccctctatagaggtaatcatgaatcagaagtcgttttattaaaatgtacaagattgttccagatggttaagattgctagcactatggccaggcatggtggctcacaactgtaatcagcactttgggagcctgaggcgggcagattgcttgagtccacaagttcaagaccagcctgggcaacagggtctcttaaaaaaacaaatatatatgtatatatagagagagctagtattctgaccttttcttaattgaaagtgtcactgtctatactaatatttttatactttgtaaataaaaagtttcccattgcattactgttgaaaagatgggcattaagcttagacatagaattaataaaaatttctgagtggtttagccaaaaagcagtaagacctagacattttaaataacatttccaaggccacacagatggcaaagctaggatttagacttcagccttcttatttcttaatttcatgctgtttctagagtgcctttctgtcttacaaacaaaattttcatttggtatataatagtaaaataatgctttaaaaaattaactgtcttcaaccagtttttaaactggttgaattatgtttttcaaggtcagcttctaccagtttgttttctttctctctctctctctctctttctctctctytttctctctctctctctttccctccctccctccctccctctctccttccttccttcctttctttctttccttctttctttcttttctttcttttttttgagactgagtctcgctctgccatccaggctggagtgccgtggcgcaatctccgctcactgcaagctccgcctccctggttcacgccgttctcctgcctcagcctcctgagtagctgggattacaggtgcctgccactacgcccggctaattttttgtgtttttagtagagacggggtttcaccgtgttagtcaggatggtctcgatctcctgacctcgtgatctacccgcctcagcctcccaaagtgctaggattacaggcctgagccaccacgcccggccttctttcttttctttcttctttttttttttgatagagtcttgctctgttgcccagactggagtacactggcacaatctcagctcactgcaacctctgcctcctgggttcaggcaattctcttgcctaagccttctgagtagctgggactacaggcacgcaccaccattcctggcttatttttgtatttttagtagagacagcgtttcaccatgttgaccaggctggtctcaaactcctgacctcaggtgttccgcccgcctcggcctcccaaaatgctgagattacaggtgtgagccactatgcccagccagtttgttttcytatatgtttgttttactcttggtttctgctatttaaaataattaagttcttrtttaatagttacttcgattttgaaataccatagacttcaaaagtagaatctggagctatgagggaccttaaaaatcacccagtccaatctcaaatgaaaaaactgtatcagagagggagtcacacagattgttagcataaaattctagtctagaatcaaggttcctgactttaattcagtacttactctatcatactatgactactttctacatgaaaatataaagaaatagggcaagagagaaaacgcattcaaaatatagtcaccaaaagtgactggtttttgtcttcartttttaagtgtttgttttcatttctgatccacttaattctgttgttttaggaatattattttagcatttgcgggtaccctgaggcatggtctcattcctaatctactgggtgaaggaawttatgccagatasaattgtcgggatgctgtgtggtggtggctgcagtgtatccaggattactgtaaaatggttccaaatggtctagacattctcaagtgcccagtttccagaatgtatcctacagatgattctgctcctttgcctgctggcacactggtaaagatatttcttaaaatgtttttttgttttttkttttttttctgaaaaatgacttttagtttctaatgtaaaaataagggtaattaagaatccaaatcttacgaattattcaaatgtcagtattgatttggcacctgctggtactataagtgattggtctttgcctgaagaactttgcaacatggtagaagagatgatgatgtgtacataaatatggccattgcaatagattgtagaggaagtgttgtgtagtctcttaaaagagagagaaggtccagtaggtaggtctcagggagaacgttagaaagtagctaaagtttcacctaaatgagccataaaaggtgagtaggactttcggagagatggagaaagttgttgggagacattagagttgaaaagaagccaggtgtatggcacacacctgtaatctcagcttctcaggaggctgaggcagaaggatcacttgaggccaggagtatgagtccagcctaggcaacatagcaaaactcagtctctttaaaaaaaaaaaaaaaaaaaaaaagaggaaaggaataatagggttgcatagtggattgaagcacagtttaggggacatagtacttaatagtgtttttgtaagagcctaggctcttataaaatacgttttgtgaaaaagtcaatatggtttggctttttgtgtaggatacctgcagggtagtaagagattatggaaagggtgagccaggttatggagagccttgactaccaatccagggagcttaaagattatcttatgaacagtgaagaatggatagacatttttgagtgtttttttttccctaatcaagaatggacaataatactatacttttgccacttctgatctgcctttatgttaatagtttgttatatatgattgggggggctgggaggggatagtagctttgtaagctactccagggttagcatatatttgtgtyctcatgatatttatttatatcatgaagtactcaacatttgtccaaaatttttttatttgtcctctgttatcaactgacatttctgttacaatgaatataggttcatgctatcaggcaggtaattattttacacataactttgttttctcacagtttatccaaaaatattcacagcattataatttttataattaatagtagaatttttatattatagagttttggttatattcagagtctttaaaatgaaacataataaacatgtaaggactctaaacattttgcttctatttaacattctttaccttatttttaaaaatataattgtatattttcccaaatgtcatcctgagtatcacatttattatttatatgggtaaagaaaatgacttatgaattctttacattcactggggtattttccaaagtcattatggatcctcaaatttgagagtttccctttagctcataatttacccccattacctgtgtatgcagatgagtaaaaatarcaatgccaatttaaaattcagatgctggataacaagctaggttcgtttattagctgaagagatcactctgatagaaactgtagaagctcactagatttgtttttgtgtatcagcagattattttatgtcacagacatgaatagtcaaaactactgatgttaaatatttgtatgctcgtctgtattatttggtatataggagctgcttcttccctggcctcaccccaattcctatttctcacttcaaaggaaagtatatattttcacattacttcagttgtcggatttgggggaaaataagaaaaatgtaatttctaacagaggtaacacccattatgtctcaaacaggatcagccattgtttgaagtcatacaggaarcaatgcaaaaacacatgcagggcatacagttcygagaaaggaatgctggtccccagatagatcgaaacatgaaggacgaaggtacagaactttaactaaaatagtacaaattyatcaaggtgatgaaattaaaccttgcaattgttcacttagtaaatatttgtgtgccaaacctcacgatataatgattaaaaagattaacatagttcctgatctcaccaagtttttagtttctagcagaaaaataaaattttatatcttttgtcagccagtttgaaagataattttggtggtttcatttataactataataatcgccatgaactgcatgcttactattgctaggcattgtggtaactactttacctatrttattaccatttaacactccccaaaacattgagaatgagtgatattgtttccattttttttaattattatactttaaattctagggtacaggtgcacaacgtgcaggtttgttacatatgtatacatgtgccatgttggtgtgctgcacccattaactcatcatttacataggtatatctcctaatgctatccctcccccatccccccactccacaacaggccccagtatgtgatattccccttcccgtgtccaagtattctcattgttcagttcccatctatgagtgagaacatgcggtgtctggatttttgtccttgcgatagtttgctgagaatgatggtttccagcttcatccatgtccctacaaaggacatgaactcatccttttttatggctgcatagtattccatggtgtatatgtgacacattttcttaatccagtctatcattgatggacatttgggttggttccaagtctttgctattgtgaatactgctgcaatgaacatacgtgtgcatgtgtctttatagcagcatgatttataatcctttgggtatatacccagtaatgggattgctgggtcaaatggtatttctagttctagatccctgaggaatcgccacactgacttccacaatggttgaactagttaacagtccccccaacagtgtaaaagtgttcctatttctccacatcctctccagcacctgttgtttcctgactttttaatgatygccattctaactggtgtgagatggtatctcattgtggttttgatttgcatttctctgatggccagtgatgatgagcattttttcatgtgtctgttggctgcatagatgtctttgcccactttttgatggggttgtttgtttttttcttgtaaatttgcttgagttctttgtagattctggataactgaagcagagtagcttgcccagagtcacatagctactaagtggtagaggtagactttactcatggtctatcttgagagcctaggcacttacaaaatactttttgtagaaaggtttatttgtatatggtattaaaataaatgtgcttttctaacttctcttgagttcaccatattcgtcatctcatggcacactatcatcgccgccaatgcaaggctaatagtaatttatttcattttattccccattccccttagtcattccaatgtgtttattatatatttattttgtaaaacatgcattgttttatgttcatgtgggttttttaaactttgtaattttgaaagattagactcacaagaagttgaaaaaatgatacatagtatgccatgaactcttcacccagtacagcatcagagtcaggagattgacattagtatgttttcaacttttaaaagtttttacattcacttgtgtgtatatgtgtatgtgtagatccgtgcaatttgaccccatgtatagcttcatgtagccactgccataatcaagatacagaactggtccatcaccataaagatctttgtgtacccttttatggtcacacctgaccactccacccccaaccctggtctctctggcagctactaatctgttctgcaactctatagttttgtcattttgagaatgttatatgaatgaaaccatgttctatataaccttctgagattgattttttcactgtgcataatgcccttaagatccatccaagttgttgcatttatcaatagtttattcctttttattgctgagtagtattcccttttatgcatataccagtatttatttaaccattcatccaaaccattcatccattgaaggacatttgggttgttttcatgttttggctaatacgagtaaagctactrtgaacattcatgtacaagtttttgtgtgacacataagttttcattttttctgggataaatgtccaagaatgggattggttcatatagtaagtatatgttttgttttagaagaaactgccaaactattttccagagtgttttaccattttaataaattcccgccagcaaactggagagatccagttttgctacatcttgccagcatttggtggtacccctttcttttaagctgttcagatagcttcatagaccactacaaactgtgtgtggtgggggggtgggtctgagatggagtcttgctctgtcccccagctggagtgcagtggcgcaatctcagctcactgcamtctctgcctcctgggttcaaacgattcttgtacctcagcctcccaagtagctggactacaggtgcatgccaccacaactagctaattttttgtatttgttgttgttgttgttgttgttgttgttgttgttgttttagtagagatgaggcttcgccatgttttggccaggctggacattgtggttttaatttgcatttccctaatggctaatggtatggaatatcttttcatgtgctcattkgccatccatcttycctctttgctgaaatgtcggttcacgtattttgcacattgtctctttctttattattttttagagacagggtcccactctgtcactgagactggatggcagtggtgcatcatagctcactcaacttctaattcctgggtttaagcagtcctcctgcctcagactgccaagtagctgagactacacgtgtgcaccactgaaccaggctaatttctttttttaatttttttgtagaggtgggagtctccctatgttccccaggcttgtcttgaattcctgacctcaagcaatcctcttgcctcagcttcctaaagtgctgggattacagggatgagccactgagctcaatctcttttgtccgttttataattgtataattggagtgctgttttttgttttgttttgttttgtttttactattggttttttttattgtggtaaaatagacataatgtatatttaccattttaccataaaagttacaattttagccattttaagtgtacaattcagtggctttaagtacaatcacattgttgtgcaaccatcatcactgtccatctccagaactttgtcatcattcctaattgaagcaggaactcctcattatctccttccccagcccctggaaccactatcctactttctgcctctataaattcarttatcctagggacctcatataagcggaatcatacagtctttgcccttttgtacctggcttatttcacttagcataattattttttatcaatacataagagttgtacatacttagcataattcttttgaagttcagccatgttgtagcagatgtcataattttattcctttttttgtcttttttgtgataaaaagcatgtaacgttaaatttaccttagccattttcaagtgtacagttcagtagtgttaagtatattaacattgttgtggaacagatctctagaacttttttaccttgcaaaacaaactctatactcgtgaaacactagttcttcctcctctatccccactcttcccaggccttagtaaccacctgtctgctttctgtccctgtgattttgactactttagatacttcatatgagtgaaatcatgcagtatttgttcttttgtgactgattttttccacttagcataatgccaaggttcatycatctcatagcatgtgacaggattcccttctttttcaaggctgcataatattccattgtatgcatacattttctttattcattcattgtcagtgggcattttattgcttccatctcttggctcttgagaataatgctgcagttaacatgtgtatgcaaatatctcttcaggatcctgctttcatttttatgtatatatacccaaagtggaatgctagattgtatgttaattctatttctaattttttgagaaacttctataatattctccataatggctgcaacatttacattcccacaactattcaaatttctctgcaactttgctaacacctggtattttctgttcttttgatagttaccatcctaatgggtgtgaggtgatatcccattctggttttgatttgcatttccctaatgattagaagtgttaaccatctttttatatgtttgtttgccaattatgggtcttctttggagaattgtctattgaagccctttgcccattttttaattggtttttgattttttggttattgacttgtagaagtttcttatatattctggatattaaccccttatcatacatatgagaatttcatttctttttaaggctraataatattccattgtatgtatataccacattttgtgtttccattcatttgtcaatggacatttgggttttttccaccttttggctattgggaataatgctgctgtgaacatgggtgtacaaatatcagtttgagtccctgctttcaattcttttgggtatctacctagaagagaacttgctggatcatatgataattgtttgttgacctttttgagtaactaccgtactgtcttccacagtggctgtgccattttacactcttactaatagtaaacaggcttccattcatctatatcctcaccaatacttgtttttttctgtktttgtttttttggattttgtttttgttgttttggtttttgtttttgktcgtttgtttttgttttttkttttttttgctagtagccatcctaaatggctatgaggtggtatctaatggttttgatttgcatttccttaatgatttcttagtgatgttgagcatctcttcatgtgcttgcaggcatacatatatcttctttggagaaatgtctattcacatcctttgaatttagggaatgaattgagttcttttgttattgaggtgcagggtgctttgtatattctggatacgaaacacttattagatatggtttgcaaatattttctcccatattgtgggttgtctattcactatcttaaaagtatcctttgataaacaaaagtttctgattttgattaagtccaatttatctacttttrttacctgtgcctattgtatcatatgcaaaaaagcctcatcaaattcaatgtcatgaagcttttgccatacatttttgtctaagaattttatagttttaactcttgtgtttaggtctttgatccatattgagttaatttttgcatatgatattaagtccaagtccattttttttttttgcatgtgaatatccagtttactcagctccatttgccaaaaaaaatataaactgtcccttccccaatgaatggtcttggcacccttgtcaaaaaaaatttgactgcatatacagggtttatttctgggttctctgttccataggcctctgtgtctgtctttatgacagaaccacactgttttggttagtgtagctttgtagtaagttttgaaatgaggaagcatgagtcttctaactttgttctttttctagattgttttggctattcaaggtccctggagattccatatttattttaagatggaattttctatttctacaaagcatcattctctttggagcatttttatgatacctcccttaagcttttctgtcagatacttccaacatctgagtcacctcagtgttgtcacctgttaattgccttttctcattcaggttgcgattttcctggttcttggcctgacaagtagtttttcgtgttttcctagacctttggatgttataggacactggatcctatgaaatctttcattttaccaagtagccgttatttaagtttagtatgcagcttctggcctactcttgtgggctgtggtttcagtaacaatttaatatttagcaaggttattctggtctacttcattcatgggctatcaggaggccactcaggaaacctgagtggaattccacactgtgtaatttacttctcaaacctttgggtgtgttaatgctcatctgtttcacatgtagattggtcagagcctgcccaggacttcctatacagctttaaagcgtggttttccagcttcctcctcttcagatcttccctgaaatctctagttgggagtgtgaggggcaccccatcactgctgggcagggcatggaaatccggactctccactcagtctctgctgacagcatgctgtcaggagaggggagcactgtccctaacgacctgcttccactgggggtggaagtctatactccccacccagtttgtgctaacatcatgcagcaggggtgggaaacaccctgagctgcctgctgccaccccaaggccacctactactgccaggttgggtgtggaagttcatactccccagattcccctcgtggtgcccgcaggtaccacgctgctgaggaaggggarcactgccttaagccatctgctacccccaggtaggggataggagtccaggcttccactcagtctccactgacattccagggagaaaggacatccatggtgtttactggcacagggcggatgttgtcacaaaagtttctgtctgggtagggtccctctttccttttcctttggctagagtcaattggtttttcttggaactctttgtcattacctgttggaggttgcaggttgcttttccaagtttacatctcacccagactggtatatatggagaattttaaaaaaagaaaaaaaaaaccagggaactcaccactatgacattcctcaagtcttgaggttcctagccaatctgccttcctctttacactttttgagtcctcttatgatagtccactgtattatgctcagggattttcattgtacttaagagaggaagatcagggaaaaatgagtcttctcccctttttcataccagaagtttttgaactttctgtagttatgtgtgtttgagtatgtgtaaattacttatgctatatattacatagcatatattcagtgtactataatatatactataatcaataatttatgttttgagattatacacagatattagatataccagtattatctatgattaaacttttacraaaaagttatcttactatatatgtccttttgcaacttgttttattcaatcattttgttttggagatttatcttttttatataaatttaaggggtacaagggcagttttgttgcatggatatattgggtaagggtgaagtctgggcttttagtgtaaccatcagcaaaataatgtacattgtacccattaagtaatttctcatctgtcactctcatctcacccttctgagtctctggtatctattattccacactctatgtccatgtacatacattatttagctccattttgatacatgtaaatccagttcattaatttcaaatggtatagagggtttcccattgtatgaataaactacagtgtttatccattcctctattgagcagttattttttgtgaatgcaagcaatgtggcagtgaatatccttgtacacatctccatgtgcacataagtaagggtttctctagaatatatatagaaatgaaattcctatgtggtagaatatacacatctccaactttgtgcttgtatattctggatacaaaataataagataccaccaaactgagctttagagtggttgtcctagtttattatatttaaaattttgtaaatgttttaaaatatttgtatatactatatataatacttataaaattttattttatacacattttgttttttaggttttaatataactgcaggagttgatgaagaaacaggatttgtttatggaggaaatcgtttcaattgtggcacatggatggataaaatgggagaaagtgacagagctagaaacagaggaatcccagccacaccaaggtagtgtaaatgttataatgctgtgtaattatacccttctttaaraaagcacwtacttgtggaatcttttattctgttaactatgaactctttacattaagtcaatcaaaatttccctgccttcttcccttcatctccccattatacatttacacaatcctgttgatataagttatcaagtaacactatctgttcttttctgtaagtgctcgtgggttgattctctacaagcacctcaaaggaaagatttatgattcattatcccagtggttaagacattttcgtaacctgaactgcttattgatgtaaacatttcattatgcccatcttttgcaaacatagaaaacaaccagttgttctgtcttttatgcaattctttcactttctgaaccttttttcctaatttttaaatcttttttcctaatgtttgtcatttaagaagtttttatcatttcaaatgctaaatacatcatcataagctattaaaatcacttttaatattactatcacccaaataacgtactttgtacccattaagtaatgtctattaaaatagcttctgatactgtattaagctgagaagttattttcttattctaatttttttttttgaaagagagagcctcactctgttgcccagcctgtagtgcagtagcacaatcatggctcactgcagcctctgtctcccagattcaagcaattctcctgtctcagcctcccaagtacctggggactacaggcgcacactaccagacaggctaatttttgtatttttagtgaagacgaggtttcaccatgttggccaggctgatctcaaatttttggccttaaatgatccacccacctcagcctcccaaagtgctgggattacagaaatgagccactgcactcggccttttattctaaattttatcttcagtaagaattgtccaaaaaatagttgtgtactgggtgtggtagctgacgtctgtaatctcaacactttgggaggttgggaggttgaggtgggaggatagcttgaacccaggagtttgaaaccagcttgggcaacatagtgaggccccatctctacaaaaaataattaataaataagttgccatctttacatgctttaccagttttttaaaaatctatttggtacattagatccttgtacttcccttttatttttcttaaaaatgagctttcaaattaatgtgtctgccttccctcactttctccagccctatttttcatgtttgctatcttttctctagtaccttatcccaatattcagattccttactcctaccttttccaactgccatcttcttttattccacaattcccattctacatcatagaattttttaaaattatgtgaggatgatagacaatggcaaaacygtgagaggaaaaaatctttacatgatatagtacacattcctatagagtaaggattttttaatagttttcataatatgttatatgattcattacaattgtttaccgaatgccctttaaatagtacttaaaggacgccaacttaaagaataaaaatacgttttttaattttagagatgggtctgcygtggaaattgtgggcctgagtaaatctgctgttcgctggttgctggaattatccaaaaaaaatattttcccttatcatgaagtcacagtaaaaagacatggtaagctggttattttatttacaaagaaccttcaaatgtactatgtatattctcaacctatgtaatcatcatttgattctatcagctaatatcggaaaacccttaaaattaagaagaaagaaaattcattaatttactagtgtgaaaattgtaacaattctagttgaaccatatttgtcgcaactttgaactgagataagaaagcagcatagctgttgcctttattgtgcatgtctttttcctcactgtgactgagcaagttgcatttctgtgagcaattttgcaatctttacwtgtctttttctagaatagtgctgtccaaaataatgtgaaccacatacataattttaaattttatagtacccacattttaaaaagtaaaaagaagcaggtgaaattgattacaagatattttattaaatcagccaggtgcagtggctcatgcctgtaatctccacactttggggggccaaggcaggcagatcgcttgagctcaggagtttgagaccatcctgggcaacatgaaaacccatgtctacaagaaatacaaaaattagtagggtgtggttatgtgagcytgtagtcccagctacttgagaggctgaggtgggaggatggcttgagcccaggaagcggaggttgcggtgagccaagttcatactactgcactccagcttgggtggacaataccagacgctgtcttaaaaaaaaaaaaagacattttatttaactcagtgtatgtatataagatattgtttcaacatgtaatcaatataaaattattcatgagctattttacattctttttgggtggtgctacatcttcataatccagcttatattttacatttataacacatctcaattcagactggccacattttccaaaagtggataatttattgccttgtagtagataaaaataaactaaatattactatttgtctgtaactagatgtgtgaattgttttgaatgattaaaactaccatgtcttatgtcatttttcaggaaaggctataaaggtctcatatgatgagtggaacagaaaaatacaagacaactttgaaaagctatttcatgtttccgaagacccttcagatttaaatgaaaagcatccaaatctggttcacaaacgtggcatatacaaagatagttatggagcttcaagtccttggtgtgactatcagctcaggcctaattttaccatagcaatggttgtggtaggtgattcgtttgtaaaaacatttcaaaaaatgatgtgctagagtttgcttagttccttattcccatttgttttcaaattcacttcattgctaaaaagtagtatattgcttactagctagttttaaatagtctttcctaattaatcaagtattatgcgtatcacttttaacctgtaacattcagtatccaaaagccgaaagtaatagatgatgactaatgaagtgcttcctagagtttttcacattcagagcacacatagaagatgttatttgtggccagatgcagtggctcacacacttggcggactgaggcaggaggatcacttcagcccaggagtttgagaccagcctggatatcataatgaagccccaccaccatatttgaaaaraaaagaaaagaaaatgatatttgtatagcacaataggttacatggagtaggctgcttgtgctagatccaactacttcagttagccccaggccccacccagctaccctgaaagctgagggtctctgtatcctacacacctgtgctataaccagtgcctcagcacactagttggaaagccctgaactagtgaactaaagtggatagctttagttaacattctgttttcattgttgcattgctgcaatcagtttgtccggcaaagaattttagactctctgctgttttaaatctatactttagtctaaaaataaactacaaggaagtaaaatagagaaggtatgtgttcttctrtgcctggctagctgttttcacgttgtcaaaaagagtaccaaacctactactataaattatagtagaatgaaaagtgtaaaagtacacaaaggtagctttggttcagcgtggaccattaaaattaatgcatattcttggtcaacaatgcttttctcttctttctctgtatctctgataaatttactcatgctattggagtaaaagttctgtgttwatttatggccccagaagcaaacaatgggtatcagatgtacttaaagaaagctattatgaatctgctgaagaatgagttacataaatttaagtgtgtgctgtctgggttcagtggctcacacctgtaattccaacactttgggaggctgaggttggaggatcatttgagctcaggagttcaagatcagcctgggcaacatagtgagacttcatctccacaaaaatttaaaaaaaaattagccatttgtggtggtacacacctgtagtcccagctgctcaagaggctaaggcaggatgatcgcttgagcccaggagattgaggctgcactgagctctgatctcgccactgcaccccagcctggtgacagagygagaccctgtctccaaaggggttaaaataaaagtgtgttctgccttcagtgtagctgtggcaacttccttttggagctgagtaactttcttgaggtgacacagagaaataatcacctctaaaggctttcctaacttctacggccaaaaacagtccttctaagtcagcctcataggattagatctgtttaggcatctacactcaaattctgaccctcatggtattttaagtaatttttttcaagcttatgaatagtttctgtgggtaggaactaattcttctgtgatcttaaaaatttgtatatttgtttttggcattcactaggcccctgagctctttactacagaaaaagcatggaaagctttggagattgcagaaaaaaaattgcttggtccccttggcatgaaaactttagatccagagtaagttggaatataagtattaagaatgttatcatatttaatccaaatacattgacatcaaccataatttttttttttttgccagggcaacaaaaggagatgccatctctacaaaaataaaagttaaaaaaaaaattagttgggagagattgtgtacacctgtagtcctagctactcaggaggctaaggcaggagtatcacttgagcccaggagatcaaggctgtagtgagctatgatggcaccactgcactccagcctgcytgacagaatgagacactgtattaaaacacacacacacacacgcacacacacaccaaaactcacaattaaagctgactcttgtgaccagctctccaaaaaaagaaaagtaacaaatggagtatagataactgtgttataagttccatgtattacaataaagcaatatgtatattcagttgctatttgtaatccgataataggccaattttaattttaaaataattttatggagaagcttaaaaatcacctttccaatctataattaataaaaccatgtctttaatttttattaattcaaattattctatatatatttcaattattagataggcttcaatatattagaggcctaggaaatagttgactttaaaccaagccatatttagtgccaggctaacttctttaaggcaagataccagaatattttacattttttatattaaccagtatttgttaatcatttttaacacatgattaaagtcctgtgaactcagtatgtactaatttaagkttagatggatgatgtactaatgccgagcttattctgtagaagacaaaataattrattatttctcttacctttgttattgaaatttttctaatgctttttacataatatctgatcatcttttatttaacttaaatttcaatcattttgcagtgatatggtttactgtggaatttatgacaatgcattagacaatgacaactacaatcttgctaaaggtttcaattatcaccaasgacctgtaagaatttcatttatcttctgagtttcagtttaaattatttttcaagtaatttttaggtatttatggttttttttgtcttttaaataatcttttttaggagtggctgtggcctattgggtattttcttcgtgcaaaattatatttttccagattgatgggcccggagactactgcaaagactatagttttggttaaaaatgttctttcccgacattatgttcatcttgagaggtaagtcatcaggagcatgtaatttccataactagtgtttagtcagtttattagctattaggtaaattacagtttcttagaattgatttctgtatgccctaggtatcccaatgaaaagtgaagcctttattctttaacatgacaaattctgttatataattttcactttctcttattttgggttgttatttattttaagttgaggtcttgatattgtgcgatttatacatgtggaatagtctttgatttttaaaatttccctgatgtttttggatgtggttagcacaggataaatataaaaactgaaggtactcagcctgggccttttgagttaattgatttaaagatatatcaagaaatagttttcagaaatgctttcattatagttaaaatatcagaactggtcttttgcctgttagttcaaaaaacatttttcacttccttgtcctaattattagcaaatagacagtgtcagagttacgtatctttataagagtataaattcagagtgtatcttaattcctcaaattttagattatacctaagtatatctatattctattcctcagataatgaataaacagcacaaattttatctcctttcttacaagcacataagggacttctgcgtgtttcatattaatagagccactcctggtctgttttgtttggttgtcaccatggtacagattttaccatccttttaagctatttatgtctttgtatttaaagtggctttcttgtacatagtagcatgtaatcgggccttgctctcgtgtagcacaacagtttctgcttttggaatatttagaccatttacacttaaggtctgaaattgtgaaatttaaatgtttgttgtctgtttattctgtctgttctttgttagctttttcctctttttgtgcttcttttgcattgaatatttattatttcattttaatctcctttgttggctaattagatgtaattcttgtttatttaaaatggctgctttaggtttatagtatatgtctttatagtttaccttccagtgatataccacttcaagtaaggtataaagatccttaaaatagtatagttttatttttcccctcccggcctgtgtgctatcatcatcatccattttgcttttacctgttattaccccccacactacatggttactacatttgtttaggcagtcagttatgttttaatgatctttaaataatatattaaaaagtctaattactcttatagttgccattttcagtgctcttcatatgtttgtgatgttctgtatctccatcttgtatcattttccttctacccgaaggactttctccatcatgtcttgtagtgtttgcctcctcatgatgaattctttcaattcttataagtgtaaaacatctgtgttttgcctttattttaaagatattttcactatgtatagaattcaaagttaagcttttttctctttcatactttaaggtggttacattgttttgataagaaatctgcatcatttttatgtctaacctaccatcacatccatgctggtgtttttcatttcaacgttgtagttttcatttctcaaagttttatctgggctgtttttatatcttccatgtctctgcttaatgttttgaacatgtggaatatgattacagtgactcttttaatatccttgtctgctaattcatttctgggttgcttttgcttgtgattgttctctttattttgggtcatatcaccctgcttctttgcttggtagtttttgttttttgatttttggagcgacaggggtcttgctatcttgcccaggctggtctcgaactcctaggctcaagcagtcccccaacctcggcctcctgaagtgctgagattacaggcatgagccaccacacccagccatttgcctggttattttttattagataccagatgtgaattttaccttgttgggtgctagatttttggtgtttctgtaaatgtttttgagctttgttttggaatgcagtgaaattacttggaaacagtttgatcctttctggtcttgattttaagcttgttagacctgaccagaatagcatttggtctaggaataattattctccattagtgaatcaagacccrtctgtgttccctaccctgtatttcgaaaattatgacgttttcaaatctggctggtgggaacaagcaagtgttcctgacgctgtatgagtgccacatactgcttcttctcatccttttggatggttctttccttgttctttggtagtttcctcttgtgaatttgctggttggtacactacagatacttgagtgggaccctctgcatatcttcagagttctctctttgtacagctccttcctctctagtactctatcctgcaaattgtagctgctttgtagtgttcctggattctcagttcaactcaaggaagtctgccaggctccacctgtgttccccctctctgtgccaaatcctggaaactctcaaggcagtaaggtatggtaatcatagggtttgcttcatttgtttctcatccttcaaggatcgctatttgttgcctaatgtctaatgtcttaatgtccagttcttcagttgtatcagacaggagggaaattctgtccatactacttcctgtttgtcacatatggaagtccttccttgctttctggcccagcaaggttttcaacactcatctttcactttcactaccccagcctggaattgggcaattctctaaggatcccttgttctttatagtgaaaaatgttatttagaagccagatctgagcacatggtgtatttattattactatgacccccagtagatagggctagggaatatataataatacataaacataagtaaatacatacacacttatcttcatctcaatgtatcctgtctatgtgtgttgaaaacctgagtttacaccagttccaagctatttctcagtgtttaattctatttttctccctttctatatttgtaattcccttttccaacaatgaataacctacttcccacaytgggccatcaccaccacatagagtctgctcacccagcttgggcctgctaccccacagtaagccacctctatgtgtggagccctcctggcaccacttggattctaactacccactctggaccactctcacccttggtggactccctcttcatacctcttggactctaacatcctgctccatactacctattaccctttcccctccatttctggtcacctaccttgctctgtcccacctaatgacttcaggatgaatttttcaggaaagcaagggaaaggggacttccttatatttgtatggatacattccatgtcctagtgtccaagtgtaattatgggcagcatattcatggttttgtaacctcattttgttttttaattttggtatctgttagtttgctagagctgcagtaacagagcactacaaactgagtgacttaaataatagaaattgttaaacagcagaatattgtctcacagttctggaggccagaaatctgaaaaatcaaggcatgggcagagccatgctccctctgaaggcattagggaaaggtctcttccagccctgtctcctagctgctgataatcctgtggcttgtggcagcaaaactccaatcttcatgtggcattatcttaactaattacatctgcagtgacccgatttccaaacaggttcacattctgaggtactcggggctaggacttcaacatacaaattctgtggagatgtaattcaacacattacagatgcccaggtatccaacttcagtcatttggcattttactctgatgtagcttgaatacttggaaacatacattttctatattttccatgtttctatgacagttttttaaatatggtacctagctgatattagttattatccaaaataccctgttttacctaatgggattattttttcccatttttactatgaagtatttgatgcccactgaagcgtgtatgtaatatagccctgagatacaaaccatagtaatgaaacaaatatgttcccacaacccaacttaaaaatgaaacattacagatgtctgtactttttgaatttgttttcatttttaagggattacattgaaattaacaataaatttgatgtgctaacatcactgtgttctgataaggagggctggaacaagttatttaacctctataaatctctcttacctctctatagataggaatacttatggtaccttccttacagggttactgtgaacattaaatgagataatatacataaaagcagtattagaacataaatgcataataaataccaagtttattattcagtagaaagagaaattaattggcatttttttctttaagtagaaagtattctggaatgccatttttccgcctaatcatagttcttagtgtttcttcattacttttacttttacagttttatcaagatcacacataacacatctgcataattacaatttgagtctcataaacaaaattatgcctgagagagtatttatctctatgtttatatgtagcttgtaatggtagtttcttctatgtttttaatacataaagggattccttgtatttaaaagtctcaaattccaaagatggaatgtcaaagaataatttcagtctaaattcatttgtatgtctttaggatattgttttattttgtagcaaatgactacatatgattattttctacactagaaggcaaaaatcaccaggtcttgcctattttgttaatatgaattaaattatgtctttgtaaaatgtcttttctttcattcagatccccttggaaaggacttccagaactgaccaatgagaatgcccagtactgtcctttcagctgtgaaacacaagcctggtcaattgctactattcttgagacactttatgatttatagtttattacagatattaagtatgcaattacttgtattataggatgcaaggtcatcatatgtaaatgccttatatgcacaggctcaagttgttttaaaaatctcatttattataatattgatgctcaattaggtaagattgtaaaagcattgattttttttaatgtacagaggtagatttcaatttgaatcagaaagaaatatcattaccaatgaaatgtgtttgagttcagtaagaattattcaaatgcctagaaatccatagtttggaaaakaaaaatcatgtcatcttctatttgtacagaaatgaaaataaaatatgaaaataatgaaagaaatgaaaagatagcttttaattgtggtatatataatcttcagtaacaatacatactgaatacgctgtggttcattaatattaacaccacgtactatagtattcttaatacagtgctcactgcatttaataaatatttaataaatgatgaatgatagaagtttccatctacaatatatgttcctaaatggagcacagatgttcaaactatgctttcattttttcactgatatattaatttttgtgtaatgaatgccaacagtatattttatatgatttacttatgtgaggaaacatgcaaagcattaggaaatttatttcctaaaaacagttttgtaaaattagtattgagttctattgagtattataagatagcttacattttcaaaatggaaattgtyggtcatatttctagaactttaaagaaaaaagaatgttatattagttttctaaaactcaactatctttagtcatgttcaaaaatctattgctagatcatagtagatactggttttctattaactcaaaacctacattgacaagtttaacattgagaagaatcttaacaaaaatatggatatgaattcagtagatatcttaaattcaataaaatcactggaagtttttcatgataacttattttaagatgccttaaaaatcttaaagtcacaaaaggaaaaaggtttttaacatttayatgagttaacattttttcatagaacttatttcctagatagaattttttactgttttttactgttttcttaagaaaacagttaaatcattatgcattcagttggaagaaagtagtggcaagaattctttcattgctatataatattcagtggctcatttatacctaataaaataatggtattttaaaataatgctaytttcaaagtagcatttttttagttagtttacaggttacatacccaaaaccttaactatgactaagaaattamagaagaaaaccagcaaactaaaacttctgggcagcaaaaatatataaatgcttcagatgtcaaatacccatgcttgaaagctcgtgtaatttactttaagattatctgcctgctcttcttcaaagctgaccttgctttagaaatagttttaactagcttagttttctggtttccaaaactaaaatagattaaatcctacaaatttaaggacagttgtgacagtaatctgaccactatctataaayacattggacattggtttccaaatctccctttcttcttcagttccttccttgttcaatatatacccttctctaaactgtgcgggtaaaaggaatgactgtccttgagagaaccattagtttatcaaaggtttatgtagttttgttgctgtaccctaactttgatattcagggaggtaggaaaggtaacagaaaaccagcatatttaatcaaagcaagaagtaatcgctgacagttaaatgtgaccaaaaaaattaaaagttcacaatttttttaatgtagccatttggggttatctctagtaaggcagatacccacgttggtaaatttttaggatattgtgttgcactagaaaactaagtggttcatatttctaatgaggaagattaatgaaagaacattgttatattctgcgtggtatattttaaagtttaagaaggcatgttaaacattatttcctctatggtagttaaaatacagaattagatttttaacaggtgtcatttgactaaacgtttcggtagaatgcttcatacttgagtgatgctggataaggtattgtatttcaacaatggactatgccttggtttttcactaatcaaaatcaaaattactctttaacatgataaatgaatttaccagtttagtatgctgtggtattttaataagttttcaaagataattgggaaaacatgagactggtcatattgatgaatattgtaacatgtgaattgtgatccatttctgatatgtcttgaactactgtgtctagtrggcaaatgtcattgttacctctgtgtgttaagaaaataaaaatattttytaaaggtctgtattttgctttcattcatagtcattgcacccagctaattttttattttttacttattttttattttgtagagacaggattctacactatgttccctaggttggtctcagcctcctggcctcaagtgatcctcctgcctcagcctcctagaggcaattaatttgtcagtgctgaccagagtcatttattcagtgcttgcctactttaggtgcttacctttttgcaggaggcagagaggaggaagaattttagactgttttgattatttatttcattaggcatgttgaaattaggagcaaaatcaacttccaatgtataaatctgttagaaactatacacttctggtgacaatgggcctcctggaaaaataaaaataatttttttaaaataaataaaaataagctgcacactttcctggtacttcttgaaaccttttactcaagtgtgaatttttaatttacctttgatcaacttacagtaaacactacaggccagaagacatatatacgttgcctcctaaagtagccaaaatttttttacttttcattgtattactgaataatatacatatttatagaaaagcatctaatgaccaaagttgatcagtttggtctttgccttagtttctgttggtttctttttactgcagatatgcatatcttcatcttcagataaaagatattaacctaaaaatccaaacctgtaactaccacagcaaacttgccaaaattacttacatagaacctcaatgtgccaatataataaactcatggaatttgcttagtagttgttggttccctcccccaacccccccaatttgtatgagccttgaattatagagtagtgctaatactttgtcattctggctgtagttattttggttagagcaggggttttgtttttgtttttttaaagagtcttgctttgctgcccaagcctgatgacagacagctcattacagcctcaacctcctgggctcaaactaccctcccacctcagcatcccaagtagctaggatgacaggcgtacaactactgcacccacctaacttttgcatttctttttttgtagagatgggggtccacactgtgttgtctaggcttggtctcaacctcctgggctcaaactatcctcccacctcagcctcccaagtagtaggatacggcgtacatactgcacccctattgttttagagtctcgctgattatataggcgtgaccatttctggccagcttttttctttaatcagatctttcagcacttgcctccacgtttgtaatctctactgtctcctcaaaatttacatcagtctcaataataaccattgtttctatttccagttttattttttttataagtgcatgtggtatgagatgagacattacttaggcttttttttccaaattgttaaatcccaaacttataagttgaatatgatttatgggaagtccttttttaatcttgcattattctttactagtagggtctannnnnnnnnnnnnnnnnnnnccaacccccccaatttgtatgagccttgaattatagagtagtgctaatactttgtcattctggctgtagttattttggttagagcaggggttttgtttttgtttttttaaagagtcttgctttgctgcccaagcctgatgacagacagctcattacagcctcaacctcctgggctcaaactaccctcccacctcagcatcccaagtagctaggatgacaggcgtacaactactgcacccacctaacttttgcatttctttttttgtagagatgggggtccacactgtgttgtctaggctggtctcaacctcctgggctcaaactaccctcccacctcagcatcccaagtagctaggatgacaggcgtacaactactgcacccacctaacttttgcaattctttttttgtagagatgggggtccacactgtgttgtctaggcttggtctcaacctcatgggctcaagcaatcctcccacctcagcctcccaaagtgctgattatataggcgtgaccatttctggccagcttttttctttaatcagatctttcagcacttgcctccacgtttgtaatctctactgtctcctcaaaatttacatcagtctcaataataaccattgtttctatttccagttttattttttttataagtgcatgtggtatgagatgagacattacttaggcttttttttccaaattgttaaatcccaaacttataagttgaatatgatttatgggaagtccttttttaatcttgcattattctttactagtagggtctacttctagaatatactgttttctgtgcccattcacctatttcactattacagtttttgttttaatatttgttagagcattttgtcaccacgtttttctctcatcggttccctcgtcttctttttcagaatcttatttattcccacctattctttgtatgtatttttccaaatccaaaaagtattctcagcatttttactaaacaagccctcatactattaatttgataacaacagacatattgacattatttaatcttaaaacataagctatttatttaaaaatttttagcttgttggaattcttcctaatttttatgtttatgattgctgtggtccattttggttcaatttggtggtcaattggtcagaatcgaaaattcagattcaagaaacatttatggagcccctactatataagcaattttacattggaggtattatatcccttttgtaaatcagaacattgataatcttaccataaatcacatagtggataaattgttggacccaagactcaaactctgattttcctaccacaaatcctcttacacaaaccctcaagattgctgtcttctgtgcttgccctcctgcttcctgcaaccatcaacccacaggacccactgttgatattatcggtttcccatggaaagcatttaggtctgttctccttgggcctaggtatacttccttattattacctggccaaaattctgtatctgcagccatctgcactaatcagataaccccatgtgttcctggctaaatgtgtagacttggtgccaagcatgggctaggttatacaagtaggataaatttggaaatataagtatcttatcaaggacagtgaaacagaaaagtcagagacaacaggaagtgttaataattaagagaaggccaactggttaaagttggtccaaaggaatttcggccaaaaagtggggcccatgcccatgcatttttaataccaaaggaaacaatctatggaaattcactaaaaaatatggcacttaattctgcaagtgttcaatgttaatatatttattgtaatggatatattttcaaagtacaaaactgagcactaagtcttattagatatcttttttaccacataaaggagcagtactccaaaaatgatttatcttggctcccacatcacattcaatggatcacaaagtcttttcacttttacctgactgcagatttctactcgtactcttatcttgtgcatagattaacacaataatctttaaattgatcacaatttatccctcatggaactatgaggaaaacctttcttgaacactgatgctgtccatcactggtcagaggacattgaggattcgctatgatttggcctcagtctctttccagtcctattgtcttagtgtctccttgctgtttccaaagctgattacttgcctccctgaaactttgtttcttcaattgtaaaaacagtgactgtaacatctgtgggtagtaagaattcacgagggcaacccatagtgtatttaagtttcactgcctataatagaacctaaataacaatggtctacataagataaatgtcgaaggtgtgcaccccagatttgatatgatggttccattgtcatcaagaaccaaagctagcatttaatgacatagaatattcaagaacttctcaaatatttcttttaatatgagcttattgtctcttagatattataagcaggggtagacaataatctgtttactttttgtaatgtttttagcggcagagtctcactctgtcacccagactggaatgcagtggtatgatcatagtttactacagcctccaactcctgggctcaagtgatcctcctgcctcagcctctcagagagctggcactacagccatgtgccaccaagcctggctaatttttaatattttgtagatataaggcttcactgtgttgcccaggctggcctcaaactcctgaactcaagcgaccctctagcctcagcctcccaaagtgttgggattacaggcatgagccactgcacccagcctatttattttaacaataggggaaacaactcaaattttacatcatctaaattgatggcaaattttaaggcttggctaaaataacaaattttctcacctaaaaaaaaaatctgtaattttatacttaaactctaaagaagcagaagagctattactgaagtctttactaataaagcaagatagaattttataggaatttttgttcgttttggtttggttgattttaattctactttggtctttctcatcattggacaacgtggggaaatgtatttcagacaaataaatgaactagcttgcaataaatagagtgtgactgtttgatagacttcccttctttctgaatgtctacaaaagataagcttttttattttctttaagcaacttcaaagcattaactcttagacctagagatcggtttcctttttttttttttttttgagatagagtcccactgtttttcctaggctggtcttgaatgcctgagctcaagcaatcctcctgcctcagcctccctcagccttcagagtagctgggattacaggcatgcaacccacatctggctagagatctatttctattagagattcacttactggaattcagctctgcatactcagaaataagcaaatatatgcttccctgggggggtcttcatttctgtgtgtttctcataatgtcattgttccactgagccaattgtgagtccagtgtttaaaaatataccatttccataagacacagttccctaaaccagtgcttccaaccctttacatgttatagaacacatgtaaaaaggtaagcttggactgagtgtggtggctcacgcctgtaatcccagcactctgggaggccaaggtgggaggattgtttgggcccaggagtttgagaccagcctgtgcaatatagtgagacccccatctccacaaaaaaatttaaaaatcagtcaggcatggttgtgcacacctgtggtcccagctacttgggaggctaaggcaggaggctcactggagcccaggaggtcaaggcttcagtgagctgtaattgcaccactgcactccagtctggaagacagtgccagaccctgtctttaaaaaaaaaaaaaaattatatatatatagcttgggaggctgagacagtgagacaggaacaggaagatcacttgagcccaggagttcaaaaccaccctgggcaataaaaccccatctctactaaaaagtttaaaaatttgtttggtgtggtggcacacacctgtggtcccagctactaaggaggctgaggtgggaggatcacttgagtccgggaggtcaaggctgcggtgagctatgatcatgccactaccttacagcctgggtgacagagcgagaccctgtctcagaaaaacacacaagaaaaagactgggcttagtggctcacatctgtatcctagtactttgggaggctgagactgatggatcacttaaggtcacgagtttgagaccagcctggccaccgtggtgaaaccttgtctctactgaaaatacaaaaactagctgggcatggtggcacacacctgtagtcccagatacttgggaggctgaggcaagagaattgcttgaacccaggaggtgaaggttacagtgagttgagatcctgctattgcactccagcctgggtgacagagtgagactctgtctcaaaaca

SEQ ID NO: 95518 - DNA, 22460 bp, Homo sapiens
tcaagagttcaagatcagcctgggcaacatggtgaaaccctgtttctacaaaaaatttaaaaatattagccaggtgtggtggcacgtgctcccagcctgggcaacacctcccagtacttgggaggctgaggagggaggatatcgtgagccgtggaggtggttgcagtgagccgagactatgtcactgaactccagcctgggcaacagagccagaccctgtctcaaaaaaaaaaaaaaaaaaaaaggttggggggaaaggcttaaaatcaatgttattgtcctttatttaaggcgttttaggctgagtgtggtggctcgcacctgtaatcctggcacttagggaggccaaggcagatcacctgagatcaggaattcaagaccagcctggccaacgtggtgaaacccggtctctactgaaaaatacaaaaattagcctggtgtggtggcgcatgcctgtaatcccagctactcaggagactgaggcaggaagaattgcttgaacctgggaggcagaggttgcagtgagccgagattgcaccacttcttcactcccagcctgggcaacagaatgagacgccatctcaaaaaaaaaaaaaaaagatgttttaaattttaaaatttttattacaaaagtaatacatgtattcgtcatgaataccaattggaaaacaagtcagcaaaacatagtaagtacaaaatggattcatactcctacctcccaggaaaaaaatcagtgttagcaataatatatttcacacacacacatacccctccaaatttatctatatatactcggatataacattcatacagcaaagtatatacaagtgtacagctaaattttcacaacataaacacagccatatagccgcaatttagattttttttttttaaagaaacacacataactaatatccagaagtccccatgatgacccttccagcagttactctctcttcttcaaaagtaacaccttggggccaggcgtgatggctcacacctgtaatcccagcactttgggaggctgaggcgggtggatcacaaggtcaggagatcgagaccatcctaacacagtgaaaccccgtctctactaaaaatataaaaaaaattagccgggcatcgtggcgggcacctgtagttccagctactcgggaggctgaggcaggagaatggcgtgaacccgggaggtggagcttgcagtgagccgagatcgcaccactgcacactctagcctgggcgacagagcgagactccatctcaaaaaaaaaacaccttgggaggagggaggaatgggaggtggtgactacttacctggaactagacagtagtaatggttatacaacttgtgaatgcactgaatgccactgagtcatacactttaaattagttaaagtggcagattttatgtgtaattttaccacaattttaaaaaaatgactgaaggtaaaataaataactactgtcctgtcttctaatagcatagatcgactttgcctgtggaactttttataaatggaaaaatggaatcatcatcttcagtgtgtgtctggttttttttgtttgtttgtttgttttgagatgggagttttgctcttgttgcccaggctggagtgcaatggcatgatcttggctcactgcaacctccgcctcccgggttcaagcaattctcctgcctcagcctcctgagtagcttggattacaggcatgtgccaccacacccggctaatttttttgcatttttagtagagatggggtttcaccatgttggtcaggctggtcttgaactcctgacctcaggtgatccacctgcctcggccttccaaagtgctgggattacatgtgtgagctaccatgcccggcctgtgtctgttttttaaaaaacatgttagtgagaatcgtgaacactgctgaatatagttgtagttcattcatcttcattgctgtggactattccattgtatgaatacactatcatttatccatttcactattgatggatattttggttgtttcctatttggactattaaaaaataatactgctgtgaacactcttgttcatacttttggtatacaaatacagtcatgtaccatgtaatgacttctcagtcaacaagattgcaatatacaaaggtggcccccataaaattataacactgtatttttgctgtacctttcctgtgtttagatagatacatgaatacatattattgggtttcaactgcctacagtaattgcaggaattctagtgggcacggggaatgcagcaactgtattcactacagtataacatgcagtacaggtttgtagcctaggagccatagtctagaccctataggctaggtgtgtagtaggctacaccatctaggtttgtgtaagtacactatgatgttcacacaacaaaaaaaccactgagacacatttctcagaatgtatcccaccattaactgacacatgactgtatatgcatttctgttgggtacataactaaatcgcatattttttttttaatggagcacactgtaacatagctttgtaaccacctttcttttttaaatcttcagctcacttcagtctaatcttttttcatttactatttctcaaacaactctccataccaataagtatttttgataactatttttcacagctacagttttcccttttaggcaaatttgtgcacgtaccttttctttccaagtgtaattgctgggttaaagttttaacgtgttttgaatattaattgctaaactgactttcagaagcattgatactaccaggctatcagggttaccctgggatctcaggcaatagccccaacgaccaacacctctacaactcttgcctatgctgagctccctccttgtctctttcccttccttttatttgagtgagagtctcactgtcacccaggctggtctgcagtggcaccatcttggctcgctgcaacttccgcctcctgggttcaagcatttttcgagcctcaggctcctgggtagctgagactataggcgcccgccaccacgcacggctaatttttgtatttttagtagatacagggtttcaccatgttggccaggctggtctcaaactcctgacctcatgttatctgcctgccttggccgcctcccacagtgctgggattacaggcgtgagccactgcaccagcccccttcttaagtcattctttctttgttttagacctttcttcccaacctccttctactttagggcccagttctttcagaatgttctcccattccacctaagaaactcttactttcacatttttttttggagttaatcctattaataatatcacccttcaaggccgttccccttcttgatccctattattgtgttcatcgtattgtattactgttggtgagatttggctccacttcatccatcactgtgtgctcctaagggctggagcaagaatacaacaaaactaataagtaggaactgtccggtaagaagcctctcctctgtaccacaaatcacgttctcacagggaccattatcttctttatctctgcatccccagtgccctctacaattcctgcaaagactaagtgctcaggacattatttgttgagtcaatgacagaattctatgctcagggagcaagtcaaaggagaaggttgctcactctactccaaatatgggcacccgtaatgaatgattttttggaggaaaaaaaaatccctacaatccattttccacagaacagccagagtgatcttttaaatttgtttttgtttttgagacggagtctcgctctgtcgcccaggctggagtgcagtggtgcgatctcagctcactgcaagctccgcctcccgggttcacgccattctcctgcctcagcctcccgagtagctgggactccaggcgcctgccacgacgcccggctaattttttatattttgtttagtagagacggggtttcaccgttagtgagaatggtctcaatctgctgaccttgtgatccgcccgcctcggcctcccaaagtgctgggattacaagcgtgagtcaccgcgcccggccgatcttttaaatttttaaatcagctcatgccactccctgcttaaaatcctccaggagtttcccactgtgctttaaataaaacccaaacaatgtactgtggtctccataatctagcccctgctttcttcactggactcatctcctacccttctctcctttcactagacacaagccttgctgagccccaatttttaaaaaaatgtttgagttcttaccatgggcactattttatgcactttacgtgtgttcttacataatcctcctaacaagtaagtactattatgatctccattttacaggtgtgaaaactaaggcacaaacaagctaagtaatttccccacagtcacatcattagtagttggcagagctggggttcaacacactaaaaaaggcagagtagggtacaagggcatggactttggagacaggcctaggaactctgtttacagactgtatatccttacagagtcactccttttccccagttgtaaacaggggtaaaaatacttaccttgcaatgttgttgggagatttacaaatatttgcacctgggcacagtggctcacacctgcaatcccagcaccttgggaggccgagatgggcagatcacttgagcccaggagtttgagaccagtctgggcaacataccaagacccctttctacaaaaaaaatacgaaaattacccagctgtggtagcatgcgcctgtaatcccagctacttgggaggctgaggtgggaggatagcttgaggtctcccgaggctgcagtgagctgagattgtgcccctgcactccagggcgagagagcaagaccctgtcttaaaataaataaataaataaataaataaataaatatatatatatatatatatatatatatatttgcaaaacaccttcgctcaggaaataattaacaggaattcccaccacagccttttatgctatcagcttgcacacacagacacaaagtcaacatgtagcaaactgttcaggctacctaaaccagataaatggccccacgaagaccaggaacagactataatcgtctttaaatacccataccccaacttgaccaaaggaggcctctgcagaggcaattgaatagtcttccagcaaaggctagctcattttagtacaagtgggagagaaacggggcaatctgaccagtggtttaagggctgagttggcccagcagaattgactaggccttaccacaggctaataacacttgcccttggcaaaacgaacgccagctcgggatttctgtagcttcaaccagctttgtcctttgtgatagtgccacctagcgagggtccggaggcactacctactcctggcagctgccaagaccactgcgacaaggtgttagccatttaggcctaggaaagggaatggggaccacccgagtcagcactccttccatgactcygtggaggaagcccatgctgtccttcccccaacctcgtccagacccatggggtctgaaaagcgcgaaaggcctgatattaactaacacttgtacataacacagcagtgatctattatcattcctcattttatggtgtcctcgcatcgaatccctccctgggaataggaaaaacaggcatcattctcatgagagccattgtacagatgaggaaactgagactcggcgggaaagtggttaacccaaggtcacaaaacgccatgagagccagggctgggacgagaatccacgcctcttccattccggttcccggctcctaccccgaccacccacccgagtgtgaagacacagcatgcccacccccacggggagcagaggctccaggatcctgcgccgaagaccagcatgtgggagcaggataaagactgcacggggaagacagcacttctttcttctctgtccatggagtgccgggcacgctcgccacggctcgggggcgggggaagcggcgcccggggcaggaaacagcgtcctgcgcgggtagcccctgggagcacgcggcaccgagtcacgtgagaggggagcgcaggcgaaggggcgtcgcgcgcaagcacgcacgacatacgcaaactcgcactgaggcgcccacagaggcaagccccaggccccgggtcacatgtggagggtggcaggcgagaacaggggggcgggaaagacggagagatcacgtggaggaggccagagcagggaagtcacgtgagggggacggaggcggggccgcctaggaggaggaggaggaggaggggcgcgcggcttccggcggctgggggggccagcgagcggaggggggggcctgtcccggaggtggcggcggcgccatcttggcgaaggggggatcaggaagtgcggaccgcggcggcggcggcggcggcggcggcggcggcggagcccggagcgcaggccggaggctcccggcccgccggccccggagcggagcggagcggaggatgcagcagccgcagccgcaggggcagcagcagccggggccggggcagcagctggggggccagggggcggcgccgggggccggtggcggcccaggggggggcccggggccggggccctgcctgaggcgagagctgaagctgctcgagtccatcttccaccgcggccacgagcgcttccgcattgccagcgcctgcctggacgagctgagctgcgagttcctgctggctggggccggaggggccggggcgggggccgcgcccggaccgcatctccccccacgggggtcggtgcctggggatcctgtccgcatccactgcaacatcacggtgaggaccccctcgcgtgcgcctctgtgggggccccttgtcagggacccaggatcactccatccagctttttgctctcgaaggacctgggaggccgaagcccctctcagggctcagttctttctctccaggttacatttgtttctgctgcttgaggttatgcagtgcacccagaatctctaccattgaccccaatagcaagggacaccccgacatatggcgcctagactacccgtttccacgaacccacccacatcccaaggttcatgattttggctctttttggctactcctccacaactttaccttgccacctaggaatgcgtctttcttccccttactcttatttcaaggttttaggcctcggcactgaccctaactgcaaagacctggcctgaaactcactgcacatttcagcgatgcccccttctcagtagtacctctgacttaggaggttgccacctgtgggatccccgcctaggcatccctcatgcagaccctcttgctctctcaacttcaccaagtgatagtttgcaattcattgactcctcttccttctctcctttggattctttttctggtgtaacctctaactctcctctttttgcctcagctggtagcagttctgccactcccctgcctgttccctrtggatatgtccatttgccctgggttgttgcttttcctggtaatgatagtgatgtgatgtgcgagggctacccccatttattctaagcagtaacagttgcatttctcccctgtgagcgtcattccatcctaggcatacaccttacatgtctcctgcctggtctaccctcagacatcccttgaacagagaattggcttctgctaatttgggaatgtctggtactgcatgctatagcacttatattggttgatgttacctgctgtgatggtattctctctaccggagcagtagctgaaatgctagcagacagtactttatccaggcaggcagacctaatcggagtagcctggggaaaggcagagttgtgaattctctgctacttgggggcctgaattcaacttactggtgttttctgtccgttttctcaatcaaaccaagttaagatttggtgaggtaaagcctcagtttggattgattggtgccccaccaaaactcatatgtcccatttctcttttcatttcctttcttttttcctgctagaaagttaaaattgaaggactaggagtggcttagttaagtgaagacttgggcatctttgataattatttttcctccagcattgaggattagagtcatggcaatgctaagatacccagtagaggtggataaggtttccctggcttgtgtgggaacctcgagttaattttgttcctgaattaagcttctaattccttaagggtaggtttgcccctatccagctgctctttctgttgccagaggccatttactgcgtttgtccctggcaggaagttaaatttagggggtcctcagccagactccccatggctataaaggagacttggcctaaactagcccccttggtttgggcagagagggagtctggtcaggctgcatttggcaccgtggctcaggaatgctgggaatgtcagtagcgtaggcttctttctcccagcctgccatgtggagccctacagcccacgcctggactgagaaggtggcaggttcccaagggagaggtggggagaattggtctttgaggggctcttctggaagtggtgtgggtagattcttgccagtacccttttactcttgggttctggagatacagtctagtttttatacttcttccctactgaactctgcttttttcacttcagtgtcattgtgatgaggtgatcccttcctcagccgattctggagtttgaaaagcaagcttggaggactgttstgggtccagggagaacttgaagtctagaacttgtataggcagtgcaggagatgaggagtcccccttcgctgttagccaagtttggctgtgctaggtttcctggtttgtactctcgaggaaagaaagaaaaggtttcagtctgcttctcggaaagggtcttcccagggactgtttttcttccagtttagaatttgttgtgaagctgcttggttagatgctgacctaagttgggcttttatgtgtgtgtagggggtgggggtgggaagcaaaggggctagaagtcttggggggaagaggacaggcaaaatctggcttttcccagagtcacccattttgattgctcttattgctcttttcccttcaggagtcataccctgctgtgccccccatctggtcggtggagtctgatgaccctaacttggctgctgtcttggagaggctggtggacataaagaaagggaatactctggtgagggggccacagggtaggggtacattttgttcttatgaggcccatgccacaaaggcatcctgtgaaagggatcctgaaaagtggacggtacacagctaaacatttaggggatgacctctcgggggagttgcttactgaagccagagggagaccctgcatcggccctgggattggtccatcaggagactcattcccacagccacgtggcccataaggcttagagaactagttattggtgtggggcccraactaagagctcatccatgcacttatccagatcggagtggggaaggatttgatgtctctgtgctcccctacctgtagctattgcagcatctgaagaggatcatctccgacctgtgtaaactctataacctccctcagcatccagatgtggagatgctggatcaacccttgccagcagagcaggtgagcagctgaggagcctcgggccctgttgtgcagagttgccccacagggtactcagtaaataattgagacaaatcagtagtttctctccatccccaccggctcccaaaaacatacacgtcttatgactctcaccctcgttcttctccagatgggaatcttcttttgctaaatggggcactggtagcttcatctctgatatcaaaattcattctcatgggcagcatcccagatgttgaaagggagcgggggaatttttaccattatcttagcaataacagttggtggccactggggacccaggccccttggtgagaaccaagaatgcaatatcagtctaaagaagatcaagtaaaggaggggttcttaggagaattaaactaggatttaggaggtgggtgacagagacagccattttgcttttcttttattctttggcagtgataggcgaaaaataatgggctggtagcaaagccattccctgggctgttgcttccactcagatctggctggtggagagactggcagcattacaggcaggcgcacaacttccagacctgggggctcaggggagtaggttggaggctgcattctagcaagccactggggctctgatctccatctttcccttccttgctgcagtgcacacaggaagacgtgtcttcagaagatgaagatgaggagatgcctgaggtaggcttgccccctgaggtggcattggctggaagctcttgcagtcagcaacattggtacccatatccagaactccagtctaaaactggagagagaaaaatatcaaaggaataaagacagatttactgacctggaggaatagccagtgtagtagaggagacagggcacccatatccaaccactgaagacaggtgcagcgcggttcaaaccaaatactgggtaagttaatttcaaatggctttggagtccaacaaacctgtgtttgcatcctagctatcctaattgaggaattttatgtaatctcactaagctacagttttcttatctataaagtaggattataatacctactgcatatggttgtcttgagattaaatgaggtgttatatataaaatgcttcagatgatacatgataaatgctaaacaatctatctgatatattctctaaaaacatacagaatataaaatcatggttaggaatttgagctttagagctagacagaacttgactgaatcttagctctgctaagagctgtgactttgggcatgataattgacctcactagactcagcttccgcatctataaaatggataatgatagaataatgagtgatggtggtaagaatgaaatgagctagtatctgcggcacctaggacagaacctggcatgtaataaacactcagtagacattacctgctggtgtggtaattaggtatgtcctgccagaaatggggagatcactctgattacttttatttcctagcattagattaatatcccaggttctataaccgtgtaaggttcttgagactggcaaagggctgacgacatgaaatttactcctcccagatagtggacagccctctgggccacacccccaacatctggctgaggggctgaaccctacataggttctcctccttccctatgctcagtgagctagttgcttgctcacttagagcaggatgaataaggggctaattctgttcttgacctcttccatatatctctctggacatcctttctcatttccatctggcagtgcgtgcctctgcatacctgattcatgccttgcatttgtagcgaggagaggagatgtaatgattcaggtttctcctttaggcttggggccctgagaactcccgggtgcaatagtcacctggtgaaacatgagctttgagtcacagggtcaggcccaagtcatttctgctaggaattagggaagagtttctgctgccaagggagttttaggaacagttggagcagggtcagtccaggaaacaagagggctaagtccctgcctcgatctcagctgcagctctgctcgtttccgaagtccttgctgtagcttgagagctgaagatttagactgtggagggaatggggctggaaattgttctaaaaatggaaagcacgttgcgtttataagactgctagatggactgcttcactttaacttttggctcttcgccaaatgggactgggaaggtgatggtcattctctaacctgtgtcggtttttttccttttcttttcactcccaccccacacctcctccaggacacagaagacttagatcactatgaaatgaaagaggaagagccagctgagggcaagaaatctgaagatgatggcattggaaaagaaaacttggccatcctagagaaaattaaaaagaaccagaggcaagattacttaaatgtacgtgccttctagagagaggctggtgaaggggttggtgggaaatggctgggaagtagtaggccatcgcatctcagtatggagagcagactccttttttgtgcctaatcctttcttaaatcctgggcaagctgccagactgcccctaaggtctaacgtgtgtttataaaccacacgaccaaggaatgttcctgtcatccgtccctcacagggtgcagtgtctggctcggtgcaggccactgaccggctgatgaaggagctcagggatatataccgatcacagagtttcaaaggcggtgagtttgccccagagaggggcctgcacaagagtcacccataaagaagggtatggtggcaaggggcccaagaggttctggggtccaggagtgcttatgaacttttcaggccaagaatggagctcctcaagccagtggcttggttgcatgtccatctgtggtgaacctagagctgttgatytttttctctcagtctgggaaaggggtctgcattagagaccactcaccacctggaccaytctactaacacctgttttttccctccttccaggaaactatgcagtcgaactcgtgaatgacagtctgtatgattggaatgtcaaactcctcaagtgagtggggactctgggattggagaggaagttgaggaggagtgtgagtggggctactgtggtgggatctcyagggcagccccatccagcattttcattcagggtcccggagcgggtgtgggcagtggtttcgtggtctgctgccagccagggcaggggagcccttatgaagctcctgaggtggaaccaggcatctgagcccaggcttgttgcttcttagagttgaccaggacagcgctttgcacaacgatctccagatcctcaaagagaaagaaggagccgacttcattctacttaacttttcctttaaagtaagacttttcttttccagtctctccctctggcctaggctgcccagtctgcctgacagtcctgtggaggatgctggcctccctcccctgattgtcrtctctctctctctcaggataactttccctttgacccaccatttgtcagggttgtgtctccagtcctctctggagggtgagtggctggcatgcggaagagggcatctcctctggcagagggcggggaagagacttggagattttgtcaggcacagctgactaacctttctcatgcaggtatgttctgggcggaggggccatctgcatggaacttctcaccaaacaggtgagcctgtctctcctccttggccaggccggcctgggcggggattgtctgagctttacagcacacacccctacgggctgggtgatagacatgatgtggccctttcattctgctgggctgggtctgcacccactgacctagacagacaggtggtggcagtgctgggggcaaagggcaagggccctcctatagacacagctgattgcccagaggacaagcatgagggttctctggaagctccatctggacctgcttgccttgtccttcccttcacccagggctggagcagtgcctactccatagagtcagtgatcatgcagatcagtgccacaytggtgaaggggaaagcacgagtgcagtttggagccaacaaagtaaggatcctggtcctggggctggtggggctgggtggagccaagtacacttggggccactagcaggccaaggctgccttctttagaggaatgagcataaggcccccgggctggtggcattggatgagagggcctagggtgcccacaatggaacaactgtgccttggcccctaggggcacccctaggacttttgggaggtttcgggtctggaaaaggaagactatgggattatgcctccaagggacctcgaaggtggagggtacttagtgttttactagaccacmgtgctgggagctgggactctggggtmtctgggtgacagcctgcagaaggtgaggggcagtaaggccacagctagccatggcctgatctggtggcttcctctccccagtctcaatacagtctgacaagagcacagcagtcctacaagtccttggtgcagatccacgaaaaaaacggtgaggctggagccaggactcaggagattcggacacttgccacacccaggttttcacttccagccacagagcaagaaccccttcttttggtttctgatactcaaccacccattaacacagcacctgccccagttctcccaggagggactggcggtggctaacattcacaacctcttccagaaacacaccaaaatgatcrtatcaccgataaacttggtgctacccccttcttgaccaccttttgaaaaagctcatctaactctcccatcatctcaggttgggcacatcattcccccttctcatctccaggtatgcaggctctcagcttcccatacacctctccccacacagcatagccctccccaatatcctcttatctctgccactggagacgtcttcagggattggggcaggacagggagggtgggcctgaaccttcacctcactgaccattcyatttctttgcaggctggtacacacccccaaaagaagacggctaaccctggagtatcacccttcctccctccccaggcaccactggaccaattacctttgaatgctgtatttggatctcacgctgcctctgtggttccctccctcatttttcctggacgtgatagctctgcctattgcaggacaatgatggctattctaaacgctaaggaaaaaaaacaaacacagaactgtttcaagtactcaagactgacttacagaccaaccaaccaccttgctggaacccttgctagcaggcattcttataaaagaaactttcgagcctccttatattgctggaaactcagctgtgctccagactagagcctccttayctatgctatggatttttaatttattttctcttatttcatgtacactgctttttttggttacagtgtatgatggatgtgtatgaaaaaaatgtatctttgggaaaacaattacagtttgttaatttgaagatgctggtcttgactcatctttatttttattcgcacatcccaccccatcccctgaactacttgggaggtggggaggggtacgagtccactgttgctttggtagagatgagaggccgcattttgctgctaaagcaagagaaacttggagctgaagcacacacctggtctgcccctagatttctcctcaaggcctctggagcaaccagcacctgcccccttggaatgcagagcctggcctgccaaactacaatgtggtaggctgaaacgatggtgttaattcttaggactacttttctagtcacagatgttttcaaatttctaagaaaaagaaaatgaggctcaagaggctgcttcgtagaattccttttgaatgaattgagtggggatggggacacagtctccaagtgtgtatgtggtcttttctgatctcagctgtgtggctgcaactcttcgctgttcattggttcctctcctggaaagtggcttctaaccagcactggatggtgatcattggtaagctttgctcacctccctctctcttgcttcatttggctttatcaaaaagaacagacctagctctgaatttgtttggcttgggaaattatggattctttcaagccactcccacaaggtgggtcctactagaaagggttagcattttaaggggggttgttctatacacctgtgtccttaccccaggctcaggaactgccagggagggaagatgaggtggggagtctgtactgagatggaactgtcagtgctgtgttgtatgtacttgctgttgtaaaagtttgggcatgactttgcatctagcgggtgctgcctgcatctctttgtctgtaagcttgctctgggactcagcctcttaggacctacgatgccagcagctctcattaacagtgaaatgacagaggccaaagatggccaagtgaagacccaagtctcagaaaacccagacttgggacaactgcctgggaactaggatgctagagcagttctgtaatgctttgagacacagcaattttcacattggccattctttcccctcccctaccccttttcttttgagggacttttaatgtttgctgctttaggtggatggagagtccaccagtcccactcaatgctgctctaactctacccacacccacctaattaggggtgctaataaaacatgctgaggttgagataaagacgggacataaggggaaaattcattccatagagctgaaatctggttttcaaggcctctgtggctttcttctgaacttaccaccagccctggctggaatgtagattgtgtttttagtaatgtgtactgtgagctgtcttctgtataatgtattttgtaatgtatttttctcatctaccaaaggatgaaacaaataaaattatttaaatagtttggctctaataaaattatttgaagaaacagtggggttcctgttcacttgacatagagggaaatgcctgcccctgtgagttgcataacaccaactaactctaagagaatcctccatttttcttgccaaacccagcactcccttttatgaccttaagtttagggttctaataaagtacaaagtataaaaaagaaacaaggccatatcatcatgaaacaattttcttctctccacttagaaggcaaggagaaataatgaaactaactcttaggttgttcccctacacttcaaacatgtatctatatcccaggcagggtttgcatggcccagagcccacactggcaggctctaatctcactgcagcagttttagagggcacggcagggcagtggaagggtggctggaaagaagtatcaatcactccaaactcatgaaacatgccaacatttatttgctcattggttaaatattctctacctattctacatggaatgccaggaaaaccagcagagggcttctccattatccagaatctgttaggaccacttatatcatgctctggggtgcaaagaagagacacaagaaagaccatcccagctgcctcaggctttcaacctaatggtagtttcctatgtttggttcaaatgttcatgccaagttggggaactgaagacacatgacaaatgagacttcactctcttttgagagggaagctgggagtaaaagcaaaattgaatcaatcctgggcacagtctggcctttttcacctcccaggcctcaagagtgaaaggggtacgagaagacagggcaggtggcctctggatccgtggcaaacaggagagggaacatgctgagggaagccccgttatttagactcttcaaactttaggatgtgcaactggaagagaaagacaaagccttggtgggaaggaaggcccacccgagccagttcacccaacccctcagataaccagttcgtttgatctaaaagaatgccaggtaaatactgtgtccaggcctaggcagcagcctgctgcagacaccccaagggcaggagtggagggacaacagccaagttagatgcaggagcagttaccgccgagttcaaagcaccagtgattttccctttgaggattcgatggacaacctcatacgaactcaaaatgtctgcaaaacaagacacaacaacaaaacctcagtggcacggggttgggcaggaggagcaaaggagggaagcaaaaggcgggggctgcagggaaagtgctctggccgccaaccagctccaaccagcaagtctctgctagttcctgctaaatccctgctgccaggatcaaatgagatgataaatgctgaaaaggtagcatagggggagggcaaaataacagcagataaagggaggaggcacttgttaaaataattacagggatctgggatttttaatgagaaattctactggggacagaaaatcacgttcactgaactctgctctgagagttccggctggatagaagaaggttaaaaccagagaggttttcaccatgagacgcaagcactcttacatgctggaaccaggcagggagctcatcaaaaacccacctttccccaggatgtcgtccctcacgcaactcccaccatcccaccagagtccccaaactctgggactgtttgtatgtatgacactgaatcactaagagtcagacctaggtttcatccccagctatgccattttcttgctattaagtatgagttcatttcacttttctgagctgtattttcctcatccataaagggaggaaaactgacgcttgtctgacttatctctgggttggggactctggcccttctgacaggctgggagctgcactttgaaacaggaagctcctcttccctgggtcacctgaagaagctcctgatgcctggctgttcccagcctgggcagcagggaccctcttcatgcaatgacccaagacaacctctgggtggtgctccctgcccactgggcacaagccccaccagcctcccaggaagccttggccctgcacaattgggagatgcctttccatctttaaatatatatattatatatatcacgtattatatattatatatgttacataatatataatatatattacgtgatatatataatatatacgtaatatataaattacattatatatatattttatatatatatatattttggccgggtgcggtggctcgcacctgtaatcccaacactttgggaggccgaggagggcagatcacgaggtcaggagttcgagaccagcctgaccaacacagtgaaaccccgtcgctattaaaaatataaaaattagccaggcgtagtagcacatgcctgtaatctcagctacccaggaggccgaggcaggagaatcgcttgatcccaggaggcagaagttgcagtgagctgagatcacaccactgcactccagcctgggcgacagagcaagactccatctcaagacttagtttgtctgagggccgggcacggtggctcacagctgtaatcccagcactttgggaggccgaggtgggcggatcacgaggtcaggagttcgagaccagtctggacaacatagtgaaaccccatctctactaaaaaaaaaaaaaaaaaaaaaaaaaaattagctgggtgtggtggtgcgtgcctgtaattgggaggctgaggcgggagaattatgtgaacttgggaggcggaggttgcagtgagccgagattgcgcctctgcactccagcctgggtgacagaacgagactccatctcaaaaaaaaaaaaaaaaagacttagtttgtctataaaacgtttccatctcagctaagcgcggcagctcatgcctgtcatcccagcactttgagaggccaaggtggaaggattgcttgagccaaggagtttgaggctgctatgagttatgattatgccactgcactccagcatgggcaacagagtgagaccctgcctctgaaaaaaaaagaaattttttaaataaaacttttccatcttacttcctgtgtatgtgtatgtatgcttcttcacctccacttctcctgactgccccctaaaacattctttcatccttttacatttcacctaacttcgatcttgagaaggggcctcttcatttccacctatggagaaacccacaggtgtctgaagctaaatgaatcacattaggagagtgcagtgctaagtgctgtgctctggcgtctagcactggcattcgagtgctagttttcttctatggcagaatctttttccagtgaaatctgaagcaacacgccaagtatgtaaaacagatgaaagctgagcagctctggtggaagcaggggtgggaaatctgccctcttctctccccttccagagaactcagcctttgggcagcatctgaggtccctgttgggatcttgggctccagatcccaggcatgaaaaccaacacttgagaggcagctttgcaggggtcatatgctgaaaactggggttgggtggaaagagagactgaagcaccttggccgcccactatgctgcttcctgttcaggtcccagaagcaaccatggcttctcctgtccctgaaacccttgggaggaagatagaagatgtctcacctttctccagcatgaatggctgagtcaggggtgggatggtccagaagtcgtcgctgtctaggctgcgcagagactgcacagggatggtggccaactgtccaaaatcaatgaacatgaccacagcccaggtgtccaccctgtccagcacccaacacctggcagaggaaaagagaaagacagaggacaatcattccgcctagtgccatgcacagcagtcctcaacaaagtggatgtgaaagtggaggtaggagggaggaagagcgagtttgctctgtttctccccaatccttgagtgaggaaataaggataaagatgattttgagagaagaagccacaggaaaaaaaaccagagcccaaaggaagagaatgcaagaagggagcattttccctgcacgcctctcccatagactctacccctgcccaggcacacacctgttccaggcgtgtccataatcccccaggtggtactctgccagacagcgagtcccgcgcataacggtggagccctccaggtagggctgctgctcctccgcctgagccagggtgctaaacagagcctgcatgttctggtgcagagcctgtggggtgcaaaacgcaacggccccactgcctgcactgcattacaaatctgcctccgtagacgtcacctgttatgttagcaccgctaatccgtcccaaggccatcaggtatgaggtgggagagagaacgagactgaacccaggatcagaccgtagttaccctgcatctccaccactgaccggccccgtcaccatgcccaccctagggaggccacgcaggaaggcacaggagcctgagggggccaacaaccagtccatacctcagtgacgtgcatggcccagaaaaacggggtcttcgggacgatactcgtcaccagcagccccgcctccccacggacgctatggatgagtgccagccagctcaggtcttggaagcattccctcaggagcagcaccaggaaggaccctctgcgggaagagcaaggggagcaaggaaaggaacgactggaccaacgcaaggaaaggaacgactggaccaacgcctgtcctgcaggaggctgaactgcctgggggatgagtcccctaagcagaaaggctgtgcccaccccctctagggtgggagctaaagccagttcccaagtaatcccagtccacggcagaggaaaggaagggccattctgggggcgtaggggttgaagagttcaggaaaaggaagcagcagagggaaacaaaaacacactgagaaactccgagagaggtggataaaagtcctcaatgggtagatttggggcctcctaagtgattcacgagcctctaaatgatgcaggtgtggactgtccaccatgcaggatatgccttccatcccaaagctgctcctcccctgcgtctacgcacattccaaatgtcaccctgctgctccactaactcaattacctgcctaaaccacacggggctaatgacaccctacagcatttcaagtcaaactgagtattctggcactcttgacattaagaacggtatccgctgttaaagcaaagcaggggacatggtgggcatgatgatctcatggcatccagggcaggggacggtcacaggcctttgctgtacataagtggaagctgattttatcattttgttttatttatttatttattttgagatggagtctcactctgtcactcaggctggactgcagtggcacaatctcggctcactgcaacctctgcctcctgggttcaagtgattctcctgcctcagcctcccaagtagctgggactacagatgcccaccaccatgcccggctaattttttatttttagtagagatggggtttcgccatgttggccaggctggtcttgaactcctgacctcaagtgatccacccactttggcctcccaaagtgctgggattacaggcatgagtcactgcccccggctgggaagctgattttataagtcagtgtgggtcacagccttacagcctgggtctgacacaggagttcccgaaaactatcccccaccccagtactatccttgtccccactctctgggggacagaggatgtctgtaatcgccatttgccctggtggtctttctataccttgctcacctcatttccaacgggactgcaaagaaggctgccctcagtttctctgtctcacacaggtcaacaggagctttaggagcgagctgtataatagctagaaagcagaagactaagtcctggaggcaccagaactacccagagaggaattgctcccctaacccacaagaggccttggccctgccctccaaggaagcataaaatgggccaagaagctgcaccctccaacttctcagtctctagattctcatctg

SEQ ID NO: 95519 - DNA, 40054 bp, Homo sapiens
  misc_feature (1)...(40054): n = A,T,C or G
aatttaaaatgccatacatatttacgcgttcgcgggttaggaataaatagtaacttctcaggcttgaaagcaagtcatgaaaagcacagagctgacgaggtgggatggggtggagggtgggtttttattcacatgactgagggcggagggcagatgccaagtgagtgcatgaaggggctcagctgtaaagaccaaagcagcagaggcaaaaagacttcaatgttttaggaaaataatcaagcaaaacactcatctaatgaacatttgttttgagacagcatcttacttggtcactcaggctggagtgcatggctatcacagctcatggcagccttggacttctgggctcaagggatcctcctgtctcagcatcctgagtagctgggactgcaggcgggagccactgtgcccaattgaacattttaataaagtatacgcgtgtttaagagaaatgtgaaagacatatcttttggttaaagcttggtgtcatataaaaacagttagacacacactctttcagcacaggagcccaactgtaaaagcaaaaaaagctgcactcacaatctctgcacagaaacttgatgagaatgtgcagcccagcgtgtgatcagggagtatggttagacagttacggggcctcatttctcttccttctcctccacatttgcacatcttcttaagggagtgtgggtgaatgttataagggaaagagggtcaacatattttctttaaaaatataaacagaaagagatgcctgacactgcatgctgacatccttggtcctgatgtccgagtgatagtaaaatctgaggctctgaatgaaaggagcccctgtaccctcctcagggacccgaggctgcctcccagcccaagccccgccccgtccagtcctcacctaggtgaccgccacccactgacagttggcgcgtggatcatgagctcccgggcactgaagccgtcttcgtgtccagatgagctgacgactacaaatccaatcttgtggggcattctgcacgtttgggctgtttataagagcaggaaaaacttctttaaaacaaaggaattcactaacacatggacatttaaagggttggttcatgccttgctaacacacacaataatgcactaagtattcagaattttcccatctctttgaaaagagtctatttttttttgttaaacacttttatagatgcttctggttctgcttaagatatcatttaagttatcttgacttttcccaaatatgtgtccaaaaagtttgaccagtgctgtggattgtgctccccaaaaggatacgctgaagttccacgtgtggtacccgtgaaggagacctcatttgaaaatagggtctctgtgggtgtgatctagttaaaatgaggtcctcggggtgggcccaatgcaacgtgacttctaagaagggaagagacacagccacacaaagggagagcgccatgtggtgacagaggcagagaccggagcaacgcatctctaagcgggccggccaaggacggctgaggatggccagcaggcgcccaaggttaggaagaagccaggagggatcctgccctacagcctccagagcgagagtgcagccctgcccatgcagccatctgacttctgcctccagaatgaatttctggtgttttaagccatctagtttatgatattttgctatgtctagaatataaacacaaacttctttctattagttaggaaactaatacaaccagtatgttaattagttatacaataccaaggggaaaaaggcaacgtaagcgctagcattaacaactgctaaatgaatgtgtatgaccagaaggaagagcaggaatgacaggcaggcatattaagtacaaaaaggttcatgcagagttaggttgagggactgactcacaggacattgascccaatttgctcagggactctgggttacttttcagttactaagccagtcagattcctcctaagtaagccaatttgggttaggtctaaatcatcggggggaaaaaaaaaaggctcctcactaaaccaggataaagaagactccatcagaaagttctctgggataagatatactattaattgaaattcccaataggaggtaacatataaacatacccccacataaaactgtacgtattttgacatgcttgatgcatgatctagatctttcttttactttcattgagaattcgaagaggaccacttcaatatattaattattggctggcattattgctaatgtttcttggaatgtatgaacaaaagcactaaaatagaatgataaaccatcgagattctagttattttttgcacaaagttcactgcaagatgttactgtatattaaacaaaaacaaaactaaaccaactcagaaaataatttttaaaaagccccccgaacaggatgaggctgggtgtggtggttcatgcctataatctcagcactttgggagaccgaggtggaaggatcacttgagcccaggagttcgagaccagcctgggtaagagagtgagaccccgtttctaaaaaaccaaacaaaaaaagaattttgaaaggatgagtgtgatttaacccactgttagctgcacggccccacctgcactctgggcaacctatgccagaaacgcacagcccatggctcccactccttcgtgacctggcacttctgggtcgcatgggctctgagcctagaggtacttttcccttggccacagcatctctcttcacccactccccatccaacagtgtgccaggtcttatcaggcctgcccttccttctgatcccactgtcttttctagacagcaaccacctggtgtccccacctgaagcacctccctcagacaagtcctaagttcctattgtgtgaacgtgcctcaggcccagctccagtcatctccatccatgtcctaactccagagctcttggtgggctccccatctagggrtcaatgcgccaactctcccctgaccctcacttcttgtcctgaattctgaagtccagccaaacaatcaaagctcaaagttaatacccttcagctctgaagccctccaatcctttcatcagctttttttccttttttgagacaagagtctcaatctatcacccaggctggagtgcagtggcgtgatctgggctcattgtaacctctgtctccctggttcatgtgattcttgtggttcagcctctcaagtagctgggattacaggcatgcaccaccatgcctggctaattttttttttttttttttggtattttagtagagacggggttttgccatgttggccaggctggtctcgaactcctggccaatctgcccgccttggcctcccaaagtgctgggattacaggcataagccaccatgccaggccccttttatcatctttcagggcagggcttgtcactccctattccaccttgaaaatacctcttgtgcccaggctgttgggttccagtctccaaatttttttttttttttttttttgagagagggtctcactctgtcacccaggctggagtgcagtggcgtgatcgcggctcactgcgacctctgcctcctgggttcaagtgattctcccgcctcagcctcccaagtagctagtattacaggtgcgcaccaccacacccagctaatttttgtatttttagtagagatggggtttcaccatgttggccaggctggtctcgaactcctgaccttaggtgatccacccgcctcagcctcccaaagtgttgggattacaggcgtggccattaagcccagccccgattttttttttttttttttttaatacaggttctcgctctgttgcccaggctgtactgctgcagtggcgtgatcatagctcactgtaaccatgaactctcgggctcaaatgatcctcttgtctcagcctcctgagcagctaggactacaggcacatgccaccatgcacagctacttttttttttttttttgtagggatggggtttcactgtgttgtctaggctggtcttgaactcctcccaccttagtgtcccaaagtgttgggattacaggcgtgagccgccgagcctggctagtctctgaacctaaccaacactctctgttacggctcgaagacataaatataggaccttttcagtcaaacagaagggtgtttccagtatgctatactgcccccaacaaatctaaaacaaagtactggcatttaagaaccagctaagagaaatgcacagggactgtggaggcaatgctattacctcagtctggtatttgaaaaggattccttttttagtctaccccctcccaaagaccttccagttgtaccctagggtcccctctgtgtaaaccttcaagtgttacataagatacttggaatgtcactgaaggatgccacttttaggttctataaaaatcaccattaacaatttgggaagaagcaaagctctgttgaacatccagttattggctggtcttcctcaccagaggcatgagggatccctgttgtcccaggggcagccatcgacatcccgacaaatgccagagtacatctctccccaggcagcgatgactccatggcggtctcatccctcactacacttttcctagtgctggcatggtaaaaggcaattaactataaattaaacggaaactcagtgtagcaacttccattttgttacaagactaggaaacaaaacttgtctctgattttctttttaagaagacttttaagtgtgactgcgcgcggtggctcatgcctgtaatcccagcacttcgggaggccgaggagggcgtattacttgaggtcaggagttcgagaccagcctggccaacatggtgaaaccccgtctctactaaaaataaaaaaattagtcgggctactcgggaggctgaggcaggagaatcgcttgaacccgggaggcggaggctgcagtgagctgagatcgtgccattgcactccagcctgggcgacagagcgagaccctctcaaaggcttatgggtttctgatcaagtcatcttagcgactgaaagggcttcagagaaatctgaacttaagtgcaaacaaaacaaaacaaaccccaaaacaaaaaacaaccaaccatcagactttaatctctatagggacagagcaactttcctcaaacttttgctcagcagaacacatctgaaactggccccctatgtgctacgcatccagaagaggaaaagccggatctgaaaacaatattccacgctaaatgggccgtcccggccggggcaggcggtcccagcacccgtgctgagctccccggcatacggcacgacggggccgcgccggctcttcggcgacagcaaggccggcatctaactccacaccgtccgcgcttgcaccgcgcacccaggcttcgtacccagctcccaggtggggaccgcgcccccgcggcgcccgcgccccgcgccccgcgccccgctccccactccggccctgnnnnnnnnnnnnnnnnnnnnnnnnnnnnnnnnnnnnnnnnnnnnnnnnnnnnnnnnnnnnnnnnnnnnnnnnnnnnnnnnnnnnnnnnnnnnnnnnnnnnnnnnnnnnnnnnnnnnnnnnnnnnnnnnnnnnnnnnnnnnnnnnnnnnnnnnnnnnnnnnnnnnnnnnnnnnnnnnnnnnnnnnnnnnnnnnnnnnnnnnnnnnnnnnnnnnnnnnnnnnnnnnnnnnnnnnnnnnnnnnnnnnnnnnnnnnnnnnnnnnnnnnnnnnnnnnnnnnnnnnnnnnnnnnnnnnnnnnnnnnnnnnnnnnnnnnnnnnnnnnnnnnnnnnnnnnnnnnnnnnnnnnnnnnnnnnnnnnnnnnnnnnnnnnnnnnnnnnnnnnnnnnnnnnnnnnnnnnnnnnnnnnnnnnnnnnnnnnnnnnnnnnnnnnnnnnnnnnnnnnnnnnnnnnnnnnnnnnnnnnnnnnnnnnnnnnnnnnnnnnnnnnnnnnnnnnnnnnnnnnnnnnnnnnnnnnnnnnnnnnnnnnnnnnnnnnnnnnnnnnnnnncgcacaagaccgcgtcgggcctcacttttcccaggccttctgggtaatgtagtttccgggatcggcacccggcctgtgccagcttgcagagctcaccaggtgcagacccctgcggccagggcgaggacggatctgagcagctgggcagcaggtgccrccgcctgygggacccagagggcttgaggacatctgcaatgctccagaagcccaagagcgtgaagctgcgggccctgcgcagcccgaggaagttcggcgtggctggccggagctgccaggaggtgctgcgcaagggctgtctccgcttccaggtgcccgctgggctrggcggggacggcccgycggggaggcgtgtggggagaataggaggtgccgcttttcctcttccaaaacggagggtgcaggcggcgcccggggcgggtagttttcgttcscctcagccgctaggaccccgggcccccgcagcctggggttcctgagcgtggcttcagaacgcagggggtttgggggacgacctggatcaccccttccctcttcccacctctcgggcaggacagccctgcatcagagctaggagatccgggtagagtgccaggtactggcacgcggggtcacggctgctctgcctgtccggcctcagcttccccttgagtaaaatgaaaggcttggctaggtgggctctgcaggccccttccagccctcgcagctggggattgcaatcgtcaccttattctaggttggttttctttttagaccagtactagggttaccaggtgtgcattgccggggtcggtgcgggtggggtgggagtagccataaaatgcctaaaactgaccagtgcagagtaacagggaaccggactccaacaaattaacagtgccacgtgccggtcacacttgtgcacagaggcaaccaaccgttctccttcgtgtgccagcaccgctctggcggctgtgtgctggggatggtggtgttcagctcctggcagcagggaggcggcgctgtcaaagacaggctctatttgaagcgccctcaggagctcatttaaaaagggtgaatcctgcagagccagcagtcaccccctgatgtatgtttttcctgactcttcgtattttagaacggcccgcagtcaggcgcccttgctcccgctccctcatccttgcctgggcgttggagcgactgtggcatacaggcggcagcctgagcctgcttctttaagcacagctcattccggtcgtttgtgaggcctgcagatgcaaagccctcgtcttgagacccttcctcctcctgttgcttctcccgtccctgcagctccctgagcgcggttcccggctgtgcctgtacgaggatggcacggagctgacggaagattacttccccagtgttcccgacaacgccgagctggtgctgctcaccttgggccaggcctggcagggctgtgagtggcaaggactttggaggtgggcgggaagctggcactctcsgaggtcctgggggcttagctccaggtgcccatcagggtggggaagagtcccccttactgtgaactctcgggtctcaaggaggaagccctctggaggcagaactggtcagcgtcgcttaggtggcagagtcctcagtcctctcgttcatgaacccagctgttcaattggtcgtctttttcttcaaaaaatcttttaattttatttgcgttcatttgaggtgtcctagcaattcccaagagcagagggagggctttggggttggggcctgcacagtttcatggggaaggtggagccaggaagagatgctgttctgttctgctgggctgagcacccttctggaaggacgaggtggtggttcgtgggatgctctcacattgttctcggttggtgtttgctaagatgctgtcctcagggctcaagtttgggggcaattgctttgagaggtggttctttcggggcatctgtattgaagcctcaggacacaaagtcctgcctttcagaaccagccgaatgccaaggtctgcgcttgtttgactcccgtaaaagagagcttttggccactggggcaggagatgccatcatgtgcctttacctgggagggtcggccagtgttgtgcaaatggggtcaggctccaggagatgcttctggcrgcccaggaaggacatgggtgctctgagggatggagctgtggctccttggcctaaggggcaraaagagagaagtcgaagagtaacrtccatgtggccacctccccggctacagtgttgggggctccactgtcagcattgaggggtgacgcctctggtgtgtgctccaaggttgcaaaccccctttctccactgggccttgtgcttttagaggaggcagctggaaaatgtatcactgtgatgccccctggggtggcccctgcaggaggtgggggctgggcaggggtatgctcagggtatgcctcacctttggatgttatctttctttcccatttcagggcatagttgaaagacagcagagcacgttgctctctctctgtctctccctgcatctcgcagtctctgtctctctcctctgtctctgtctctggctctctctgtctgtctctgtctctctctctctctgtccttcctttctctggcgctttatcctcctctcttcgctgagaccgctagtcctcctccttgttagacttaaaaaaaattttttttcttttcttttatgaaaacattgagatggggtctccctctgttgcacaggctggcctcaaactcctgggctcaagaagtcctcctactttggcttcccaaagtgctgggattacaggcatgagccactgtgcctggccaaaatatttttgttttatttatattttgaaactttgttgcccaggctggagtgcagtggcacaaaccttgctcactgtagcctcgacctccgtgtttcaagtgatcccgttgcctcagcctcccaagtatctgggaccacaggcatgcattaccacgtctggctaattgttttgtattttttgtagagatagggtttygccatgtttcccaggatagtctcacactcctgggctcaagctgtcctcctgccttggtctcctaaagtgctgggattacaggtatgagccactgtgcctggcctaaaccgtttatttagaaataatgacagattcccaggaagttgcacagataggaaggtccaatgtacctctaccctttccctcaaaggcaacatcagatacaaccgtggtacaatataaaacaggaacaccgacactagtgcaatgtgcatgttgttctgtcatttctccccatgtagattcctgtgaccagcatcagggtcaaggtacagccctctcccatccatcactcaaggttctcccctttataatcctgcctacccctgcccaccagcaatccctagcccgtagcaactgctgatatgttctccatgtctataattttgtcatttaaagaatattaggggccaggtgcggtggcttacacctgtaatccccagcactttgggaggccgaggtgggtggatcacctgagatcaggagttcaagaccagcctgggcaacatggtgaaaccccgtctctactaaaaatacaaaaattagctgggcatggtggcgggcgcttgtaatctcgctactcgggaggctgaggcaggagaatcgcttgagcccagcaggtggaggttgcagtgagctgagattgtgccattgcactctagcctgggtgacaggctgagactccatctcaaaaaaaaaaaaaaaaaagaatattaggtaagtggaatcataaagtatgtgaccttttgagatgagcctttttcactccacataaggctcccgagatgcatgtaagttgtgtgtatccatagtccgttccttttcattgctgagtagcattccatggtttggttttaccacagtttgttcaaccattcgcctgtggaaagatattttgtttgtttccagtttttgactattacaaatgaagctgctctggccaattatgtacaagtttttcttttttctttcttgttttcttttgagacagggtctcaccctgtcgcccaggctggagtgcagtggtgcaatcatagctcactctagctttcacttcctgggctcaagcgatcctcctacctccgcccctgagtagctgggactacaggggtgcaccaccatgcctggctaatttttgtattttctgtagaaacagggcttcatcatgttgcccagggtggcctataactcctaggctcaagcaatctacctgccttggcctcccaaagtgttgggattacaggcgtgagccaccgcacctggccatcttgacaggtttttgcgagatgtaggttttcatgcctctggggagaatgcccaggagtacagtgctgcgttgtgtggtgtgtgtttagtttctgaagacaaggatgtccactcttgctgcttctgtttaacatggtactgcagggtctagccaggacatttaggcaagaaaaataaaaagcatccagattggaaaggaagaagtgaagctatttctatttgcagatcatatgaacttgtatgtagaaaaccctaaggaatccactaaaaagtgattagaactaatcatcaagtttagcaaggttgaaggatataagatcatatgcaaatatagaaatacacttccaacgaacaatctgaaaatgaagcagaaaatcatcccatttacactggcatcaaaaagaataaaatacttaggataagtgtaacaaaaaattgtaatacttatattctgaaaactgcaaaatgttgttgaaagaaattaaagttttgaataaatggattaacatcccatgttcatggattggaaaacttaacattgttaagatggtgggactccccaaactgacctacaaattcaacacaatccctatgaaaattccagctggtttcattgtagaaattgacatgctgattctaatccacagttcatatggaattgcaagagacccagaatagccaaaacgactgtgaaaaagaagatagtaggaggacccacatattctgatttcaaaacttagtacaaagccacagtaatcaagactgacactggtacaaggacagatatatagatcaatggaatagaacagagcacccagaaatctatgtatctgtggtcaggatgccaggaccattcaayggagggggaagagtagtatcttcaacagatagtgctgggacaactgtatattcacatacaaaagaatgaagttggactcttagctggtaccttatacaaaaagtacaataaatgaaagacctaaatgtaaaagttaaaaatataaagcccttagaagaaaacatagcgataagtcctcatcgccttggatttggcaaaagattcttagatttgacaccaaaaacatgagcagcagaagaaaaaacagataaattgggcttcatcaacattaagaactctggcccgggcacggtggctcaagcctgtaatcccagcactttgggaggccgagacgggcagatcacttgaggtcaggagttgagacaagcctggccaacatggtgaaaccccgtctctactaaaaatacaaaaattagccgggcgtggtggcaggcgcctgtaattccagctactcaggaggctgaggcaggagaattgcttgaaccsgggaggyggaggctgcagtgaacgacagcccacagaataggayaaaatagttgccaatcatgtatctaatacgggacttgcatcagaatatataaagaatccttataacttaatagtaaaaagataacccaattaaacatgggcaaaggttctgaaaagaaagaaatgtctccaaggaagatattcaagtggtcgtaagcacaggaaaaggtgcttgagatcatcagtcgtcagggaactgcaaatcaaaaccacagtgagatgctacttcacacccactaggataacaaccagtgtgggcgaggatgcagagcggctggaaccctcaggccccattgatgggaagggaaaacggtgcagctgctgtggaaaatagtctggcagtttctcaacaattacacagaatcgccatgtgacccagcagctccactcctaggtatgtacccaagagaaatgaaaacacgtccacaccaaaactcgtccgtgagcgtttacagtagctttattcataatagccaaaaggtagaaaccacctaagtctccaatgatgaacacttggatcaatagagtgtggcacatccatacaatggaagtactcaccatgaagaggaatgaaacacagcatggccgagccttgaaaccatgccaagtcaagaagcctgcacatacagtagggttccattcataggaaatacccagaayggggatgttagagagatggaaaatagattagtggttgtttagggttgggggtagggtagaggggagggaggttggtagctaaagagtatgaggtttctttttgaggtggtgaaaatgttctgaaattgactgtggatgtggctgcacaactctgggaatataataaaacccattgtattgtacactttatttattttatttattttttttgagatggagtcttgctctctccccaggctggagtacagtggcgcgatctcggctcactgcaacctctgcctcctgggttcaagcgattctacttgcctcagcctcccgagtagctggggttacaggcatgcaccactgcgcccagctaatttttgtatttttagtagagacagggtttcaccatgttggccaggatggtnnnnnnnnnnnnnnnnnnnnnnnnnnnnnnnnnnnnnnnnnnnnnnnnnnnnnnnnnnnnnnnnnnnnnnnnnnnnnnnnnnnnnnnnnnnnnnnnnnnnnaattgtacactttaaatgggtgaattataaggagtgtgaattatatttcaataaagctacttaaaataaagaaaagaaactgccaagttgtgtgctagagtggccgtcttacctttccactgcgcagtttctgtgcagcctcgccagctttcggcgctgttgctgtttttaattttagccattctgattgcagtgtggtgatgtctcgttgtgcccttaatatgcatttccctaatggctaacaatgctgactatctgaatatattttataaaaacagagacagggtctcactctgttgcccaggttggagtgcagtggcaatcatggctcactgcaaccctgaactcctgggctcaagcgatcctcctacctcagcctcccaagtaactgggactacaggtgtgcacccccatgtgccgctaattattatgattttttttagagatgggggtcttgcttttttttttagagatggggtcttggttgccaggttggtctcaaactcctgcccttaagtgattctcccacctcggtctctgaaagtgctgggattacaggcgtgagccaccgcgcccagccctaaatatcttcttatgtgcttatttgccatctgtagattctccttggtgaagtgtttcttcctgtctcttgtcctttttctaattggcttatttatctatttttttactgttgagttttgaaagtcacgcctcaccccacaaacaaaatacctggacatgagttctttgtcagacatgtggtttgcaaatatttaccctgtggcttttcattctcttaagagcattttttttttgcggagtaagagtttttagttttgaggaagctcagtgtgttgattttctcttttacgcagtgcttttgatgttaggtctaaggacttccaccaagtcctcactccccagcatgtcctcctgtcttcttctgacccactgatgtgatcgtgaggcttttctcatatggtggatcgcactgatmgatttgcaggtgtgaaccagccttgcgttcccacttggccgtggtgatatttctttgtgcatgttactgagttctctttgctaacattttgttaaggtcctgggtagactttgctttaacttcctattaagagcctgcccggagagctcgctgctttagggagttgtgaaaaggctccaggagagagtaggaaaagtgatcggaaggatctgaaagcaaggtctccaggaagggccaaagtggggggcgtatggtttggaggggaggaggccaaatgggaaagcggccgtctcttggtgcgctttcatctgtcctctaaagcacaccctgcccctccctcctctgtcctcatgccgcccttgtgcgtggtccccagctgttggtgtcagggcaaggacaaagacccgggacacctcaagtctgagtcctggtgattgccaggccctggggaatgggggaagatgtggtcagaggctcttcttgtgaccggggcaggatgtgtcttctgctggaccggcaccttttgtttgtcccattggtggcagatgtgagcgacatcaggcgcttcctcagtgcatttcacgagccacaggtggggctcatccaggccgcccagcagctgctgtgtgatgagcaggccccacagaggcagaggctgctggctgacctcctgcacaacgtcagccagaacatcgcggccgagacccgggctgaggacccgccgtggtttgaaggtgcgtgggggctgcagctggcaggggagaggcttctttggagyctgaggtgccagaagaagttggattycaaaaagcccccagtgaagggctggcctgtaccctcgtgggttgaggtgggggacttggaagaaaatgtgctcatttcccagcatttcccagcctcgtgggaaaggtacccagcaaggactcaggtggggccagagtccagggcagccctcggatgggactttttatatttttatagatatgttttgagatggagtcttgctctgtcccccaggctggagtgcagtggcgtgatcttggctcaccgcaacctctgcctccctgcaccctctgcctcccaggttaaagcgattctcctgcctcagcctcccgagtagctgggattacaggcaagtgcaaccacgccctgccaatttttgtatttttagtagagatgaggtttcgccatgttggccaggctggtctcaaacttctgatctcagcctcccaaagtgctaggattacaggcgggagccaccccgcctggcctattataattattttaaaaattgtgctaaagtacatatgacataaaatttaccttctcaatcatttttttagtgcacaggtcatcggcattaggtacagtcacattgtatgcggccatccccaccgtcatctccggaactccttccaccttgcaaagctgaacccgtgtccctgttmcatcactcccccttccccctccgccagcccctggccaccaccattccggtttctgtctctctgatttgatgactctagggacctcatatgaatgcagtcacatagtatttgtccttgtgtaactggcttattgcactcagcacagtgtcctcaaggttcatccatatcgtagcgtatatcaaaagttctttctttttttgagacagagtcttgctctgttgcccaggctggagtgcagtggcgcgatcttggctcactgcaagctccacctcccgggttcacgccattctccagtctcagcctcccgagtagctgggattacaggtgcctgccaccacgcccggctaatttttttgtattttcagtagagacggagtttcactgggttagccaggacggtctcaatctcctgacctcgtgatccgcccgcctcggcctcccaaagtgctgggatcacaggcgtgagccaccacgttcagccaatttccttctttttaaggccaaatgacagtccactgcgtgtacataccacgccatctattcactccactgcgtgtacataccccactctgtccattcactccactgcgtgtacatgccacgctccgtctgttcactccgctgcgtgtagataccacactgtctattcactgacacttgggttgcttccaccttttggcctggccttgtaagcccatcagaggcgatgctgagagattgtagcctttttgggaaaggagggcttgagggccaggcagaagctccttggtggtatttgagatgcttctaacaacaaaaaccaaacagggatgctgtctgtgtcgccattagaatacttctcaagatgatgcaatctggccaggtgtcgttgctcacacctataatcctagcactttgggaggccgaggctggaagacagcttgagccctggagttcaagatcagcctaggtaacaaagtgagacctcatctctaaaaacatttaaaaagtgagccaggtgtggtagtgcgtccctgtagtcttagccacttggaagtctgaggcaggaggattccctgagcccaggaggttaaggctgtagtaagctgtgttcgtgccactgtactccagcctggaggacagagcaagaccctgtcaaaaagatgaagcagtatgaccctcatattctgccctgcttggcacctgrgctgggcaggacacagacccagaggcccctggcctgccctgtggacttgggggtcttctcgttttccttgcaggcttggagtcccgatttcagagcaagtctggctatctgagatacagctgtgagagccggatccggagttacctgagggaggtgagcctgagtgaagaccgggtatgctgggcgggtttttgaagccaggctctgtgggctctggaagcctgtggtcctcacgatgggtagttggtaggaccacactccgtgcttgcgtggatctggtggggctgctctggtgagggaagctagcgcacggaccctgtgcctcctcccttcatgggggtgaacacccatcgggccttttcagctgcacttgaggtcacgggttggggagcggggaggtggtggctcctgcctgcnnnnnnnnnnnnnnnnnnnnnnnnnnnnnnnnnnnnnnnnnnnnnnnnnnnnnnnnnnnnnnnnnnnnnnnnnnnnnnnnnnnnnnnnnnnnnnnnnnnnnnnnnnnnnnnnnnnnnnnnnnnnnnnnnnnnnnnnnnnnnnnnnnnnnnnnnnnnnnnnnnnnnnnnnnnnnnnnnnnnnnnnnnnnnnnnnnnnnnnnnnnnnnnnnnnnnnnnnnnnnnnnnnnnnnnnnnnnnnnnnnnnnnnnnnnnnnnnnnnnnnnnnnnnnnnnnnnnnnnnnnnnnnnnnnnnnnnnnnnnnnnnnnnnnnnnnnnnnnnnnnnnnnnnnnnnnnnnnnnnnnnnnnnnnnnnnnnnnnnnnnnnnnnnnnnnnnnnnnnnnnnnnnnnnnnnnnnnnnnnnnnnnnnnnnnnnnnnnnnnnnnnnnnnnnnnnnnnnnnnnnnnnnnnncaggccacaccacaccaagccacaccacaccaggccacaccacaccataccacaccacaccaggccacaccacaccaggccacaccacaccacgccacaccacaccacgccacaccacaccaggccacaccacaccacgccacaccacaccacgccacgccacaccaggccacgctacaccaggccacaccacaccaggccacaccacgtcattccacaccatgccacaccgcatcattagcacatggagggtgctgtggaggcccctgcaatgggtgtcctgtcctagtgctgccctgcgtggtcggcccccacgccctcggcccactcctctctgtggcacaattggtaatgctgcactgcaccccgtttttctgcatctcttcgaggtcctggcgacttgccatgttcccttgcatttcccagcctgctccctgtagtggagctaactgatcctgatactcttccctgcaagtgcaatgaccaggcccttccacgcaccactgcctgcctgaccagggtgggatggccgtgcctgcctgactttattagctcatcttcttttttgagacggagtctcactctgttgctcaggctggagtacagtggtgcaatctcagctcactgcaacctctgccttccaggttcaagtaatcctcctgcctcagcctcccaagtagctgggattacaggcatgtaccaccatgcccagctaattttttgtatttctagtagaaatggggtttcaccatgttggtcaggctggtctcaaactcctgacctcaagtgatccgcccacctcggcctcccagagtgttgggattacagacgtgagccaccacacccagcctgttatctcatctaagtctcacccagcctgggggctggtgtggttccctccatttcacaggtcagagtctcccagggtgggacagcccagcagtggccgagaggccacgtgaactcagaccctctgaccacaggactgggcttgggcagggtctcagagggccatggagtgagatggatcgagagccagtgcgggttttggggcgctgtgcaccaggctcascgacgttccttggttcctccaggtgagctcctacccctccacrgtgggtgcggaggctcaggaggaattcctgcgggtcctcggctccatgtgccagargctccggtccatgcagtacaatggcagctacttcgacagaggagccaagggcggcagccgcctctgcacaccggaaggctggttctcctgccaggtgagctgtgtgccctttatcctggggccacccggctggcctgtggaacacagcccgcctggggcgaggcrggtggggaccttcagcccttgccctgcctgggcaaagccttgtgaagaggtacagccctcacattcccagggagggcggcagtgtctcagccagtgcctctcaagctgcagtgyacacaggaatccctggggagcttgcagagggctgcagggcccgccccagggsttgtctcggtagkgctgggcggtgtcttagtcagcyccggctgccataacagatgacccctgctggggaggctggaacggcagctggttactgctcatagttctggaggctggaagctgagatcaggtcygcactcccccgctgccttcccaggtgtccctgctgcacygtgctaggcgtggtctggcctttagtggtgatgcatctgtgtctctggcgagtcctgggcacacccctccccctcccatggtgtggggagcaacttgaggcgcctcttggcgtttgcacactgcagttgcattcccggtaaggtccactgatgcccgtgatcttccgagtgccactcagtgggtccagcagcaggggccaggtggtgggcatggcctgcggtgcttcttcccatgggacagggctccttgctgctcctgccaggcagatccttctggggtgatggrctctggccataaaaacgcttcttccaagttagcttaacatttagactttgcagtgcgctcgctcaccactcagtgagtacttactttgtgcctggcacygtgggaggggttgggacacaaaaatgaaaaatccttcatccctgatggcagggtgartcctgcacwatggaaggtgaaagacacataaatgagcgagacagaggaggccaaggggctgcaggagccgcagccagcatcctgggagccagggccagtcagaagcggccccagggagggggtggggccttagagcaggttgactgataggtgggggtgcaagagtgagctgggagggaccaggtgctccgggcatggcagtgggaagcagtgggctctgctggggaggctgtgagtccccagggtgatgggggcacagagtgcaagtaggcactggggctcccggcacgtgctctgcagatgtctgttcacgaatgagtgtgttgagtgctgggctgcggaccacagggaagacggaagctgtggccatggcaccttcagtgaggcagccctgcctctgcattgggatcacagggaaacatcaggaagccgcgggcaatggctggaaagggagcctctgggacatgggtccttgcttctcacgcgctggtcctgccctggcaagtcagtaccttcctggcctcacttcccatgaggtgggggtgctggtgtgtgatcacasgggtaacagtgacaataactaccttgtcctctttgggaactcagaacatattgttaggggtaatgagggaaaaagaaggatctgattccaaaggcagagctttttttttktttgtttgtttgagacgagtctcgctctgtcaccaagctggaatgcagtggtgcgatctcggctcactgcaacctctgyctcccaggttcaagtgattctcctgcctcagcctcccaagtagctgggattacaggcgcccgccaccatgcccggctaatttttgtgtttttagtagagatggggtttcaccatattggccaggctggtctggaactcctgacctcaggtgatccacccacattggcctcccaaaatgctgggattccaggcatgagtcaccaccgtgcccggccaaggcagaactctgaatctccctaaagcagtataccctggagcagggaccagcccccacggggtgcgtctctcagtaagatcrcctgacttggtgtattaggccattctcgcattgctataaagaaatagagagtgggtaatttataaagaaaagaggtgcaattggcttacggttcagcaggctgtacaggaagcatggcgctggcatctgctcagctgccggggaggcctcaggaaactcacacttgtggtggaaggggaggcaggagcaggcacatctcasgtgcggggagcaggaacgagagagagattgaggggagggtgctacttttaagccagatctcrggaggactcacactggcgtgggcagcacccaggcgatggtgctagacccttcatgagaaatccacccccaggatccatcacctcccaccaggccccgcctcccacactagtgctgacatttcaacatgagctctgggtggggctgcacgtccaaagcatgtcactcggtgactgagactgtatgagactcacttctggccgggcgcggtggctcaacgcctgtaatcccagcactttgggaggccaaggcgggcggatcacgaggtcaagagatcgagaccatcctggccaacaaggtgaaaccctgtctctactgaaaatacaaaaattagccgggcctgatggcgggcacctgtagtcccagctactcgggaggctgaggcaggagaatcgcttcaacacgggaggcggaggttgtagtaagccgagatcgggccactgcactccagcctggcgacagagcgaggcgctgtctcaagaaaaaaaaaaaaagagactcactttctggccttccctcattgtcttttggcccccagggtccctttgacatggacagctgcttatcaagacactccatcaacccctacagtaacagggagagcaggatcctcttcagcacctggaacctggatcacatgtaagctcacagagygaggttcagacccacgagtgcctgcagggccctgtccctgccgyggccctgtccctgccryggccctgtccctgccryggccctgtccctgccayggccctgtccctgccacggtgttgcctccttgggtttcaagggctgcacccgtgttacagcccagggaaggggtacctgatggcagcatrgggggctgctgagtgggcacacaccattccctccactgtcagyatgtgtacctgacccggagccagccctcctgtcccctccagtcctccctgtggatggagctggtgggcagcgtccttccccagaacacaggtcccagcccttggctgtcagaggttctgaacctctgtgagtttgaaccagggtgagctcagacagcgggagctcctggtgttatgataggtaagggtgtttttccctttttctttttcttttagagatggagtcttgctctgtggcccaggctaaagtgcagtggcaggatcatggctcactgaagccctgaactcctggcctcaagcratcctcctgcctcagcctcctgagtcgctgggactacaggtgctcgccaccatgcctggctggcttattttgtggaaccagcatgagcagaagtctcagcaggcaggagtgtttcacagccgtacgagctctatggctctaacaaatgggcaggatggaaaacttcattcttttaaactgagatgcatttcttgaatataattgtagccttgcccttgctttttgaagacagaagccttcaaatgcccttaaaatggctgtacaggatgagcatccctaatctgaaaacctgaaatccgaagtgctccaaaattcaaaacgttttgcgaccaacatgacgctcagaggagatgctcatccgggcatttaggatttgggatttttttttttttttttctgagatggagttttgctcttgttgcccaggctggagtgcaatgatgtgatctcggctcaccgcaacctccgcctcccgggttcaagcgattctcctactttagcttccccagtagctgggattacaggcacgtggcaccacgtccagctaattttgtatttttagtagagacgggatttctccatgttggtcaggctggtcttgaactcctgacctcaggtgatccgcccgcctcagtctcccaaagttctggggttacaggtgtgagccactgcatccggccagatgtgggatttttttaaggatgctcagctagtcagtataatgtaaatattccaaaatcctaaaaaaatcccaaatccaaaacacttctggtccccagcatttcagatggggacattcaacctgtattgctttcggagtgagatttttttttaaagtatgtaaaacactatggtcatagttgagcttttaccctgtccatactcagcctctacaccttgccccgagggaaaacacttttgtgaaaggtgtgtgtgcccttcagagccctctcactgcacctttaccacaagcgtgtgagtttatcatgtacatacatggtggcccacgctgtcatctgcagagccgtgtagctgcacctttaccacacgcgtgtgagtttaacatgcacgtacgtggcctcccacgctgtggtctgcagagccgtgtagctacacctttaccacacgcatgtgagtttaacatgtacatatgtggcctcccatgctgtggtctgcagagccgtgtagctgcacctttaccacacgcgtgtgggtttaacatgcacatacgtggtggcccacgctgtggtctgcagagccgtgtagctgcacctttaccacacgcgtgtgggtttaacatgcacatacgtggcctcccacgctgtggtctgcagagccgtgtagctgcacctttaccacacgcgtgtgggtttaacatgcacatacgtggcctcccatgctgtggtctgcagagccgtgtagctgcacctttaccacacgcgtgtgagtttaacatgcacatatgtggcctcccatgctgtggtctgcagagccgtgtagccgcacctttaccacacgcatgtgaatttaacgtctacatacgtggcctcccatgctgtggtctgcagagccgtgtagctgcacctttaccacatgcgtgtgggtttaacgtgcacatacgtggcctcccatgctgtggtctgcagagccgtgtagctgcacctttaccacacgtgtgtgggtttaacgtgtacatacgtggcggcccacgttgtcgtctgcagagccgtgtagctgcacctttaccacacgcgtgtgggtttaacatgtacatatgtggcggcccacgctgtcgtgtgcagtgtacctgttcattgcatgctgtgcttagattcggcatattcatttcagcaggtgcagaacacttcactttttgaataggctctaattttaacatctttccatactgggaggcatttaggttatttctaatttctcatcattataaaaatccctgggatgaacactctatggaatgaacccatatggtctggttccgtgctatttaaagtgtggttactttcaagcattagcaacatctgggagctgggaattcagattctcaggccccatccagacataacccaggtgcctggggattggggtgtgcgtcccagcatggacaagatgccccagtgtctgagcttgagtccctctagtgagtgtgctgggtcctaatgacacctctgttccctctctgagcctggccaggctgctctcgagtgtcccagcctacacactcgccatccgtgtgagttcatgctttcccgggttcttgctgacacttggtgtcattgtacttttttgcattttcccaacccgataggtgagacacagattctctttctctaattttcattttcctgatgactaggaaggttgagcttctctttccacgtctgtggccgcttgtgtcttctgtgtttctttcctttgctcgttctctcttgggctatggtcttatttgtgggcatgctttacacattctggatacgttaatcctatgatatcttttatcacaagttttatttatttattttttgagatggagtctcactctgtcgcccaggctggagtgcagtggtgtgatttcggctcactgccacctccacctcctagattcaagcgattctyctgcctcagcttcccgagtagctgggactacaggtrtgcaccaccacacccggctaatttttgtgttttttyagtagagatggggttttgccatgttggccaggctggtctcaaactctgacctcaggtgatctgcccaccttggctttccaaagtgctgagattataggcatgagccactgtgcctggcccacaacaagttttcagtgttaatgtgctcagatgttccctttgtatgttaagaaatcctgccctaccctgtctrtccgaaagagatyctcctactcttttctctgctgtttgctggaccccttgccacatgcaacaagtacccaaaaatgttttctcccsgccatccaaatgctcttgtccttttcaagaccattgcaggtggggacatcaatctaggggacacaatcagcatttacagaatgaaataggccatcctagaacagagtacagatgaaaatagcagaagggacagcgtgagtcagaggaatgtttcaccaagtgtttgctgcggttatattttctctcacgcttcctaaatatgtatactcacacacagataagtgtgttgggttttaattaaaaatgtagttttcagcaccggtcttcggaaagttgcagagacagtggtctgtttgccacaggcctgtcctgacgtttgtgggggttgacaccacgtgccacatgtttaattatttaagaattaaaagctaatgaacaatgaaataaaatgcatgctgtccccctacctggacttacgtagcatcatggctgggaaggytcgagaagaatttgcaggtcttccccagttccgggatgtgcacagcagtggagcctaaacatggcctgccacctgctgcctgcrccttctcttcccacccttagtgccacctcacaccaggggcctgcacagaragcgtccaggcttggaacaccttccctctcgggctgaagggcgcgggccctggggctcagcctgtccgaggaagacggcctggcccagagcccatgcggttcaggggcccctgggcggaaggtggcacgaggagcgtccgtgtgggctctgggtggacctgactcctcagcccagaagaatcctgcctcccgtgggagggctgtggcgggtggggcctggaaagctcccctttcctggagccctggggacgtttcttttaacaccatagcggggtcctcatggcctgtgtgagccctgccgctggggaactttcctttctgtctcatcacagctgtctttggccgtctttggccctttacttcactttattaacgtttgcttttttgtaaaatttattcctaccttctacctttgtgggtttcttcttgcttattcatttgttygtgtctcttttgtatctaatctatacttaaggtagttcctcctaggctgcatgagttgtgtcttgggagttcagttttttttttttttttttttgaggcagagtctcactctgtactcaggctggagtgcagtggcatgatctcgactcactgcaacctctgcctcccaggttcaagcggtttttcatgcctcagcctcccaagtagctgggattacaggtgcgtgccaccccgcctggctaatttttgtacttttggtagagacggggtttcaccatgttggccgagctggtctcgaacttctgacctcaagtaatccacccgcctcagcctcccaaagtgctgggatcacaggtgtgagccaccgcgcctggctggagttgttttgagactgaatgatttacattatgattttgtttttgatccatggattttacagaagtctttttagtttccgagcatgttttcgtgtttgtgttcagtgtcttgtgttcctgcctgcctttcgttgtggtctgtttccttgtaactggtcagcgtttgtagatgttcataacactcagcacctcagttccactgtgccggctttctattctgtgccggctttctctcggtcctgtggcgtttccacccctttcctttggcctttatgtgccattaggtttgggcttatctcttgttagccaagggtaacagcctttcgtcttcatctaacctgagattctgtcattcagccagccgcagcttgaacctcctgctgcaggtgttgtgacagctgctgtctcctagaatgtgactctgtggggtccctcgctctcagctgtgtccccagtgtgtgggacgtgggacagagtttggccatgatggctactcagtgaatatctttttttttttttttgagacggagtcttgctgtgtcgcccgggctggagtccagtggcgcaatctcctctgactgcaacctccgcctcctgggttcaagtgattcttgtgcctcagcctccagagtagctgggattacaggcacctgccaccatgcctggctaatttttgtatttttaatagagacagggtttcactatgttggccagcctggtctcaagctcctgacctcaagtgatctgcccacctcagcctcccaaagcgctggggttacaggcgtgagccaccacgctgagcccactcagtgaacctctgttgaccgttttgttgagtgaatacagattggattttagctgctttactctgggtttgtacccaccatgccgcatcttcactttcttctggtctcttgtgtgccttctgttgacttacttgagtttccttctttcccttgcccatcaccccacccttttgtggtttggcgttcatggtgtccctaatgttagtgatactggaagacggcactgctgctgtcccctctcccgggccggcctcgctgtgaccctctgcggtattctttagtgttcgtgtctcaccttattttaatcctgcacaaaatgctggtgtggttttatggccaacacttccatttatttatcaacagattcacccgygtctgtgtttgccagtgcttcttgcatctcatctctgggttcaatttctgattactgatgtgtagcccttagtgtttcttccacgagtggctgtgaggggtaaactctactcagcatttgaaaaggtccgttcaacttccactcttgagtaattatttagttagtactgaattctaggatgacagatacctaccttcagtactttgaagaataactccattgtcttctggaatctgtgagaaatctgttggcagcctaattttctgcctttttartggtagttttagatttttctcctcctcttggaaaatgataagtatctaggkagagctctttcttttggattctgcctgggacttgtattccttgtgctgaggacacacttttctttggttttggaaaatgcttctgcgttgatgaggtgtggcttctctttgattctgcctgtgcggttttccgggagcgcctgttagctgtgtgttggaccttctcattctgctctcctcatgctgtgcctgcgtctgggctgctgtctcactgggrctttctgctgtggactccatcatgttccccaagattcgtatgttgaaaccctaatccccagtgtgactgcatcaggcgataaggtctktgggagataatgaaggtcatgagggtggggccctaatccactaggactggtgtccttagaaaatgggaaaggagctcactctccctctgtctctgccacgtggggacacagmragaaggcagccatctaccagccaggaggagagcccttactagcacccggcgtgcgggcacctgttcttccagcctccaggactgtgagagagtaaatactcagtctgtggtattttcctctggcagctggagcacactaagacactcctgtattgttcaggaattctctcttcagctgttcatatgttcattctgtccgctgagtacatgcttccttttttgggttcctaaagagcccaaaagaagtgcttttgggttcttcataaaacgagccttttttatgccagtctggtttcattatttccatttctttttaatcactttaatcattaatcatccattttaagcatatttgttttacagtcacatgctaaagcattcaaccttgcccacaggtctggcattcrttcttgagccctgggaggtaaacgccaatgccttcaaatgtcctgcctggtaggagtgtctttgttcacctgggggccttgggtcactggatagtttaatggsgtgatttaggatggggtctttggttcagcttgacctctagagggtttgmggtggaggttggccccrtgggccatcagccatgtctgtgtgagccccagtaaaggctggcayccaggcctggtgagcttcctggttggcagtgtcgtcacagagggctgtggaagttagtgcttggggaaggtagggctggccatgaccccacagggaggggacagctggaagctctgggattggaaccttcctggaccgccccctctgtgcctcttaaccttggctgattttcatctgcagctataagaaackataaccttgagtccaacggctcactgggggatctgcgagtcctttcagagagttatggagtctgaggtggtctcagggacccctccctgctgtagttggtgtcaggagtgagggtccttgtggactgtgctgggctcctgaagggcctgtcacgtgggcagccctctgccgctgctkggtctgcctctcctgctggtggagccttctgctgctgtgtgtttgggcctggagctcgcttcagtgggaagtgcttcccgtaggcctcctctgygctccagtgtgtcacggtgccttcagtgtggctctggtggagccttctgctgctgtgtgtttgggcccggagctcgcttgggcctggagctcgcttgggcctggagcttgctttagtgggaagtgtttcctgtaggcctcctctgtgctccggtgtgtcacggtgccccttcagcrtggctcttcgtgggttcggatttgattcctgcggatgcccagggtttccctgtgacttggaagcaacttcctgccatttcttgcttgtggttccctgccttgttggtcgtgtactttgggccgtacaccctgcgttctgcggatgactgtgaaggtggggacaggaacacactcccgatgtccacaccctgtgtgctcccctgccttctctccccacgctgaattcaggcttgtccaygtgacaccagkgaaggcaacactgagctaacagaggcctgcttgygtgggggacttgtcccctctgaacactgccatggccatgtgagggagcctgtcctggctccttcaggatgggggaggacaggggagaagggcccagccctaggccaccctccatcagacacagccccggtgtgcaccaggcaacaccagcagaaggccccccaggccaacccccggaagccactgcattttgtggtggctgcttctgcagcattagataacgggctcagtgggtttcccttcctcttgcccaagccccgggctccactcaagcttttctatcccccttaatggctatggcaggggtctcggtcccayctccctgtctttctagggtcccctgggcctgtatcagggactggaaccctggtrggcccctggaccatagcttgcctgtgtgcactaatttctctttggtttctggcagctggggagcccctttcttttgatctcaactaagtattttaacaaggtgacttttggctgggtgtggtggctcatgcctataatctcagcactgtgggaggccaaggtcaggagtcaaggccagnnnnnnnnnnnnnnnnnnnnnnnnnnnnnnnnnnnnnnnnnnnnnnnnnnnnnnnnnnnnnnnnnnnnnnnnnnnnnnnnnnnnnnnnnnnnnnnnnnnnnnnnnnnnnnnnnnntttcaaaaaaaaaaaaaaggcgacttttgctcagcattttgtgggttgtagggagaggggtctgcaccagtttagctcactcaacacccaccataagccctcctggccgtggggtctctaaaccccacttgttactgcacagtcttccaaatggtttataagtgaaacaacatcatgttgtgtgtgtatgtgtgtgcgtgtgtgtttgggacagtctcactccaaccaggctagaatgcagtggcacgatcttggctcactgcaacctccgcctcctgggttcaagtgattttcgtgcctcagcctcctgagtagtagctgggattacaggcgtgcgccactatgcctggctaatttttttgtcatttttgtagaggtggggtttcaccatgttggccaggctggtctcaaactcctggcctcaagtgatcacccacctcatcctctcaaagtgttagaattacagacgtgagccaccacgcctagcctcatgtagttttttgttttcttttttttttcagacagaatctcactctgttgcccaggctggagtgcggtggcacaatctttctctctgcaacctctgcctccagggttcaagcagttatcctgcttcagcctcctgggcagctgggattacaggcatgcatcaccaygcccagctaatttttgtatttttagtagagatgaggtttcgccatcttggccaggctggtgttgaactcctgacctcaggtgatccgcacgcctcagcctcccaaagtgctgggattacaggtgtgagccactgcgcctggcctcatttgtttcttaaacagatacgcatatatgcatataacggtataagattaggattggaaagatcaatagcaaacccttaatagtgattacctctgaggggaaggagggacataagattacaagtggtatcaaaagtgacttcagcttcctttgtaaggctctgtttgtaaaactttcatgttctatcatgtaattttttgggggtaaatgtatacgtagatgaaacgtggaggcagttaagccagttgttgatggtgggtgactgtaagtgatggaaaggtggttgaccccctttattttctgcgtacttttcagtattctgaacagtgacacaagtcttttttttttttttttgagatggtgttttgcttttgttgcctaggctggagtgcggtggcgtgatcttggctcactgcaacctccacctccagggttcaagtgattctcctgcctcagcctcccaagtagctgggataacaggtgcccaccaccaagcccagccaattttttgtatttttagtagagatggggtttcactatgttggccaagctggtctcgaactcccaacctcaagtgatccacccgcctcggcctcccaaagtgttgggatgacaggcgtgagccgccgtgcccggccacaagtcaagttttaaaaagtaagaggagccaggctgcttgcatcaggctctgctcaacaaacctggccagtaggtgcggccgtgtgtccgtgatagcacttaggggaatttgtgaagagctgtgactgcaatacactgctatgacctgttgcctgtggcactgtgaccacagaaaatgatgtctstaaccttactttgcagaatagaaaagaaacgcaccatcattcctacactggtggaagcaattaaggaacaagatggaagagaagtggactgggagtatttttatggcctgctttttacctcagagaacctaaaactagtgcacattgtctgccataagaaaaccacccacaagctcaactgtgacccragcagaatctacaaaccccagacaaggttgaagcggaagcagcctgtgcggaaacgccagtgacacgtacacaccacgtcctggtctttgtttgaggcctgacgtgggcatcattttaacaggtgccttttttgtttttttgtttttcgtttttttggtcactccagtagctcctggaaaaaaccttaaaaaatgtttcctccaaatctgatttcattacatttctgaattgttggggttttttttgttgttttgttttgttttgtagatggagtttcacttttgttgcccaggctggagtgtagtggcgcgatctcggctcagcctcccgagtagctgggattacaggcatgtgccaccacgcccggctaatgtttgtatttttagtagagacggggtttcaccatgttggtcaggctggtctcaaactcctgacctcaggtgatccgcccacctcagcctcccaaagtgctgggatgacaggtgtgagccactgcgcccagcctgaatcatttcttataccttctgacagcccaacttccagaggacagctctggggtactcgttggatgtctgtgagtacctggtcatacgggtcagtagggataagaattgtctctgggctgaggaattcttctgttctctggtttcaccagcgttgggtttgctcatgtaatgtggtcaccatactcaaatggtgtcatggctgaagttggccaccttgcttgagggacaagttgtttatgtatcagctctctgctgggtctccctttccatggcaaatgggcagctccatcctcttgactcttctaaatgcccaaaagaggtgtcatgctttgggggtacgatgtttatactccgtaaagaacatacaaggacattcactgctgatttttttttttgtttgtttgagacagggtctcactctgtcgctcaggctggagtgcagtgatgcaatcttggctcactgcaacctccgcctctcaggttcaagtggttctcctkcctcagcctcccaagtagctgggattacaggcacctaccaccagggccagctaatttttgtatgtttagtagaaacggggtttcaccatgttggccaggctgttctcgaactcctgacctcaggtgatctgcccgcctcggtctcccaaagtgctgggattacaggcatgagccactgcacctgacctgctgaattgtttataatggcaagaaataggaaaccccccaatgtctgttgaacagctatcacgttgaaccacgtgaaactgctgttttctaggccaaaaatggtgagcgatcatttatttcatgattcaacctgatacatttacatagtgcaaaactgtgtcacagtttcaggcttttatgaggaaagcgtttctgtgtagaaactggaagctgttcagggcatcggcagctgaaccctgctccgttggtcagcgttactatcatctcggatcatatggagctcatgtcagccgtgtgggtggcgggtgcacagagacggtctggaaggaaacacrcggatctgaacagcagtaatcctgggggatacgggggttgggctagattacagaggrctcattttctacgtcatgtattttatgatacttgaattttttgaaatgggcatttattttataacatgttaaaatgtactttttaaattaagtcattttgtaatatttgaatttttacatttgttgtacaatcaggaaaagcaataaagatttttcaaaaatagacatgtcaagaaagtttgcactcattgaggatgctgaaaataaggataaaaataaggagtctgtgatattttacaaattgacttcatttacaaattgagtcattttacaaattgacttcaattttacaaattgactacattttcttcacagagctaaagcaataccttagaattaacccagtcctgtgtggggaatttctagaagtcccatctatggtacggtgatgtttatctgctctgatcagggaaggacaaacagtgggagagtcagggcctgggaaccggggggcctggtccctcttctcagatccctcttgcagggtctgaagaactctctggagccagcagatcccacctgtgcagcaaggagcctggcccggacagctgtgaggcccttccagctccatcgctccagcctcaggagacgagctgctctgtttaacagccacagacgtgggcctttttcagagacacattcttttgttgtctgtctgttttttaagacagggtcttgttctgtcatccaggctggagtgcagtggtgtgatctcagctcaccgcagccttgaactcctgggtttaagtgattctcctgcctcagcctctgcagtaactgagaccccgggcatgtgccaccatgcctagctaatttatttttatgtttgtagagatggtctcactatgttgtccaggttggtctcaaactcctgggctcaggcgatccacccaccctggcctcctgaagtgctgggattacaggcgtgagcccctgcacccgscgcaagacacattcttgagggaagtccttccttctcagcggtccaggcatgctgtgccaccttgccctggacacacagggcggctatccctctaccacgtggctccacggtgctgccccactgcctacgactaggcctagaaggttttgtgtccctcaggctttctgcgccatcctgctgccgttgggccttgtccgtgcccctcctcacccttcctgacttgaggcttcatttctgcaggagttgagacaccggaaacccaggcttgttgagctgtgtgtgaagcgtgcaaggctctcctggctgtgacatggtgttttggttgtttttttcttgcttccgggcccttggctgggcaaggtgctggtgattgttacaaagagctatcacctatcaggagttatgtcacccagagtctcaggttagaaaaggtggctgaacctctgcaacaaagaaagagtgtgtggtctgtgcattctcacacaagagggagaaaagttctaggagctaagagtgtggaattctgtgatctgtggggctgagggtcacctgctgggaggtcctggcatcagtaagaagcttccaagggaagagcccagtaaaggcctgcagacggcctcaaccagctcagtgccaggctccatccagacggcaaagctgcagcaaacacgaccacaagacatggccctcctgcagctcaggaggaagcgctgtaggcagagccacagtcggcctgcgccagggggtgtgcgtgagcacaaatacactcttttgtatcttatcttttattccctcattcgcccccctttggtcagtccccctaggtctgtgcaggctacagtccacatgtagactaggaagtgtttctacctggcagtgcttgttagtgcaggttaaccactgtgagtgaataggggtggccccaggaacacacacactttccactctgcgtgctgcgtctcctctgcaggtgtatcatcattcgggacagtgcacctcactgaagtctgcttagaggatggcaaaattctcgtcaccaccaggataggtgctgtcatttaaaaaaaaaatttttttttaattttttgagacggagtctcgctctgtcacccaggctggagtgcagtggcgtgatcttggctcactacaagctccgcctcctgggttcacgccattctcctgcctcagcctcccgagtagctgggactacaggcacctgccaccacgcccggttaatttttttttttgtgtttttagtagagagggggtttcaccaggttagccaggatggtctcgatctcctgacctcatgatccgcccgcctcagcctcccaaagtgctggcattacaggcgtgagccaccgcgcccggccaggtgctgttattaatagttattcatgcagcaatctgaagttgtactttatttatttatttattttagaggcagagtctcgctctgttgcccaggctggagtgcaatggcgtgatcccagctcactgcaacctcggcttcctgggttcaagtgattcccctgccttagcctcccaggtagctgggattataggcgcccaccaccacgcccggctaatttttgtatttttagtggagacggggtttcactatgttggccaggctgttctcgaactcctgacctcaggtgatctgcctgcctcagcctctgaaagtgttgggattataggcgtgagccactgtgcccggcaaaagttgtaaattattttccctggctaccataaaatgactttataagccacatttccaaattatagtttgttgatcaataaatcacaaagttattcaaaacaggtgaaagtcacagctcatgagaaaaggatcacattagaagtggagaatgacaccttcagggagggcagtgtttgaatagtaaagagtggaaacacttcttacagggcacttcaactatattttgcttccaatttatctgttatagaaaatccttcctgtgcttcataggacattttcacagggttaattctagctgctcttgtaattaaaccagaaacatataaaagctcaaaaccagcaagactcacttgttccctcatgaaaaggcccagtcttcccacatcgcaggcaacttctccttgtccttggtcacccggggaccccagcttgctcctggttggtccactcagcttctatgtgcaggtggcggcaggaagaggccatggagagagcactcccaatggcttgtctccactgccctgggcgagaacacacggtgaggtgctccctgacgccgctggggctggggaatgcagttctcgtcaggcagctgcacacggacctctctatggcctggaggagagcatggccttcgctggatggctgaccgtctccaccacacaggataggaaagcccgacacttctgcagcaaagtgggagtggaagtacactcgagagaagggaagaggccctgtcccgggggcctcggtggttaacaggtctaaaagatggacccgtgccgggcgtagtggctcacgcctgtcatcccagcactgtgggaggccgaggcaggcggatcacctgaggccaggagttcgagaccagcctggccaacatggtgaaaccccgtctctactaaaaatacgaaaaattagccaggcatggtggtacatgcctgtaatcccagctacctgggaggctgagcctggagaatcgcttgaacccgggaggcagaggttgcagtgagccgagattgtgccactgcactccagcctgggcaacagagtgagactcagtctcagaaaaaaaaaaaaaaaagatggacccagccttatgagcatttgggagcatgagactgaggcaggatgtgtttcctctactcggctcccaggcattgagaaaggaatccggttttacgaacatacgactgctttcaaaatattttcaaaatatattttatttctttcttacatgtattttgcaaaatttccaaggtaaacattagctccacatacagaaataaaagagttctttaagaactagcattgaattcatcacaagaatcatcaaattatgataatggaaaacaaacttgcctatgaccaaagctactgagctgaagtgaagagctgtctttacaaagatccctctcattaagcccactgccctgcagctgactcaagccatcatcatgtatgtacgtgtataagaaaggacactggccgggcatggtggctcgcgcctgtaatcccagcactttgggaggctgaggcgggcgtatcacgaggtcaggagtttgagaccagcctggccaacatggagaaacccccgtgtctactaataatacaaaaactagctgggtgtggtggtgtatgcctgtaatcccagctactcaggaggctgaggcaggagaatcacttgaacccaggaggtggaggttgcagtgagccgagattgcgccattgcactccagcctgggcgacaagagagaaactctgtctccaaggaaaaaaaaaaaaaaaaaaaaagaaaggacattggcacagtacagcagctttgcaacctcaaagatggtttgagttttagttcccatgagtacatcctccacaggtattgggtgctttgcactattgacttagatgggtcagttctgaagtttgattaagacattctcttggagatacattttatataaatcttgtaatgtgctaaattgtcaaattgttaatggtactaaatactcaaggacattattttgtatggcccctacatttctgcatcatcgtcgtcgtcatcatcatcatctttggctctgaaatgcatttttctgaactctcgtctgctcattgaaggacaagatgaagacgcaggtgggaggtccttagtggagaagaaaacatgacttcagtcatgagcaatacatatctgcacccgcatttgcaatgtgccccacccagcggctctagggctcgcagagcgctcttcccttttagacgtgtgaaaatgcctgagtcccagcactcgcctctagatgagaacttcctccctactgggctgatcgagtaaagagaaggaaaggtgctgggttcaaaacaaaagaaattaacagcaagcgcggggtggatgttcaaaaaaaccacaaacctgatttcatggaaacacacctttcccgagagcagtgattctcagctcgggagatgcagggagagcccccaattagccaacggtttcattttctcctcgtgggttaaaatgattagtttatgtttaatgttgtgtcgaggcattatttacctgcactgagtggggagtgtgtgacctgaatgtgcagctgctgcctgagtacccacgggaggaggaaggcgccgctcttacctgcatgagctcaacgtttccaaagaaccggctcacgggcattggctgattgctgtcgtcatctagaaagacgctgttgtccatctgaagtggtggcttctgcacatcctctgtctgtagccctggctcattctgcttctgcacagtggagctgctgttggattcttctgctccggacccggcactgtgttttggcacggacaggccatctctagtctttgctaagcgagagtcactcacaactctgcagccaccgagaggaagacttgcagccccctgctgcacagaaacgccagcctcgctgcctggaagcaaggcactgccttcagcaaactcattttcacaaggggtctcaggtgtcacttttggcaaagaagcgctgtcattcttagggacaagcttctgtaattctgacttcacaagatgtcctttgtcacatttgaacttcttggacgttcgcctgtctgtggctttgtgggatgaggaagtctgtcaagaaaaaaaatgtaaggggaaccagacatatctagcaaataaaacaggcctcaatccagaggctagtatttcttctcacatcggaaatgataaagatgctgtgaccacaactttcacagatcgtcatttcactgttttgccaccaagggacaaaatacaagcgagactgaatctagacacaccccacaccactcctacactttcagttttccctagtggcgttacagctccacaccactcctacactttcagtttcccctagtggcgttacagctcctcaggtgaattctgaagcatatatttatatattatacaattacagtaaaagaatccagctttcattcatttctgctagggcataagctctgt

SEQ ID NO: 95520 - DNA, 18703 bp, Homo sapiens
  misc_feature (1)...(18703): n = A,T,C or G
ccagtcgcctgccgttgctcttggaatgagacctgggagccccacagcccctgcccaagggcgtccccagcgctcccccgcttctctggcctcctagttgtgcacaggcccggctctccccaccctgtgaccttcgcttctgtggctgcaggcccttctttgggtcccttgggtctcagcatagagccggcttccccccagggcttccctgaccttccttacaaaggaagcagggcagggagtgtgggtgggagggctgtgggcaggcacaggtgttttagggtcaccctgagcgctctgtggagaatggccagcagaggctaggtgaccaggcggggccagagggaggccgggtggggaraggtgatgggcagagagcggggcagcgggggtgtgctgtggggtgggggctgcggggcagagggaggaggaggggccgggaggaggggaaaggaagagggtgggggcagggaggaggcctcccactgttctctccctgggtttctgaggatggagaagcaggcggtgtagttgggcgtgactttctgcaagactttactttctgtgggtggggtatatcctccaggacctctgagggggcacaagcgagggtgagtccagacccaccctgtggggaacctgggtcacggaccttctctgggcctcagtttctttgtctgttaggtgggtgtcaccctggcctgtgggcagctggtggagtgctgaagccccctgtgccaggggcccgtggagggcccttcgtgctgtctgtgcgccacagcatcccactcctagaggcctctgggtctcctcgagatgccagtgggagctcctcctccctcctcctgctctgcccacggactcctcctcctgaggccccttcctggcgtccttggcctctgttctgggcacccgggaaccagtgactgggctgcagggcctgcgtgtggccctggctctgctcccggagctgccgcacgagaaggcgccaggcccaggttcctcggcagatgtgaggatgggggtgctccttgagcgggtgtggccagggcgcgcctcctccccgcgggtgggccaccctggcctgggcccgcggtccgcagcccgcctctctgtcgccacacaggtkcagaaagtcatgcccaacgacaccttctacttctccatcctgaggaaccccgtgttccagctggagtcctccttcatctactacaaaacctacgcccccgccttccggggcgycccgagcctggacgcgttcctggcctcgccgcggacgttctacaacgacagccgccacctcaggaacgtctacgccaagaacaacatgtggttcgacttcggcttcgaccccaacgcgcagtgcgaggagggctacgtgcgcgcgcgcatcgccgaggtggarcggcgcttccggctggtgctcatcgccgagcacctggacgagtccctggtgctgctgcggcgccggctgcgctgggcgctggacracrtggtggccttcaggctcaactcccgcagcgcgcgctccgtggcccgcctgtcgcccgagacccgggagcgcgcgcggagctggtgcgcgctggactggcgcctgtacgagcatttcaaccgcaccctctgggcgcagctgcgcgccgagctggggccgcggcggctgcgcggggaggtggagcggctgcgcgcccggaggcgcgaactcgcgagcctgtgcctgcaggacggcggcgcgctcaagaaccacacgcagatcagagacccgcgcctgcgcccctaccagtccggcaaggccgacatcctgggttacaacctccggccgggcctggacaaccagacgctgggcgtgtgccagaggcttgtgatgcctgagctccagtacatggcccgcctgtacgccctgcagttcccggagaagcccctcaagaacatcccgttcctgggggcgtagaggggccgggccggggacgaggcctcctgcggacaccagctcctctctccgccgtcaccggggaggccggggatccttgcagggcttctggggcgttgggaaacccaggcccgccggccacggctctaaaatgaagagggcggagaccccagtgaagagcaccccccgcaatccgcgcagatccctcccagagaaggccctgagcccaggcggcagccacccgccccccttccgaggctgtgtctctgtttagaactgaacacgagggtggggagtgggggatgctggaccacagggcagcacctgcccggcaggatgcgcgtgcctgtgagccccgggactccccagggtcctgggcactggggctgtggatcctcggaggaactcagagtggttcccctgaatttcccggccctggcgacgaggtgctggtcccagagacaggtgcaggcacaggcagtgccacaaagaccggcccgggagcggggcaggggccagggctcagccgctcccgaacagctccacagctttcgctgcaggaggtttggttctgatggaaggatgttttctacagagagatggcacaactgctcacaagaccagggttctagccggagcccaggtcgagctcagctccacgacccctgctggtcagcccctgatgcctcgtgaaggagaggagtctcacttgccaaaggaggctggagtggttgggggtacacacacccttggttgccttggagaccgtgttgggtgtggtgccagagggcagctgtgggtacccctctttgtcattcacagggagggacagagcctccctgcctggcaggacgtgatccctggctgccaggggctcagcgggtaaagggggtgcactcgccgggaccagccgatgcctggggcacccaggaaacgcagctactctgcagcatgctcagcctggaggctgagaccccagcagtggatctaggcctgcaggtctaggtgtgtccacgcttttttggggacgggaaaccagcatttcaaagaagggagagaaccggaaaccgcagcgtaggcagctccctcggaccccagtgtaatgggggagttgcaggaagagtgaattttcagtgagagtcggccgtgaagaatggcaggagctctgctgagtcagagtcagccagggacgtctgcaggccaccctccctccccctcaggcnnnnnnnnnnnnnnnnnnnntccgcaggccaccctccctcccccctcagcccagggacctcgccctccctccctccctcccccctcagcccaggaaaggcacaggagaggatcctgccaggtaaagggaaagtggcccgggaggagcccacgtgccaacaacaggagtcccagaagacagaaaagaccacagatgagaaagcagttcacgcagagaacaaaacrttcccggaccaaacccagggtcgggttgctcattcccgaggcccgatagcgagatgcagatgaactggggaagaagagggattttatttctgtaactggttacagggagaaggcctggaaatgatcgccagaccaactccagattacagtttttccagagcttacacaccttctaagctctgtgtctccgtgtcagtgtgcattcgtctaaagacgtacgtgattcaattcttctcatctctaactgaggtctggtcctgaagatcttcctctgaagactcagtaaatttacttgatctaaatgggcccaggtgtttacccttatcttgttttctgctaaatcatggaggtttggggagttccttctccacttgtttgtggaggcctggggagttttttcagacccccagtaaaacttgtttaatcctaaacgggtcctggtctcgtcatgcttcaaggcccaagaaagccctgggcaaaactcttgatgggcttttgttacgtcccagccctcgtgtgagggcgctggctctcagctttcaggatttcacttcaccctcagtcagtgctgaacagttgtcgcggaggcctgcgtgagtgaggcctggcgtgccctggaaacattcccctgagttgaagaaagactcacagttttcagcatccagttaccctctgagcatcaggcagaacccgccggccccaaaaccaggcccccttggcacatgtgggcccgagtgagtccagcatgaggaggtgccgcttctgagcagagctcaggttgtctctgggaggaggagcgagcgttgggtgcggtggccgctgcgttggcagccctgtccctgagcggaacgcaggtcgtctctgggaggaggagcgagggttggactcagtggccgctgcggtggcagccctgtccccaggcgtggactctgccctcagcttcacagtcaccgaagaaatgaagttacaggaggggcacaccgtccttttgtctctgcctttgaggttggcgggaactgaaactggtacggtctttttgaatagaaatttggggtctttctggcgacgtaaaactgtgtgtagtttgcagtagagagtgttgagaacagcctgtctgggctgtgcattgagaaggggcggttaaaatgctgccacgtcgtgcagcccataaaagggggacacagagtagccgaaactgctcttgggggagggggcacgtcccagccttccgtgtgatgctggggtcagcgtggcccctcggctgccagagctcacgaagacggttaaggaaagcttcccccgggtggctttcaccccacggggacagagccccagatgggcccagggacctctgagcagccgtgggccatggggtgacagttgggggttggtgggacccgtggctgtcatataccctgggtagacggtggcttgtccaggcagagatgcccaggggaagtgggtggcacctgagggcagatctgacttttcaagagaagctgaaaacacgggtttttctgtgaaatctctagattgaaaacagtgggcttgaaaagcctggagcagagggagtgaggcctgctccccaccccagctctgcgggcacaccctggccagacagccctgctccagacccggcctgtgtctcagggtggcccaggaggggactttgcaaggtgacgtggggcttggaggtcccgtttccctgtaagcctgggtacttaggggatggccctggtcagactccaccagtcccagacttgggggacacgagaagggagatgggccacccagttctggttgggctggggtggggcttctgaggggtggggaggttgtcccttcccacccacctgcccctgccccaggattctcggctgtgagcaggaggatgtgtacgatggccaagttgcctggactgggtccgcccctcctggggctgtgagtgcacaggacactgggcccacaggcacctctggggctctgtccccgtggggtgaaagccactggggggaagctttccttaaccgtcttcacgagctctggcggccgaggggccacggggggcattcagatgagtcagaaggagctggggcccacccctcctgcttcctcgccgcccccctcccagctgcccccagtaaatcccctcaggcccctaggacctggagggacgcggcaggtttatcatctcagcctggaaaccacgtgacctacctgtttcccaccacagcgccccaggtttcagaagcagctgaggatgcccttcgcaggggagggagggacagtgagaaaggagggtgttcagggcccagggatcccccacggaggctgccccatcagaacttaccggggacctgtggcctcctctgagattctggcctgggcagtggtcatttgagcattggttaccaaggctgcctctgaaatggcaggctgggggcaggccagcgtgaaagggactggcaggagtcctgcggggacaggctgggggcaggccagcgtgaatgggactggcaggagtcctgcagggcagctgtgctggggaggggtcaccctgggccctgagaggcacaggacattgcgatggggtgctggcctgccaggagcacagatacagagctagagcccagcgaggcctgtgctgygaggggctgtgctgtgccaggggaggccccgcacccgggaagcccagaggagagtgtgcactcacggagccctcctggcagggccgcgtctctggagcagcagacccgtgtccctctgggaggtcaactgcggcctcacagctgggcctgtcccagcacagcccttgttggagggcgcacccccgtstcctcagcaccccagtgttgagtgcmttgacctgcagasgggagcctgtgctggtcccgggcgtctgtgtggctcctgggtgcccatctgcacccctggccctgctctgggcttcagtggagccgtgccaccgtgggagtgtccagggtcctgacgtagccctgagacgtggccagctccctggcctgctgcccgcacagtgggcccttgtctctgctctgggtcaggcgaggcagccacccatgatgagctctgcagccttcccaaggtggctggtgagtccctgccctttgcacccccagcaccctcacccctctacccgggcgcccggggtcaggacccgctcctgaggtatctgtccagctggccgccccctctgtctgggggtgctggacgagtcccactccttgccaaccccagggtggctcctcagctctcaaacaaggggcgggctgcagggattccgagggcccctccagcargaggtcccacatgcatctcccaatgggacacttacctggcccacagggtgggtgtgacactgagggttcctgggggcagattcagggcatgggatggagacagactggttgtgaggggcccaatgcagggggccggccccagcccacagggtcgttctgcagatgggctggtcggggacgctctaccaggtgaagggtctrtggtcggagtcttcgccctggccagggcccaggacgctcayggtgcaggctgagggtcagagccgccgagggccccctgccgggattctgtgcaaagggcctctgcactttatgtgggtgcatgtgaatgcccctcgccaagatgttcctaccctgcacctgacacttcccacgacaagaagtgctgaccccagagggtgtgcgcggaccccagagggtgtgcgtggaccccagagggtgtgtgcggaccccagagggtgtgcgtggagggcctggtctgacctcaaggctcttggggcrcccacacaggatgggctgtgaggggttggcgggggtggggggggtggtctgtgatggccccctgctgagccagagtgacccctacaaccggtccaggggtccacggaccagaaggccaggttctcctggaggtcccatctcccctgggcctcggtttccccttctgtgactccacacccccaaggagggccctgtcagggagggcggggggcactggttaatgtccaggacatggctgtcccagtcaagccaaacccctggaatgtgctgaactggctacactgagcggggctggcctccgagacagaggggcctgccgaggacacggaggctctgtggaacccagggcctggccacactaactggggctggcctccgagacaggggaggtcctgaggacacggaggctctgtggaacccagggaactggtcacactgaggacacggaggctctgtggaacccagggaactggtcacactgaggacacggaggctctgtggaacccagggcctggccacactgagcacggctggtcccccaagacagagggacctcctgaggacacagagtctctgtggaacccagggcctggccacatggaggacacggaggctctgtggaacccagggcctggccgtggcaaggaagccccaagccaagtgtgtgtcagccttgtcctctctgtgggcctcagtttcccctctgtgcaacaaggggagtgaccagctggtttctggagtctcctcctctccctctctgtccccaggggtgggcctgggcctcatgtctgcagggggtgctgacacctgctcctgtggtccgggccttggggagggagccaagtgcagagagaatgtcttgcttgtgcctgctcagcccagagggacacatggcgtctgcacctgcttcccgcttgggcacaattgccctttgagagcagagccaggggcttcttggggacggaagctgctctcagaagccgcgcactggtggtgggggagcrgcaggaaggggccggccagctgtcctagccaagagcctttcaggaaccggtggcccagggcagaggtggctggaggtggagctgtctgtttgggcctcaggtgtcggggcaaggcctgcttgggttttacacgagtgttgcgcctttacccgggtctctgtcagtgggtcccgcctgacccgtgggtgtgcatgggtccccgtcgtaggcaggcgttctgccctggccaggcgtggtgtccggcatccggccatctccctcctccctccttcccttagccccgcatccaggtgcccygtgtgcccggcctgggcggctggccgtggatctgaccgctcctgcatggtggaggaccagcgttcccactgtctgcagctgtgccacctccctgtgccgggctgtgcgtgctcacgctcggctccgtctgcctttgtgcgatcagactgagagaccccccaggcaggtcccgcctgcaacaagcagaccccatgcgtgccccaaatgccccctcacccgggccctgccctggtgggtgttgcctgggagcaaactcccagaatggccgccgggccccactcggctttggagcttctgattcctgtgggcgcttctcaggtcagggccctgcaggtgggaagcaccaggcactggaatgagggcactgtggggccagctgcctgcaggcaggggtctgatcaccaagcacctgtcccctgcaggatccctggctgtggctcccccgatgacgttcaggaagtgggagccgatcccctgtccccagagagccccgtgactcccccgatgacgttcaggaagtgggagcggatcccctgtccccagagagccccgtgactcccccgatgacgttcaggaagtgggagcsgatcccctgtccccagagagccccatgactcccccgatgacgttcaggaagtgggagccgatcccctgtccccagagagccccgtggctcccacaggtccctgtgggctcacctctttgtgtctctgctgtggcttccacggtgctgtggcctctattctggggacactgagctcctccttgctcgaggttttgggtcctcattgtccacatgacctcctgctgggcgaattctgggatgaccctgtgtcctgggcacatggctggcagggtcccgggggctctctggccagcctcccstgcaccctggcaccaaccagcctggccgagggtcagctcccagagccgtgttgagaggggaaggggctgattccacagacatttggggtgsagtgggtgcgagggagggtgggggaggggctgctccagatctggggtgagggagtcagaaacagggctgaccccaaggtgggtacaggaagaggcccaggtgtgggcaggagctgtctgcacctcctgagcgcgttccccagtccagaccgggagcgagtgtggggctccctgggcctgtcttgctgacctgtggccctgtactgaccagcagagcatgggggtccctcgtaccccttcacggacagtgctcttcgagcgggagaggacgggcctgacctaccgcgtgccctcgctgctccccgtgccccccgggcccaccctgctggcctttgtggagcagcggctcagccctgacgactcccacgcccaccgcctggtgctgaggaggggcacgctggccgggggctccgtgcgggtgagtgagtggccgggggctctgtgtgggtgtagtggccggatctgctggggctgcacaccccgggatggggcgggggtggyggcggcaggcagatgcccgaggtagagatgagcaaaccaggctcagcgatcctgggtgccctgcggggggctgtgcccaggtccctggacgtcctggtcagcggaacttcctcctctgggcagtggggtgccctgcacgtgctggggacagcagccctggcggagcaccggtccatgaacccctgccctgtgcacgatgctggcacgggcaccgtcttcctcttcttcatcgcggtgctgggccacacgcctgaggccgtgcagatcgccacgggaaggaacgccgcgcgcctctgctgtgtggccagccgtgacgccggcctctcgtggggcagcgcccgggacctcaccgaggaggccatcggtggtgccgtgcagggtaggcgggcagggtgccggtctgggtccctttgattggccacggtccacatggaagggagattccagcgggaaattgccattctgccccacccctgtctccagccacaagggaaccaaccatccctttccccaggactgttctgcgcctcccgtcccaggcaaatccctctccccaggaccgtcctgagcctcccgtcccagacaaatccctctccccaggactgttctgcgcctcccgtcccaggcaaatccctctccccaggaccgtcctgagcctcccgtcccagacaaatccctctccccaggaccgtcctgagcctcccgtcccagacaaatccctctccccaggaccgtcctgcacctcccgtcccaggcaaatgggtattgatcacccccagtcacccagtgggcaggagcaggccctctatggctgacccgactctctctcatcccccccgctaatctctttatctgcagaggagaaggctggacgctgaggtgtctctcagctcccaaaccaacagccaccccgccccaccccttcctcttattctttactcccttctcaccctgcccagggcctggccaggcctcacccacaactttccctccaccccatcctctgtggccacctgaccccggcccgtgggagctacagcagggagtgcagcagacacatggccaacccagggaccccactgcagggcctcatgccccccgcctgccctcygctctctctgtgtgggcagcgctcaccagcctccctgggtgccgtccacctgggctcggctgctaagrgctgtgagaggcttgttcagcctgggaggactcagggcggctgggatgagtcgtgtggaagggcggtcagagtgcgatggtcctaacccgaggcaccagcccctccttccccgtccccctgtgccttcctccagccccccgacctcrgggacccagcagcccctcccacctctgccctcctccctgcagactgggccacattcgctgtgggtcccggccacggygtgcagctgccctcaggccgcctgctggtacccgcctacacctaccgcgtggaccgccgagagtgttttggcaagatctgccggaccagccctcactccttcgccttctacagcgatgaccacggccgcacctggcgctgtggaggcctcgtgcccaacctgcgctcaggcgagtgccagctggcggcggtggacggtgggcaggccggcagcttcctctactgcaatgcccggagcccactgggcagccgtgtgcaggcgctcagcactgacgagggcacctccttcctgcccgcagagcgcgtggcttccctgcccgagactgcctggggctgccagggcagcatcgtgggcttcccagcccccgcccccaacaggccacgggatgacagttggtcagtgggccccgggagtcccctccagcctccactcctcggtcctggagtccacgaacccccagaggaggctgctgtagacccccgtggaggccaggtgcctggtgggcccttcagccgtctgcagcctcggggggatggccccaggcagcctggccccaggcctggggtcagtggggatgtggggtcctggaccctggcactccccatgccctttgctgccccgccccagagccccacgtggctgctgtactcccacccagtggggcgcagggctcggctacacatgggtatccgcctgagccagtccccgctggacccgcgcagctggacagagccctgggtgatctacgagggccccagcggctactcygacctggcgtccatcgggccggcycctgaggggggcctggtttttgcctgcctgtacgagagcggggccaggacctcctatgatgagatttccttttgtacattctccctgcrtgaggtcctggagaacgtgcccgccagccccaarccgcccaaccttggggacaagcctcgggggtgctgctggccctcctgacaggccttctggccgtgcccatgccccttgggtgcctggggcagaggggtggaatacgttggggtgccccacratagctgtggggggggctcttagtgcargatcctgtggattagaaacaagttgctcctcagagctctcaagcagggactgctctttaggaaggggagcagcggctgggagtgagcagggcagggtgggggcagggtgggggcacgaagtgggccctgggtgacccccacagctcccttccgaggctgcagggccaggcgcgggaccgcaggtagcccagggtgttgtgggtggcagcacttgtttactggctgctttctggctcgaaataaaggaatcgtgcttgtgtcggggtagacgtttctttccttttcaggttccagccctggggaggggagctctgctgtagcccacttctctgacccccatcccaaaatcccactgccttagcaaagctctactcctaaatgtcctggggccagcagagggaaggcgggagggaggaagcggcctccgcccctggcctccggtgacagtgatttgcaagtggtctgccgtgctctctgaacttcctgctggaggagtaggaggtagggcctctccccgcagagttgaacgccaggagggggtcaccttccaggaccagtccagtgtcctgctcccctgaccccaccctggagggggcttgggctccactggggctgtttccccagcgaagttcctttttatttcttctccttttatagtcttcatttctgatgataaaagcaacatatgcttactgtagaaaatctggaaaacgagccgggcgcggcggctcacgcctgtaatcccagcactttgggaggccaaagcaggtggatcacctgaggtcaggaattcgagaccagccttgccaacatggtgaaatcccgtctctactaaaaatacaaaaattagctggatgtggtggtgggcacctgtaatcccagctactcgggaggctggggcaggagaatcactttaacctaggaggtggaggttgcagtgagccaagattgtgccactgccctccagcctgggtgacagagtgagactctgaaaaaaaaaaaaaagaaaatctggaaaatgtagaaaactataaagaagaaagagaagtgagcccccgggcccctgtccccacgggcccttccttctggcttcctttcaacggtcctgcccagcctgctgtcacgcccatggacgacggcgccagccggggggtgcacacgtgtgtcccacccatggatgatggcaccagctggggggtgcacacgtgtgtcacacccgtggacgatggcatcagccagggggtgcacacgtgtgccaccttcttcccggccctgaattgtgtgtgatgggctcctttgcacgtctctgggtctggtcaccccttgggctggcttcggtgaccactcccaagggtggggacccacggccagcccccagcagtgcggagcgtccaggtggtctctgagtcgccgagggtccccaggggagcagagatgacctccccttgcggcccccttttccccagcaactgccctgccaggacggctgctgcctgagaggggacaccactgggttccagacgggggcaggatgggggcctggatccggggcccctgacagccctgagttcccacaatcaccccgggcscctccccacctcaggcagcctcagcccctcataggaggggcccgttgcccgggccctggcagtgctggttttagggggtctgtgtcttagtcccttggggctgccaaaatgaaatacacagaccaggggccytggaaacaacagaaatgtatttatcacggttctggaggctataagtccaaggtcaaagtctgtgatcatgagggcaggctccgtgtctggtaagggcccagtttccggctagtggatggcggcctctggctgtgtcacacacggtgggagggagaggtctctcctgggtctcctgtatgggacactatcccattcatgagggctccaccctcccaggaggccccacctcctgaccttatcaccctggagttaatatttcaacatgggaatctggggtgcacgtgtagatcacgtgctgggtgccttgtgtcacgtgtgtgtcctgacttgtggcccgtgtgtaggtcacatgctgggtacattgtgtcatgcatgtgtcctggctcatggcccgtgtgtaggtcgtgtgctgggtgcatcctgtcatgcgtgtgtcctggctcgtggcccgtgtgtaggttgtgtgctgggtgcatcctgtcatgcgtgtgtcctgcctcgtggtgtgtgtgtaggttgtgttctgggtgcatcctctcatgcgtgtgtcctggctcgtggcccgtgtgtaggtcgcgtgctgggtgcatcctctcatgcgtgtgtcctggctcgtggcccgtgtgtaggtcatgtgctgggtgcatcctgtcatgcgtgtgtcctggctcgtggcccgtgtgtaggttgcgtgctgggtgcatcctgtcgtgtgtgtcctggctcgtggcccgtgtgtaggtcgtgtgctgggtgcatcctgtcatgcgtgtgtcctgcctcgtggtgtgtgtgtaggttgtgtgctgggtgcatcctctcatgcatgtgtcctggctcatggcccgtgtgtaggtcgtgtgctgggtgcatcctgtcatgcgtgtgtcctgcctcgtggtgtgtgtgtaggttgtgtgctgggtgcatcctctcatgcatgtgtcctggctcatggcccgtgtgtaggtcgtgtgctgggtgcatcctgtcatgcgtgtgtcctgcctcgtggtgtgtgtgtaggttgtgtgctgggtgcatcctctcatgcgtgtgtcctggctcgtggccygtgtgtaggtcgtgtgctgggtgcatcctgtcatgcrtgtgtcctgcctcgtggtgtgtgtgtaggttgtgtgctgggtgcatcctgtcatgcgtgtgtcctggctcgtggcccgtgtgtaggtcgtgtgctgggtgcatcctctcatgcgtgtgtcctggctcgtggcccgtgtgtaggtcgtgtgctgggtgcatcctgtcatgcgtgtgtcctggctcgtggctagcagggtcatcacagtccactcttctgccttcagatctgaagcaaaggagccacaggcctctctggggttctggaagccgtggagcccactgcagctctgcatggcccattcttcgtcattctcttctatactggggtgagcggcgtccccagcttcatgtccccctggaagctcagactttgctaccttatttgcaagtagggcctttgcagacgtgatggaggtaagaggaggtcatactggattgcagtgggtttagcccagtgacgtccgtccttgtgagtcacagacgcagggaggagccatgtgaaggtggaggcagaggctgcagtgatgccgccaccagccacgggggctgctcagagctggaagaggctgaaggaccctgcgctggagccttcagagagggtgcgggcctgtcacccttggcttcagacggcctccagagccgcgagaggacgcatttgcattgcttcagccgccagtcggtgagatttgttgcggcagcctgggaagcagcacaccttcctgcctttgccgtctgtccgtccgtccgtctgtccacatgggcctcagaccccgggggatcctggccgtcactgcccggccatgtgcagcctcggcctgtgtcagacagacttgggctcgaggtccccaggagctccggtcgccgtggtggagcctctcgatgtctcgggctgtctgcggctggagcaccctctgagctggggttgggtcaggtctgaagaaggggccggagctggccctgccaagggcccctcctagcagccgtggcctcctcaggtggggcccagggctccgaggccctgactcctccaggtctgggcagctgctcaggaccggggaaggctctgccaggtgtgatgccccaggctgggagagggtgtggcgggggggctgcctggctcagggcaggttgagcccttcctcctgccctcctgccactgccccagctgtggcaggctcaggacatctggtgtctgctggtgggggggtcgctgtgcctggggacagtccttcccccctgctgcactgggagttcctctggcatcctgggaggcctgtgcctcgagagagaccagccccctagattcctcccaccacgggcggctccccggcacccaaccggctcctgagcccctgccccacctccacattcccgacggctgctctcccagcctcttttccttccttccacccctgtatggtttcgatctgtgtcccctcccaaatcttatgtcgaattgtaattcccagtgttggaggtggggcctggtgggaggtgactggatcatggggtggactctcaggaagggtttactgctatcgcctcggtgctgtcctcatgacagcgagttcccccgagacctggctgtttaaaggtgtgcggcacctccccaccttgctgctgctttcgccatgtgacgcgcctgctcccccttctcttccaccaggattgtgggtttcctggggcctccccggaagccgagcagatgccagcaccacgcttcctgtaragcctgcagaaccggragccgattaaacttcttttccttaagaatcacccagcctccggtgttccttcacagtagggtgaggggggcgaacgcacaccctgagccttaggggcaactcctgctgctgtgcccaggctgggccgggcagtggctcaggaacgtggcggggaacacggtgccagtgctggggtcagggctctgtcgtggaggcaggatgtctctgtggttccttcctaaccctcatccttttacctcttgtcctggcttactgggctggcaaggacctccaggaagatgttaaacagccttgatgtctgataggccaaacaagggcccggaagccgtctgcatcctcactccggggcctgcaccatgacgtcatggcgaagggctgcgccgagggggccggctgagggtcttgaggtgagaaatcatcctggtcatctgggtgggtccagggtctcaccagggtccttatgggaggggacaaagggtgggagaggagggargaggccttggagctgggtttgaagatggaggaggggccacagctgaggagccggtggcctctggaagctggaaaagacgggaagcgaagcccggacagcctgcagaggaaccagccttgcggaccccttgatgttagcccggggaggccatgtcagacccccggcccccagaacttctggggatgcatttgtgtcgtttcaacctccaggtctgtgtgatttgctatgcagcctcgggaaacagctgtgtggccaccagggtcccaccctgctcccgccttctgggctccaggacgcaggtgtgggacccctcaccatccgcatggccctctgctgtgcactctccttctcgttcatgtctgtgctgcattctggttggttttccttggcttttttttttttctagttcacgaattctctctttgctgtgtttaatcagctgggagttactctcttgctccctctctccctcccccatcctttctctgtccttgtctctctgtctctgtgtctgtctctgtttctctttgtgtttgtgtctctctctgtctctgtgtctcgggctgtctctctttgtgtttgtgtctgtctctttccgtgactctgtctccctctgtgtctctgactctgtgtctctgtctctctgtgtctctgactctgtgtctgtctgtgtctctgactctgtgtctctgtctctctgtgtctctgactctgtgtctctgtctctctgactccgtgtctcttctctgtgtctctgagtctgtctctgtgtctctgtctctctttctctgtctctgagtctgtctctgtctctttgtgtctctgacgctttctgtccctgtctctctctgtgtctctgtctctgtgtctctgtctctgactctgtatctctgtctctctatgtctctgactccgtgtctctgtctctctctgtgtctgagtctgtctctgtgtctctgtctctctttctctgtgtctctgtctctgtgtctctgtctctctgtctctgactctgtgtctctgtctctctgtgtgtctgtctctgtgtgtctgtctctgtgtctctgtctctgtgtctctgtctccctgtgtctctgtctctctctttctctgtgtctctgtgtctctctgtctctgtatctctgtctctctgtctctgactctgtgtctctgtcgtgtctctgtgtctctctctg

SEQ ID NO: 95521 - DNA, 44167 bp, Homo sapiens
cctggctacaacatgtcctacagtctccaaactaatatctggcagctctgtgtgtatttagcaacttacagatttccctgtattgatttacacaagggtttatttttaaaattaaaaaaatagtaaaaaccctaacatttatttatcaaacatttatcagatacctactctacataaggctctgtgtcagctttgggaaaaatacaaaacataagatattgttcagatatttcgcatgagaagcaatgtgtgaatatcagtagttgcatatggttcaacctcagattgtaagcctagagtcagaagacctaaatggaagtaaatgaagctcctccatttactaaatacgttaccttgagcaagtgttttaacttctttcttttcaataaaaagagagattggcaagaatgactctaagatccttctttcaggatgttaagatctgacactcacaacaacccaataagctaggctgtattatttttcaactgctttttaggaaactaaggcttagagagcttaagtgactcaagaccaccagctaaaaaagtggccaagccagcattctagcctgagtttatccagttgctattcttgtatcatttccaaactgactcttcataaacagcaaatcaaagagggggcaaatccagggagaaaaagagatgctacagtgataactggaagcacactgaaggatttttgtgtggagatagctgcatatggacaagggttatgaaatcctttatcaatcattcttcactgggacaaagctaaggtgagcagaactcgactgtcatcattaaagctcacaaccacaggcactgaaaagtaaggaaaacactaagctggaactgaagtgctcttttgatacccacactcctccccaccacataattaacattgtcttctaataaaggagagcatatttttcccttttttgagtgtgtggctatgtgtcatcctggatattccggctactctagctgctgtggctagtgagatatcatgaattctttcacagttgctccaggaattcctacgaagactgtgctaaaaaaaaaaaataataatgtcagatggttcaagaggtggttctgctgctgacaaggccccagggggaagctttcaggattcagtggcatgaagttgttttattagcctcactgtgttaacagccctcctacagtcccagcccagtgagagcctatgtatgaaaccttaaatcctaaagggaccttccttataagggacatgtagcacagtccagtcacttgatagatgaggcaagtgacccagaaaaaagaggttattgcaattagttactgcacattagaatcacccagaaagcttttaaaatcctaattcccaagtaacaccccaaaagaattaaatcacaatgtttggggtgaaagccaggcaccaccattttttaaagacctcccactgatttcaatatgtagcattttgcaattaatgagctaatggtttgcctaaggtcatacatctggggacaagaacctaccatggttcaactccattgtttttagccaaaactggcccttgtcttaagacatcttgagaaatggtggaggaataaacagtcaagccctgccatgatgatgctatgccaggcactttcttagtttatcttttgcaaccactcttcaaggtagatacatcagctctagttcaccatgaagaacgtgcatgtgttttcatgtagcctgtggatccttgctaaatgcgaaggcaggctctctgagactgcctcagggggactgcagtggtgctcactttagttgtcgaacgtgcagtgacattcattcaacaagtgtttatggaaggtctacagtgtgccaggcattgtcctaggctatgtggataaaatgatgatgaatgaggtatataaggctctgtcctcccagagcttgttagctaatgaagaacccaaagtcataactcagcaagtccaaaattttaaggttaacactgcggtggaaacttgttttattcattttcactgagccttgtttcttcaagacttgtggcggcaaaaacacacataatgaagttgttagaatataaataagaaacataaatcaagactagggaatatataagtaagagtagagtcaagaacagaagaagaaaaatttatagtcatgcaagtcatgaggatccacttgggctgaacctcaaatttggcattaagtatcctggcagccatatcgaaaagggaaatgtggttagttacaaagttcttattgtcagaaagaaaaagaatacaagttccttagggaaggaaaggctttcctaatacttggctcttgaaggaatgtctcaggcagagcttcatacagcctctaacaatatttctactagtgactacaaaagtggattttataagacatagcttgtagcatcctgcagtaaaagtgagaacataaaactaaagtgcaatttaataaattcatttatgttaggagtaggtggtgagaggtaagttgatttgagccaaatacaggttcaggtgaacctatgactagaagctggaacaccagggaatggagggattttatatccttataacaatctacataaacataatttctctctactgagattttgataattcaaatggttatattttctatcttatgctgtagggataaaaggcaagtattctatgttgtgaataatgtaatgccttataccaggggtcagcaaacattttctgtaaagggctaggtagtaaatattttataccttgggggctagatggtctctgccacaactattcatctctgccactgcagcacaaaagcagccatagacaagatataaatgaatggacacgactgtgccccagtacaacttgtttcataaaagtaggtggcaggtcaacttcttacctacaggctacatagtgccaacccctagtataacctaaaaaataaatgcgattattggtattctttcattgaaattcaggaacaattggaaactttgcaagtcttggtcagtggtaactttggcttcatagtttaaatgctattgggtgatgacacatgatggaaagaacatggctcgtgtctgggttgcaaattcattaagttcgttgaaagaacatgcagatcccaaagcaatccaatacagctattcacacataaaagggggcctcagcagacatggtgctgggattgttgcagcacagaactaggctggctctaaagaaacccttacattccatgtggagaaggagaattaatgatgttcctcacctggaatggtcttgaaaagcaacatggattctcagttaagatctcatggttagtttcctaggaaagagggaagatgctggaccatttccagtaggctgatgcatgctattcacatctttgtcatctttccaagtgagaaatctattccaggctaccagacataggttctaacaatcttctaggcatgtagcatgtagtatagtcaaagacattataattaacctcaggggaaaacaataacattatttcatttttaaaaggcttagttatgagcagataacacatgtttatagtttgttatgacctgaattcttaaatttcccctcactggccaaaaatgaatctgagaatgttaattgtttaatgggaggtacttcaaagggttgagtctgggggctcatcagaagaggtaatcccaagtgacttggaatctgcaacaggtgggttaggacctcatccttagatattgctttaaccaatttatgggtaagccatagttctgagcagagtcacgtgctcacgcgccccacgtgtagtgacaacgggaatgtaggcttaaacataggtaacagcttcaaaagagtttgtaaaaacaaggctgtgaatatcaatataattgtgagacttttggggatttattgtaggtttgaacgtaacttgaaatacagtgatttgtagacagtcagtaattgcttcacttgctccatttggaattttgtaactattcacttctccagcagcataaggtggttaagaagacagtttctgttcgttgtaaaaaattactccaggcttaaggaggacaaytattgtgtctttatattcatatacccaggatttagcacagtgcctaatccataagggccacactaaaatgtttgcccagtgaataaatcctggataatatcatcctgtctgcaaagccagtattacagagtgattggttgccagtaggggagatagctccctttggttacacaaattgtggcagacattgaaccactccaaaagaaactaaagctatttatttggggattgaaacaaaaaagcctacacaacttgaaaaaagcataaagacactcagatggaaccatagtgtctcccagcagatatcaccagatgggggtgggggtaaataattgcagtcacatatgcagcaggtatatatatttttactaatggcttattcttaaacaggacttgaggccagagaaatttcaaggataaattgctttgggagaatgcctgatatcaatgtctcctgagacatagaagttttccaaaataacaaatcaccagatatattattttgttgcctcctcttccttcccctggcccctgccaatatgcttatttacaagagttaccttatcagttgtcttaggagaacacatttccttcaacagaagtcacagtatcatcttatggtcataattttacaatatccctgcctctactgagaagagatacatagcgaatggagatgtgctgagccaatgaggaattaatcctaggcagcactagtagatgtggccacagctctggccccaccccactctggtggtcaggccaaaaaagaagtcaggtaagaagtgtgaaaggaaattcaatcttgggacccccaaactcattaagccacagggaaaattcaagctgggaactgggtcacgcaaacatgcctcccccttttggttcctaaataagatggctacaagatgaaaagctacatgcctcccccatattttgcccacaagggaattcccagtgagctgctagatctttacactaaaggtgtttctattaaaatttcaccatggcaatataaattgatagtttatagatgcagtcacccctggcccaccagacacaaatgcatatctgattgttcccctggcccagttttgtctgttatcttatataaaatgcagattccctgcaattttcctctgcctcatttgtctgtgtcatcttatgttaaaaaaaaatgcagattcactgagccagacaaaggcatgaatgactatttttccctacccacctcttacatgaaaattgtgtacttctcaatatcctgccctttccyctttaaatttggagccttcaaaatcatctttggggaaaggcatagacctgtctcctaggtgtgcatccttaactttggcaaataaacctcctaaaataattgagacttgtcatttttctcgattgacagaagaaaagacagagccaagaggatggcagtgtacttggctacccccagagcctagctgaggctccagccctgggcacttcactggagcattcccttgccagcagaggaacctgcagcctaacctcatgctggggtaaccttaatgtgggcaatccgtcttactgtaatagacaaattgcctgctttcacttaatccacagatttacaagggacaaactttggccctaggaatatttattgaatatcatttcatccttgtgacttccacttctttctgattcccatatcaccagcccaagagaacttgagtatctgttcacagctttgctcctctttccccacattaaccacaaagcaacggaaatagaataaagagacaaatgggtaactctaagtaggttcatcacattcattacatgccctgtatccagagccaatataaatggtcttgattctgattgtgttgaggtataaaaacatgctgatttctgtggcaggtattaatgattattacttgtgtattcatttgctcactgctccattctggatgttcttggtctcagggcctaaggatcattttctcggatgcatcacggctcatcttccggctcagttcctccagtggtgtgcgggccaccctcagactgtacgcagagagctacgagagggatcccagcggccatgaccaggagccacaggtacagaaacagctgtgctcccagcagtgtgtctygcagctcctggcaaatttagagagctccatgggcctttagtggggctattttacctcctggaaaggtacatgataatttcagctggaggacaagctcagggcaactccaagcaagtttaattcgttcattacagtgtttgaaacagaaaaattgctctctcgcatctatttgtaatccgtttagaccagcatttcccaaacaactgtcctctcttgactgttgagtggtttgttaattggggtaaagaaaaagcaccttttatagacaaggaaatttagcgttagagtcaaactggtgaaactcccagagtcttgactacgcttatgtaacttttgaatctccagacatttggaccatgaccttgaggtgccaatacagatgggctttgtctctgagattgctacattgtccactctgagaggagaggatataggtggccttttaagttaaggaagcacattgacaaggctaagccagactgtttggcaaagtctcctcatgttttcaacaataaggctaattaagaactcagaaaaatcataaataacacaaccataagcctctccactcccacattcattaaagctccagccaacattaattaataccagaaatgactcactttaatgttgggtacttcaagctatacagctggctgctcctgtcttcttggtgtcttcaatctgggttttgaagcaaggtccttgataagatgattttttcagatgaaaacattggttctacctgccatacttcctttgtggaaaagtagagaaacagagaaatactcactgctactcattttagaggtgctcagaatttctagctataatttgccctgatggagtaagatacctggcaggcttttctttctttgtcagtagtttaggggtttttttgttttgttttgttttgttttgtttttttcatggtctgtttctttggagagtctcaaagaacttggcaataatgggtgctacagatccttacacctgaccctacagccagaagatctgtctggagtaaaatcatcctagatgggacaggagaggctggaggaggctgagagctattctcagggttaccaagagcatgagtgggcaaagcaggtggccagcatgaagcccttggctcttcctctcaggatcatagcctttccatgcaggggatgggacacactctgccaaaataattggttagtgcgtacatttctcccaagatagtaccaaatcatgcaagaatttggggcttaccctgtctttccaaataaaacactattctacatctcatgttggggagggagattaaagcaggggcctaaaagtccagagctacgtacgtgaggaatgatattcctggcctcaccaactctgactcactctgactccgggctattttttcctcaacattcttttccctatttgcacagggcaagtggctgtgatatttgcttatttttatttaccctccgcactggactgagaccaggccattagacaagtgtcacaacaatcctatacacacaagagtctctccctgaggcagtccacaaaagcagtgctttttttttttcttttcccaaggcttcctttgaagctgaaagtctccatcagcctactcttagaaggtcatgtgagtaaaggaaacataagtcatgctggttttggtccccatgactgcacatttctcatcctgttggtggaaagaatttgccactttgaagggttggcgaatcccttcactgacgttgctgttggaatttctgatttcccctcccttctcctcagaagcaagagttttcctagacctggctcgatgggcccccgagtatgtagcacatgatctagctaaaagttttacattaaaatagaactccttgttaaaataccatacatcattgactcaccaacttaagccctattgcataatacatttgagtcaggatataacatagagtaagattttaaaagaaatctaaccacctaggggaaagcaagaagattctctcagcaggccaacctgtcttaattactgctgaactctacctaagcctttaagtgggagcattttgagggctccttacagggttgctttccaggaccacctgcttctgccttctaaaaagcctttgattaactgttgaacagagataaaagtaagatgtactcctgaagctgctagtgttattcctgatcagggcctgactggaaagacctgcttgtgttgctttctcagctaccaaaagaaccccttccaccttctctaatctgcagagattccattgctgatcttgttccaattcaacaggtagtttttgatgttttacccactctaacccaatagccatctacacttaaattattttgcaagagaacagagagttcccttcaactggcttattaatatctggctattttactttggccatggatagtttcttttccagacattttgaacacatgtgaacagagcatgttttaagcatttacactgattgccttgcagacatactcataacaatcctagtgatgcaattaggaaaacttgtgatataatctatatgcatttagaccatactcacatgtagattttccatttgcatccttttgtagaacagtgattatgctatttaagttaatatyaatttcttatctacatcaaaaatattttttaaaaattatatccatatgtgcctacgaattggtggtaaggagaggatgggccggggagggccctgatgagatgggcaggttcttgccctgatcccactctgtgtccttggtaaatcaggaaggaaagcttccaaaggcttgttgctggaagactacctagttttttaaaatacaagtttattttaattttaccagcaatcagtaggccttcaatgagccctcaaaccagctggtaatcatttggaaaaaggaatgagccaaaagggtttaaaatcacaggtaaccagaaacagyacaattgtttccgttttctttcccatccaatttattagcagggctgctattattagcttctygttgaccttcttcccttgtccctttcagcctgtgggtggagtagttaaggaacaatagaagatccaaaaggaaaaggaaggagaagttttgttaagggctaggaaaatcacagactgataatcagcccgtggctaatcaacccttggctttagtactttcaaggcagaatacagtcacaccygatctcaccccagtccttgggaggggcctgattttcccccagtcttcctgaaaattgaggaatttaagtatttgtttgtttgtttgtttgtttgttttttgagaggaagtctcactctgtggcccaggttgaagtgcagtggcatgatctcagctcactgtaacctccacctcttggattcaagggattctcctgcctcarccccccgagtagcggggattacaggtgaccgccaccatccctggctgattttgtatttttagtaaggacagggttttaccatgttggccaggctggtctcaaactcctgacctcaagtgatccacccgcctcggcctcccaaagtgctgagattacaggtgtgaaccaccacatccggctttaagtatgtatttttgataaactgtacctagaaggctttaacaactaatacctaagaaccaggtccctcatatttattcacctgtcaaaccaaaggtcatctgtcattttgttctacctgttcttaataagactttgtaatccagaaataaagtatagagccattttgttttacataggaagaacatatgatttgtcatctaaaccagaatacagatgctcctagatttacaacagggttacaccccaataaacccatcataagttgaaaatgcattgaatacacctagactgcagaacatcacagcttagcttagcctaccttgaacaaactcagaacacttacattaacctatggttggggaagatcatctaacacaaccccattttataataaagtgttgaatatctcatgaaatgaatactgtactgaaagtgaaaaaatcggtgtatggggactcacagtatggtttctactgaatgtgtatctctttcacaccatcataaggttgaaaaatcattaagtcgatccagccaaagttggggatctgtacttttgtgagcgaaagataataattgtaattatgtttagattgtccccaataaaccaggagacatgattactstagctaccagcctgcatcctctcttagaaccgcatctctttggagatggctttctaagaaaactagcaatgaaacctggaaggaaagagggaacatacagaaatgagaagagtcagctcagaggttctcaacccaggcaggctgcacatcagaaccactcaggcagcttggtgaaagtacccatgctttggccccagtcctagagattctactttaattgttttgaggtgggacctgtagtttttaaaaaatttcccagatgatattaattagacaagtgcatctcaaactaattaccggccaatcaccttgggaatgtgttaaaatgtggattctgactcaggtatgaggagsgccagagattttgcatttctaacaagctcccaggcaatactgtgctgctggtccaggagccacccattgaatagcaaagagctaggtgaactgtgaagtgctagcagcaggaccttgaattctttaaaactgtagaatgagcagcacctgtttttaataccattccacacatcgatctctgtcttctagacttctatttctgttgcttattggattccacctgaatgtcttatagacatcaccaacttgacatgtgcaacactgatttcccgccagcctcctgtgcactcctccaaaacaaactccagcatgctgcttctttcattcttctccatctcagtaaatggcagttcctaaaacatgttagaccacctcatagctctgatagaatcctcccctccacctcatttagagaagagcccaaacccttaccatgatcttgaatgacatactggaaatggcccccttctccctctgacctcatttcctatctcttttcctgcttctttctccactccaaccgctgtttggtgaacatgacgagaatgctctgcctcgtgttagttacgatggctgttccctctgcctgaaatgcttttccttctgacatctgcatagcttgtctccttacttctcagtaagggtgtccctggccacctaatataaaatagccctcacatgcaggtacttcttacttccctaccctgctttgctttctccatggcatttatcctcatcatatatatatatatttattttattttattatctgtctccacccagtagaatggaagcaccaggaggctgggactttgtcagattatttccctgtatccccagtgcacctggtacatggtaaatgcccaacgcagttttgccaaattattgcaatattgaccattaattactttggaatctctcagcccaattatatcacacaggaagctgaaatattctgtactcaggatgaatgttggtgctatcatcaggtttcctcctatgactgaggtcttgaataaaataaatgccatttttaaggtccctacaacatgcaggctccattctaaatacatcctttatcttattcatcgttccagtggcctcatggcagaattatcctgctttgctyttgcaggaaaggagactgagtcaggaagcaattcagattcatggagtaggtaatttctggattggaggtttaaactaagtctttcttataacaaaatccacattgtccatgttaacgttgaaggcccagaagagaatttctttttatttgtgcttgagtccaaggctacctctggagcctcagtacagtgttattgagaggttttttcctcagatcaatcaattctgtgattccctgacaccaactgggtgcaacaattctattcaagtcagttctgacattatctggatttagcccagaccccacaagttaagggctcagtctcacaagattgctcctactaggaatgccagctgcaaatggggtgcacaggctacccacatttttgccttgccaactacaaatttagggttttctacaatcccccttcagatttaataattcactagaatgactcactgacctcagaaaagtgcttcgcttagcattactggtttattataaaggctagaacccagaaccagccaaatggaagaaatgcttagggccaggtgtggagaaggagtgtggagcttccatgccctctctgggtaagacagcctccagcaccttgatgtgttcaccagcctggaagctcttcaaaccctgttgctgaagtgttcttatggagttttcactaggtaattatggttgattaaatcattggcccttggcggttggrtttggtctccagccctgctcccctccctataggtcacggggtggggctgaacattcaaaccctctaaccacctgtttggttcctctggcagccagccctccacctgaaactatgttggggcccaccaagagtcacccactagcataaagtctgctgtggctgaaataataacaaagactcctatcattcaggaagttccaaaggttttaggagctctgtgccagaaattgaggacaaacaccacatgtatttgttattccacactgttaaaagaagtttagcctaaagctgcctccttacataatttaagtttggcctaaaggtttttccatacatagtgaactatgacctaactggatgtgtaaacagactgtaacctactcttgtgacaagtagctgagtctcagccaatcacagtggctgagtttcagccaattacaggcagccactttttcaaaatatgttcaaataaggcaaaaactgagctgtaaccaatccagctatctctggacctcacttctgctttctgtacttcacttttctttttctgttcataaatgttatctgacgtcgtggcagctccaagttgctctgaacctatctggttctgaaggctgcctgattcaagaatcgtcctttgctcagttaaactcttaagtttaatttgtttaaggtttttcctttaacaacagttgtaaaagtgaatagcgtcttaaaaacaaccagttttctgtactaattttgaattagcaatgaataggattcagaaacattatgaaaataataatgttctaaatacatattggatatcttttctagttcataagggatctagagtgagtagtcaaaaacttggagaataaagtagaaatggatataatacatatgatgtgaaagagaaacagaatggagttcagaagtgatgcaaatccacattcacttagccattcactttcatgacaagacaaagatttttgtatatgtatatgtgtgtacatgcatgtgtgtatgagagcaagatttggggatcatactaggtatatatgatttaaagagctaaaagttgtgcctcggtcctggttttgggtcaagtttggattacagtttatagccccccaaaccctgaaaaaaattatatttcctctccttactttcccatatgtagttaaaaatgaaaacaaattcaattttaaaaataaataaaagatgttgttatttaaaaagaaaacctgagcaaggatatattaatagccatatatatgagggaaaacatgaggaaatacctcattttatttttctcctcagaatttggtcggtattgctgcactttggaactatgggggagggcaaagtgttgaagagagagttgagaagagaaacacttggtgaagagttgggctctaaactctatgaccaagttaaggagctggctcattccacttagacgagaggcgtgacttggaggtcttcaggaatttaaggaataatgtgaggcgggaaagatgaccagctgttctccataactaatgaatatgtaatttgaggaaataaactcaagctgaactggaagggattcacgttgactgttagaacaatttctcaactgtcaagactcctgcccaattaggatggctagtttgtgcttttctaagtctctttgcctacatatattcaaataattttaaaacaggggcaagagtagaaagtattgagcaggataatgtctcaaagtatgtgtcagccttaaaattttagttctgtaattataattttttttttttttttaagaaacaagaaacaagttctggtcaggtgggttagatttccctctagtggtgttgaaaggaatttagtatggctgtgttttcataactggctcttggggcggaattaaacttggaaagatgcaaagatgtataggtttttttctatytctgcttagatgagtactttctggaaaggcagacaaaacgccagggcaaacagtccttctttttcttccttagatattgaaatctggactcatactctgccgttactacatattgttttccctggagctgagaacactccttgggagggttggtcatctgatggcatgtgaaaaactcccttggttgggaatctgggagattccctcagggcctagtgtctatcatrgaccagggctttttacagttttgatgacaataagcctttttcttggccaaacattgtgatcagatctcctttcaaggtactgagtatgcgaagccctgtgtatccacactccacatggtctaggacttgtgggaaactatggactgccaccgtgaaccactcatgttaatcccacagacagagcccatctcaaatctctctttgtggcaatatatacaaaagaggcccttaattccaaatcttgcaagaataccggcattgccagcttatcccgagaaccagtggtcttaagaacagaccactgaagagccaaaaggcatgccttgatcctggctttaggtcaagcttggattacagtttagaaagcctggaccctaaaaaaaattatatttctcctttctactttcctatatgttgtttaaaataaaaaacaaaattagctttaaaaataaatataaggaaacctaaaaatgttttgatttttttccttataatgctattctaatttctaaaatattaaatatcaacttcttaccaaaatatcttttgttttggtgccagttttaccatgtctaaagcacatgcttaaccagctattggttaacccagtgatgtttatatccacaaatcaccaagtcttgctggatcttgtttactcagcctgaaaaaggagcatgaatgaatttgcagcggtcacacaagtccagaggtcactggtcatcacttctcttgccagatggatgggtttgacaagctgtgtccagcacaatctgcctttcccagcagcctttttgttctagcccagatgcacagcacaaccacatttccgtgcctttcaggagaaagctacccrggtctcatgaactggtggtgattcaggttttctttgaagtggtgtccttccttggtgtacagtaaataatttgctttgcttatataataaacaagagtgtatcttaacaaatggggactgacagtgaacctggaggttgcctgtggccttcagaaggaagctctggactagtgtgtgcaattagccagcatctggaagcagcttttcctgggcttcccaacacggtcatgcttcattcacatggggaatacaggatctgagctgttaaggggagaatgtggctgtttttgctctcccgtctactcttggctgaatttaagtttgatgccctaatcccagaacgagaactcctgttcaagatgcaggtgagggagtttcccatcccttgtttttgactcccaggaacgctggcaggcctgacaaactccagggaggagcatctcaaagccagaatgcttaggccttgggcaggagggaaagctgttaaaggtttatacaattctggtatcgtgtttgtgtttttggttttacttttgagcatttttgttggtacaaatcatcacttgggacatactttggcaggttgggcctgtgtactataccatcatgatatgagatggaaggyagatgaggctgacagagtggcttgaaatgtagacttcattattattcaggtatggggaggccaacagatgatgagatgacggccattgaagagatagtttgttactcacagttcccaagaggaggggacacaacacgccacacagggccacgcagggaagcgccagcgtcggacaggaggcagcatgagcaaagggaaaatgtgggtgaagcctttttggagattctctgggaaaggtaaggtaaacatgatgagaaggtttaggattagcttgtttgaataatttcagcaggctctggggcatagggactgtccctaatttgctggtacctagccttggggtggttagggcagagaaatagtggcccaagtgtgagagccctgtgagggtctgagaaaggaagtgtttggtttgcatctgaaaggcaagctccagggtgtgttgtttgctgtctctaagaattagctaaccctgggaagaacaaaaccttccagagtcagccaggccccaagatgtcaaagcattagaataaaaacaccagcttaacagccagaggaaaagataaaaccactgtcactttctcaggtgggtaaaattgttagggagcaccccaacaagattttgtttttttcacataccatcaaagctggatggcctctgatacaaaggttgggctttgaaatcagcatttttttttttttttttttttgagacagagcctcgctctgtcactcaggctggagtgcagtggcgcaatctcagctcactgcaagctccgcctcctgggttcacgcccttctcctgcctcagcctcccaagtagctgggactacacgcacccgccaccacgcccggctaaatttttgtatttttagtagagatgggctttcaccatgttagtcaggatggtctcgatctcctgacctcgtgatccgcccacctcagcctcccaaagtgctgggattacaggcttgagccaccgtgcctggccgaaatcagttatttttgttttgagtcctagttctgccattttccagttttgtgatcttgggcaacttaatatcagtcaaattgagatagatatacttcttattttatattgttgtaatgattaaatcagataattcatatatgtaaagagttttgtacaatgcctgtgtaaatcaaagaaaatgaccaagatgagtctcaatcgttttagaggtttactttgccaggttaaaggtcatggcctgtgacacagcctcaggaggtcctgagaacatgtgcccaaggtggttgggttacacttggttttatacattttaggaagataaaagttacaggcaaagacacaagcaacacatgtaaagtatatattggcctggcccagaaaaacaggacatgtcaaagaaggggaggcttccaggtcataggtggattcaaagattttctgattggcaattggttgaaaaatytaagctttgtctgaagaggtaaagtcagtataaacaaatgcttgagttaagataaagaaagttgtggaagctgaggttcttgttatgtggatgaagcctctaagtagcaggcttcagagagaatagaaggtaaatgtctcttattagacctcaaaaggtgtcagactctccagagaagatctagcaagggaaggggattctctacagaaggccgatttcccccacaaaagatggctttgtagagccattccaaattacgtcaaagaaatatattttggggtaagatgctttgatttccttcagtgcctgttatctgtcatctgatgctatatcagggtcaggttggaatttggtatcttactgctacaaagagtctgttctgtcagtcctagaatctctaaatgtcaacagctaagctccagagaggaggatatattgaggcatatgctacgcccttttcctgttatggcctgaactagttttcgggatccttttggmcaatgattaggggcagggaggagatgtccattcagtcagtttggggcttagaattatatttttggtttatacctgacatgtgaataaatgttcaataaatgttgattgtcactaatgttattgtttttgcctttttttttttttttttttttttttagatggagtctcactctgtcaccaggctgragtgcagtggtgcaatctcagctcactgcaacctccacctcccaggttcaagcaattctcctgcctcagcttcctgagcagctgggactacaggcatgcgtcaccatgcctggctaatttttgtatttttagtagagaaggggtttcaccaccattatttttattaataatggtattgactcattttcttatcacatgaggataaaagattcccagattacttagcaatttgttttataatgcaattgacttgtccttttccctcccattaacatctcagagaccaaactggatctatgagaaatgtcccaagagaactgacagcttctaaaaacctaggtcttctctgagagctcccagggctctcatgacatggcattttagatgtaccatgctttgtcagaaggttcaaggatgaagtggagtttctctacttgtctctscattcatggaacaaattcactgccctcctggcttggagtaagaggtagtgagtaggggttgttcaatgatttcatttcatccaaataatgtgcaatctgttggttgttccaagctcttttaccagagagaaagggcttgaacactggagtgggtgtgtgatgaaaggcaggttcattgaagaaaggatgcctgaagtttctttgactagccaggaggcatgtgctctctggcttcaagggattaaacagaaaaactggtcccttggagcaggagtcaagttttttctgaataggcccagagagtaaatagtttaggctttgctagctgtattagtttgctagggctgatataacaaagtaccacaaactgggtggcttacaaagcaagaacttgtttcttattctggaggttagaagtctgagatgagtgtgttgacagagctggttccctctgagggctgtgagggaaggatctgttgatctgttccatgcctctctttttggctcatagatggctgtcttttccctgtatctcttcattatcatcttccttcttgtgtgtctctgggtccaaatttccccttttaataaggacaccagtcatattkgattagacctcaccctaatgatctcattttaacatgagtacctctgtaaaggccccgtcttaaaataatgtcacattctgaggtattggcaattaggacctcaacgtatgcacttatggaagacaaattcaacccataatattagtcgtatggtctgtgttacaacttctcaactgccactgttgcacaaaagccgccacaggtaatacataaatgaattagtgaagctatattccaataaaactataggcactgtaattgacttaagataattttaacatgtcacaaaatcttatttttttcccaaccattaaacataaaaaccatttttatggctgcaccaaaaccaggtggtggccagggtttggcytaaggcctataatttgttgatccttgccttataggtttctgaatatgacacgttatttacaatttctgattacattcagtacagcatgtatcaacatgagtttgggtaaaccatacacactataaatttcaaaattacatttgtatttgtgtatatttgtatacatagatgaattgtgaagttttagggaaaaaaatatcaaatctytctggaaatctccagcatgaggcttctgaggttgaactccatagcttttgattgcaaccaaacatgaaagggaaatgattatgtttgtattcatgaaatcaaattcctttttcaggtcttttgtttcttgtcagaagggttcttcatttttctttttaaagcaattgcttacacatgattttcagaagagcagcactatgtcagaagaaaagggaaaaacgttaagaaataaatgggatgaaaaaagaaaagtatgaatatgagccctggtgaattcttacaaagaaagggaagcaaacacgtgacattcagtagtgaccccaagccagggagtgctgtgacattgcatgtccctgtgaatggggcttccgggagctgataacaaggttctagtgcatttcagtcacattaacagtgatcctcaaacccagtctccaaggaacctcaccccatttccctaggaagtagcaattctgttgtttttattctttctttctttgcttttaattatattcttgggaattacagtcaggacagtcagtgtggtgtttaacaaaagctaagatactttgatgatatactgagatttcccagttatacattttagactgtctttgaccatgtaagtgtttctatattgttgaatcaagccgctggctctgactcatatcagcccatgtttttcagaatttgcagtcattatgaattcactttccttttaatggataagatttgataaaaagcttaaaagaaagtacttttacactgtttttaacagcgctttatacttttgctacactaaaggtagttcttggactagcagcatcaacatcacctggttgctacttagaaatgcagaatctcrggccccaacccagatctactgactcagattctgtattttaacaagctcctcaggtgattcatgtgcacattaaagtttgagaagtcctaatgctgggcgtggtggcattagcctataaagtkccatctactcaggaggctgaggtggggaggatcccttgtgcttaggagttgaagaccagcatgggcaacttaaggaggccctatctctaaaaaaagaaaactgatgctggctgtactggcttaaacctccaatcccagcactttgggaggctgagacgggtgaatcacctgaggtcaggagttcgagaccagcctggccaacatggtgaaaccccttctctactaaaaatataaaaattggctgggcatggtggcaggtgcctgtaatcccagctactcaggaggctgaggcaggagaatcgcttgaacctgggaggcggtggaggttgtggtgaaccaagattgcaccactgcactccagcttgtgtgacagagtgagactccatctcaaaaaaacaagcaaacaaacaacaacaacaacaaaactggagggaaaaaagggcaagaagtcctgtgatggatgacctttgggatccttatttccacctctgcttagcaggactgacattgtctccacaccagacaaaccctctaatgccaaactaaataggatgcatttataggggtgcctggcctctatttcttcctcatttaggaaaatcataaagcatgcagaaaataacccagacaaatgtgccaagatccttgaagacttgttcctgcttctcaggtcaattaacaaaaaaagaaacaagaaaatcagtttcaagttgcatctccatagaaaccctttctcaatatcaactcagcagtgttagacagttttcttcacacaattatactagttgagctgagagattcaaaataacagtggatgargtaaagaaagttctaatttgattttgccaaggcacaaagccttgctaaaattgtgggtagacagtctagcacacttcaattactaggaaaaggtcaattatttaaaacactttaaatatgttaggttaaatggcagctgagtctaaaggcaaaggccataaaagaacatgttcctttgtccaaactgcattcataaagtgtgcattaaccatccattaatttcactaatagtctttctattgtggggaagagtctctcctcgtttacagggctcatttccatgtttttagtgcctggtgttaatgactgtcccactactgcctcctccgtaagactcaggtggccctcacrgcagaagttctcttctagtttgcttctgctactcaactctgccactcagctttgctcaatgtggaagtccttgctaacttctttagaatctgatacacccttaaggaatgtgttccaaaagctatgatgtctgttccttctgttgtcaacatcaccttacgcaactgcaatctgattgtactctctctggctggatatatagggcctgttgcacacaaacagaaatgcaggcaagctttcccccactgggtgtgtcactgaccctcttgctgacacagagagatgttgcctctgatttgagtggctttctcactccaagagctgggaacaccccaacattcttaatctctttttattttatcttttatcaaaaagataacatgaactttattttatgggcaaataaacttaagctagaagggttgttgactatctaccaaaggtcagcttattgggactggtatgctggtccactcacctgtagcctacttttctattaatagcaagtcaggcttctgtcttcaatgatgatgataatggtaataataataataacaatagtatcaagtgcttgccccgtatgggggctaggcagaatgctatgtgttttgtgtgtgttatatctcattctcaccacaatccaatgctataggtagtcatgctatccatccatgttktacaaataagaaaactttggccctgagaatttgaacaatctactgtttctaaacagtgtccctggtatttgaacctagatttgggcctcagagcccaagaccttaactaagktccttatyatgtgccatcaaaaaatatgggggtgctcacccacctataaaaagtaaattggagtagaccagcattcccatcttcaatctggcatagttaacacacctcaatccatcctctaggaatgttctagaggcagtcctcaagccccacaattccagactagtagaaggtgtggtctctctttcagtcctcctattcccttttatgtcctcagatcctttcccaagggctagccctttcttagaaggctgtaccctctggaagctggagaatgccactgtgctgcttgtaactggttacctcaagtaggctgtggggtggcagttaggcgaagtacagagagactgtgaactcttctcccggagaagcagcatcaccacctggggtgaacctcaccatgggtgggcctgagaggaggtagtggggtgggcctccaccatctggccactgaggtccctgcctgggccttggcagtccctcaacatgggagggggaagagcacacactctcaggactccactcagccaggagttctccttgccaaagtgggcctggggtctcagcctctttgctttgtgacgtccaccacacagctgctttgccagctctagtgtgctcctaggagggctgggttgagtggagacagttcctggatttcatgtttatatagttctgtttttttgttttgttttgttttttgttttttgttttgagacagagtttcgctcttgttgcccaggctggagtgcaatggcgcggtctcggctcactgcaacctccgcctcctgggttcaaacaattctcctgcctcagcttcctgagaagccgggactacaggcatgcaccaccacgcccggctaattttttgtctttttttttttttttaaatagagacggggtttctccatattggtcagactggcctcaaattcccgacttcaggtgatctgcccgcctcggcctaccaaaatgctgggattacaggcctgagccactgcgcctagcctagttctgtgttgtagtcatgagcagttgagtccatgctgagagtttgcatctcagggcataggcataataggggacggggaggactgcagtacctttactccccaaatggttgctgggctcttacgcaaatctgccagccctccgcagtagtcttcaaggccctcataatacaaaaatctctatttcagaaaaagagaaaatttaaattagaatgccccagattcctggatatgtaactatccaggtaaaatttatacttattaatattaaaattatttcactgcctctagtgtactattgcttgttcagtggtagcaaattcagtcacccaccaacacaggcagtaagtcctagattggggccaatttaagacaatagagcatggtgggcactctggtgatgctcagctgtctttaattattgcattgttaatatgtgagctcaaggttgccaggttttctgattttaaaaggagcaagatatctggactttcaaatgaaatttgatttttaaatattggcaggaaaatgattacaaaacaacacaaatcccatatgaaggacttctaacttttagtagtggtggactaggtgattcaaactaaccttccctctgtaaagagctgaaagaaatatattaaagcatcttattaaaagcatggttgaccaatgacctaataaaacagtaacaagaacaggaaaagggttggcactcaggaaaatgagccaaagctctttctgtcctagggaatttgtccatctaggagaggtactaaagaagaggtgcttttgatgactggcacagggtaaaggtgacmggcatcaggtccaggtggaggaggatctggtctattacagtctgcctctgctaaccaggagactaaccaaagaggcagcaaagaggcagacctgtgtggcattttcgtgtggccaaaagaaatatggttagttaagtacacatcaaaggcagagatcctggcttaacaatccctgctctagggtgtaaacttgaagaagaccattccaaaggtggtatacagactgtactccagaggattataaatccatggctctgatcttctggctccctgaggagtctcatgaaaggaaatgaaggaaactaacaatattctaggtctccagttatttctataagcaatttttcaaacaaaatgggcaccaaacaataaaagattataaagcacttggatacacaaagcaacacataccagaatcaacagaaacaacataccacagaaaaagatctatagatactggaatttattcaatacacactgtaaaatagttattttcactatgttyatggaaataaagcactgaatgtaaaaacatcagcaaataactgaaaactataaaaatacaccaagatgttgaaattaaagagctgagaaagataaccaaaattaagaacataaatggatttaacagcagctgaagaatatcagtgaacttaaaatatttcagaagaaactatgcatctgatttttcagtttagtccttatgatttgcagaacaaagaatataagattgctgcctttggaagatgaaagatcatattcggaaaaatacagaatagagggtaagagacacaaaggatacagtgagaagtgctaacataatttagttggagtctcaaaagaggagacagaaacttgggtataggcaacactggaaaaaatgataggtgaagatttcccagaaccaatgaaggaggtcagcccactgattctagaaagccaagcaggatatataaaaataaattcacatctagacacatcaggctaaaattgcagaaaatcaaaggcaaagaatagtttgattgacaactaatttttctttatcaacactaaaaataaggagactgatggcttagaactcttaatctagtgaaactttccttctaaaatgaaagcgaaataaacacatcttcagataaacaaaagctgagagagtatctacacaaaaagaaattctcaaggatattcttcaggaagaaggaaaattatcccagatagatatttggaataaaatgcagcaaggaataaaagaaatgttaaaaataggagttggtataaatgaacattggctgtataaaatattaataattgctgaaatatgtatattaattaatatggagaattaaattatacaaccacagtaactaaacaccatgagcataattgtagttaaggtaagatccttgaatatattggaagaaaataaaggtatagataaatactagactttgataggtcaaggattcatgttgtagtttctaggtaacgattaaaaaaaatagaaggaaattacataacttcttaagagaggaaaacataggaactttaaaaaattgagaaagaaaaacagctaggtcaatttcatccatgtatacatatgtaactaacctgcacaatgtgcacatgtaccctaaaacttaaagtataataaaaaaaaattaaaaaaaaaaagaaaaacagctaggtcaagtaaaaagcacataaggtggtggatttaaacttgaatttactggttattactttaaatataagtgaactaactgctgtaggaaaaagacaatgtaatggtgattcatacctgtaatcccagcactttcagaggccaaggtggtaggattgcttaagcctgggagtttgagaccagcctgggcaacataaggagaccttgtctttacaataaataaataaataaataaataaataaataaataaataaaattagccaggtgtgatggtgtgcacttgtagtcctagctaattgggaggctgaggtgagaggattgctcaagcctgggaaattgatgatgcagtcagccatgatcataccactgcgctccagcttgagtgacagagtgagaccctgtctcaaaaaaaaaaaaaaagacaactataagctcgttataaaaaatacatcttttatacataaaaatacagaaaatttgaaagttaaaagacggaaaaagatatacaaatgataacctaaaactagctctattatttcagataaaatagactttaaggtcaaaagcattgctaaagataaagagagactcttcaaactgataaaagagttaaatcccccaggaagacacagtagttttaaatttataaagaaaaaaaaaagagggagagagagatgaaaatgtaagaagaaaataaatccacarttgcccttgagtattttagcacccctctcagtaattattagaataagtatacaattagtaaagaacatagaatatttaaacaacttagttaacacacctgacttaataggcacatatagatattacaccacgcaacatcaactcaacgtgtaaattcttttcatgccacaggggacacgtataaaaattacctatatgctgaggaatgaaagaatacagagtattataagggcaactgaattcgaaaatgaaaacaaaattgacacaaaaaaagcttttgataaaatgtatcatctcttcatgataaaaattctgtgaataggaatcaaagggaagtcctttaatatcataaaacggtattgctaaagaaaaaacctggacgtaggctatatgtgctgacagtatgctaacaagggagaacgacttgatgggttcatttagaactcaaataggctttgtcttcagaaggacaagcatcagttttacatataattagagtatgttaaattgtttgcatttccctgtgattgttatatttaataatccttaaaaaggtaattttcaaatagtgtgcctagaaacagggaaacttttggcattaagacaaatatatttataaactttcagaaaatgaaaacttttccctcagtataagggcagtctagatagtgagatacagcctagctttgaggttaaaaatcacagtactgagtaggttcagagctcagctttgccacttgattgccatgtgactgcacaagttatgtaatgagtccaagcctcagtttcctcatctgtaaaatgagaataataccacctacctcatagactgtttagagattaattcaatacatgaatttggaatagcacttggcacattttgggtactcagtgccagctattacaaaattactaaagaatcaaaacttagaatccaaggcacaaagtatataaaatggcagtgaggactgagaacactgatcgtggcttccgaagtcttttggagaagaaagggaggaaaaggaggaaaatggagaatggagagagtcctttgagtaacaaactggagaggcaaaggtccttttgtttttttaacctcggtttcaatcttgaagttttatttctgctaaccatttggtaaaggcagaggagatcctaatttccctttgacctagcaagtgtattccatgtgaaagaaacctggaagcctagtgtggatatacccaatgaagagaaatgtgaagacatgtgagggacatttgggagggatggggatctgaaccaattagtaattccccatccttttacaatgttttggtggcagaaggtgaggggagaggtggatagaaagaaagaagagaggaacagggaaaccatggccagggaaacagtcctaacaatttaaactgacaactcttgcaggtaggtttgtagtattcagcagcacagtgaaagggctcagagattgtgcctaaagcctctcagctgctcctacagacagcggccagtgctcttgctctctccccttctccatccacacagggcatggagccaattagagctcacatttgaataagaatatcgggcctggcacagtggctcacacctgtaatcccagcactttgggaggccaagacaggtggatcacctgaggtctggagttcaaggccggcctggcccacatggagaaatcctgtctttactaaaaatacaaaaattaggtgggtgtggtggtgtgcacctgtaatcccagctactcaggaggctggggcagtagaattgcttgaacccaagaggcaaaagttgcagtgagccatctgagccttttatatcaggggctcacatgaacaagtctcttgtaaaaagaagctctctctgatgaaactgagaacagatagcagactcacgcaagctccggatggtggggyagtgtgttaaggaaacaatggggatgagaatgaggaagtagatggggagaaatagaatcagagggtttggcaactgcttggatgtacaggaaagggagaaggacccaccaacaagtacttccagctgagcagattgagagttcagagggacctgctcctagcaggaaagagaaggtggaaccatggactggcrtagcgaggaagttaattttggtttgcaagatgttacatttcatattttgggtttgttggtggtagaatactggaccatgatggtacctccaaacaatctaagagaaacacattttgagtgtttatcttattaattgtgattttattttaatttgcttaaaatttttgattttaatacgcaaagagaccaaagttagctcaagaaagtcaagagtagggtctgtcacatgtccaaatctcagagactagacctggagtatggttaccacctcaggccttcctattgggaggtaatggatctttagagataattgggagtcatgccattgttttctctctaccaactcctttattatttccttctgctctctttaattcttctcctggtttcaccctgctttcttataattttttgtcacctttctcagagtctctgctttctcataatccaggattaccatggagtcttatgccctcatggttaattaattataacctcgtgatttagttcccactactaactgtccgttctttcattacttacagttcaaatccccgaggcaaataatctgctaggctaggtgaagtttttgccccaggctctattgtaggttgctagccagcctctctattggctgcctgtaggtcagacagccacttctggtccaatcagctgcagccagggagtgggatcatgtgatgcaaacaatgcagcctgggtttgggctggagcaaagcatttgacaggcacaataattagagtaccttagagcagtggtcctcagagtgtggctcctggaccaacagcatcctgggaagctgttggaaatgtcagttcttgggccccaacccagaccccttgaatcagacactcaggatgaggggtgctgcagtctccactttaacagacccaccaggggatactggtgcatgttcaagttcaagaaccactcccttagactatgcaaaagcatattgactaaaaatgaatgtttgcatgaaatctggagagaaagcctggcattcaggtttagcaggttttaaacaaagtgggagtgttgttagttgatcctagggatcaggagaaagtagcatttgttataaatctctattttatggatgccagaatgtcagtgttttctgttgttggatgacctacctgcatttctggtttgtattgcctgccccgaaagatgaactatggtaattatcgtcatccacacctattcactctccacccatggctccaatccttccccgactgtacaaatgcacattcctcatagagaccagcccagcactaggttccctccacagattctgacaaatcttgcttgataagtgattatgattctggttagggtattgttttcctccraaaaatcagttaactatttactttgagtcttgtgacattcagatcatttacatccttcctgtctattgcttgtcccagagtaagaagttcagtttgttagggttgttttttttttaatggatctaatttacatgaaagtggattataacaatgacataaagcaaaagagaagatgggagagaaagtaaaaagagaaactctgtctttccagggagtatggacaagttaaaacytaatctaggatttatgtgggctaggattaatgtgaggttaactgggtgcaaaatttaagtgggtgtggatgccaaaatactcagtaatcaagataaatatcgtagtgcaatttttaaaaaatcaaaatcaatgtccaaaaaattcatgataaacatagtgtcaaaactttaaatagagagaggatccaataccccctgtagcctgtctacattaatggacagcaaacatccagaaaaccctgcaaggtggcagaagatgccatcttgaaaggatgcaaggcctgcttggtttggagcaagataagcgttcactgcttcctactgttgactgtagaagaaatatgttaggcactctaaaaaacactggaattagaaaaaacaatgctatactctaacataattgattaaagtctccattaatttatttcctttattcacaaagggttattttggagtttccaggacattcacataacccacataactgagaacacctcttctcccactgtctgcctggttttggtcagggaggaagactggtcagtcctacccaactcctcatctgatgtgggactcatctggtccaatagggttgcaatcccatgatttccctgctcctccccattcagtgcattttgtctttctctctttatccttgtcactctcagatcttatatgcagaactgtatgatggaaaatgcagtagaggagcccactgtatgttcttatcccagctcagccaccaaacagatgtgtgaccgtgggtcaatcctgtgtcgcactgggctttagtgtcttcatctgtgccatgaagaaatcaaatgacaccaatccacattcctctctgcttttgaaattctgtgcttccagctccatgttagaaaactcacatccacagttcataacccctctttttgctcctcattccaactgcctctccaattgccccaggaaaattaactcccacccaccatgaggcatggtcgatgacatgagagaagagtttggggtttacgtgtatcagaggagtgatttctaaagaaaaacatgagtaaaaacccggcactgttgaccctcccacatgcacacaatgtcctccaggaatgcccacaggagtctctatttgccttatcatcttttcatcaaatatatcattcatttactccacaaagatgtattgagtatctcctaagcagtagatactttccttagccctgaataagacaaagtttctgccctcatcatgtggccactcattctagcacatatatactgtcatgcacggcgtagtgatatctctgtcaacaacagaccacatattccatggtggccccataggattggaatggagcatgtatagaaacctgctacatggcacttgatattgatgttgcgaatcaactaggggaaatgattgatatttagtgatggtgctgggacatttggtttcccatatgaaaaacaatatataaataaaaagatatataccatctaggtttgtgtaagtacactctataatgtttgcacaaggatgaaattgcctaacgatgcatttctcagaatgtatccccatcattaagtgatacatgactgtttaatttatacactcagggaagaaaaaatatattagtttattagccttaaaaatgggagcttgccgggcgtggtggctcacgcctattatcccagcactttgggaggccgaggcgggcaaatcacgaggtcaggagatcaagaccgtcctggctaacactgtgaaacctcatctctactaaaaatacaaaaaattatccgagcatggtggcaggcacctgtagtcccagctactcaggaggctgagacaggagaatggcgtgaacccgggaggcggagcttgcagtgagccaagatcgcgccactgcactccagcctgggcgacagagtgagactccttctcaaaaaaaaaaaagaaagaaagaaaaaaaaggagcttaacttgaagtttcctttccagaaagctggcaaaaaattcaatcttgggtatttttagggacttcttcccaggccttcctggggtcatacaaaatctaaagaagttctgtggttcctggaaaatggctgaaaagactgaacatcagtgaggtggtcttcttcccaaacactcatatttccyggaaggcagatgactccatggcatctgtgccggattagcccaggctcttggctcaggatgggagtcctcatatttaggagtttcctcatgtggcattttcttcccttcagcttgcataagcaccacggaagccctcttctctgacatgaacagaagaagggacaagtgcttggttgatgaatccagaaacagagttaagtaggtccactatacacatagatatcctattacatttgtatcataaaacatataaatgtacatgcatttgccagtattttgattttggcccaagacctgttcttyaatatgagcatactgtttgccattgtgatcctctttcttcaaaagattcccactcataattcatcatctataatatctgtytttgattcctttatattacagcgggaacttaaggacaattgtgaagcaacctgaaaaaataattcttctataattttaaaatttctccctaatattttgtagtatctcacccacatctaatttgacaggattagctaatcaccattatctgttctttccaaaacactcaacttaattttcatagaaaaaaagtcttcttatttgcattcacgtttcattggtttacatataattaaattgcatagtctcaataattagtacaataggcattaacatattgggaacaaacttaactgactcctgataaacacagaactcaactgctgaagggagaagtaggtgagcatattagaaagtgatcttttggtcacggacatctagtgagctacggacgtgagtcaggatgttttactgaagaagtggaaagcacgcgttagtttgtagagttaagtggagatcagaaaagagaacttctctggtgtttacagtatttgttaaaacttgcttccccgcccttttgccaataggtaccaccacttaaagatgtggagtcaaaaaatcttgaaatttacaatgatgtaaaactgaatatgttttaatcctttagttccgtaaggttcaaattcattttcattgcattttcttaaaataataggatagtatatgtttatctttattcaccctctaaaacctcagctaaagtgattgagtttaacttcactctctttttctgtctgagtttaacttctttgataggtgttaatgaagaattacataaccaaaaagggggagcaggaaagagggaagagaagacaggaagaggagcaaaaactaataattgaatttctgtacaaaatgggcactttgctcctaaagaatagagatccctctatcttggcatcacatgggatatgtcctggcaaaatgtgccagtgtaaaatgtttctgggcaccaacagggttattaagaggaaaagaatcccttctgtttttacgaatcaagatgatcaacacggaaccggaggaaagtgccactttcttgtgttctagattttcatttttcttccagcttccaggagtctatgtgagcttgtccatctagccatcttcatagagtaagataatttaatacatgtaaccataaattgctgccagatcaatatttccaaagcacagctgtgatgtcacctttcagcccaaaacacttcaatgcctccccttgcctaatgaattaaaaccttacacctcactctagcatttaggtccctcccaacaagactggctcacatctctcaggattcttctgtatctacatgccactcaggacacaatggattgcttgtgatgtcttgtaccttgtgcatttccttgtgttcctgttgtgtggattggaatgtgtgcactccctttatgcatgggaataggttagggcccacaaggaactgaattcctctccccctcccaaaatgcaagccttcttttcctgaattacagaatttttgtttcttccattatcctaatattacccaaacttcttttctatcagtatctctatattaataggtgtctttattttttattttatttttattttttctttttagagacaggcagggtctcactttgtcacccaggttggaatgcagttatgcaatcatagttcactgtaaccttgaacttctgggctcaagccatcctcccatctcagcctaccgagtagctaggactataggcacacaccactgcactcagctaattcttattttttgtagagatgcggtctatgttgttcaggctggtattaaactcctggctcaagtgatcctctgcctcagccttccaaaatattgggattacaggcatgwgccaccacgcgtggccaatatttgtctttaaattgactcactttgtttttacctcaatctacttatttattataaaagtactctacatggaaaaaacaataccacttgataaatataagcacatcatgaacatgaattcaataaaaacattcagtgacattacattctagctgggtaactcctgaggcatgcactatcttggttaaattgttaaagattggcagcaaacagagtttctccttgatgaaatcagaaggattgaagaacggaaaatagactgattttctcactgttttattagcaataccatatccatgcaccactgaaaatcattgtgagtgttgcatgctccacacctcggaaaacaatgcctcaatcccatgaaacaataagaaagaaatgagtcttcctccttctcatgtccttcaacttcccaagaacctattccttaggcttctaaagcgtgcccacctcctccagaaaacccactgaggtgcctcataagcccagtgttacgtaatgggaaggcatgatcagtcatttctgcaacgttggccaatgaattggtctgtcatttcagaaacatcaggattgtgggttctttaaatccatggccctaggatgaagaatgagcttttattctcgtgtgtgtgtgtgtgtgtgtgtgtgtgtgtgtgtgtgtgtgtgtgtggtgaggatgagggtgtagcagcagaagactggagtttttctgaactcccttaattcacaatgctgtcttcatacagtgctctcatgtttggtagttgggttgtacattttcctattatagataaatttcttttgaagctggttaagactttggagatcaccttctccccctactctcctgccctgcccattccaactaccattggtggaggaggaagcaaatgtcctgctcatgaagactgcctgtaaacagtgaattggaatctgagtccagatgcttatggtagaaatccatcagaatgccccaaaatgtaactgacttgagttgttcacagactttccttttccttttgcaggcagtgctgagccctctcatagccatcgcactgaaaatatcccagattcatgagagaactggccggaggggacccactgtcatcacctgaatagaggaaagatcactcaccagggccaaagagagtgctcagcgggagatgcttcactgatgccttcttgctacctgtttgtgcctcttatgactttggaaaaacaaaagatattttgcttttgggggatagagggtgggtgggaaaagaaaaaaaatccatttggttttggttttgtcctattcctccaaatgcagcagggcctttagttgtctgttaaagctgcactataatttggtatctacattttatcacacaaaggaacctccccttttgacaacaactgggytaggcagctgttaatcacaacatttgtgcatcacttgtgccaagtgagaaaatgttctaaaatcacaagagagaacagtgccagaatgaaactgaccctaagtcccaggtgcccctgggcaggcagaaggagacactcccagcatggaggagggtttatcttttcatcctaggtcaggtctacaatgggggaaggttttattatagaactcccaacagcccacctcactcctgccacccacccgatggccctgcctcccccatcccatccccaacatccctgtaccaccttctctcacatcttctaaagctttgtacaaatcacaatggtgcacttccaacaaaatatatcaataggtgttttcctctcttattttgtaaatagtattattttagctattaagctggataccttctttcaaattcagccattcagttgtaaagttgggaagaagtttcttgacaagactctgcaattaaatgcttaaaatttggaggggatccttccttgattacatsaagtatgttggtacatgggtttatacaagttcctcttgagaaggcaaaaagaccaccatgtgtgagagctctttgacttggccaataggggcctatcttaatgcacttgtttggacacatttctgatcttatttgtaaaggctgcaaaaggagaggatgaaatgctgtaaaagtaggaaatgaagtggaagctggaagaaaatgtaattggtggtacagctatgggccagatggtggaggggagggtggggacccctgccggcaagcagagtgtcacagctggctttcctcacttgggaaaagggtactgccrgtctagcagcctcctctgtactcagccaggacacccagcgcgtgggacctgtttgtgtctgttttgcttccttgggaacggcacagtcactcaccctgccatttgcggaaatgacctggtgcactttgactgttaagcaatgcgttattgctgtagtcaaggttagtgcaagcaaggaaacattcccagtaaggtatttgtttccattttctgtctgtgcttctgtcagaaacttgctaggactttagtggccaataaaaaagaaattcctaatttcaaccttatccaaggattgtgrgtttttacttatttgtttgtctcaccagttgagaaactccagtactggtcacctatcctgataaatctgcctttcagaaaacctgcaagggctgtttttcactattatggcaagagacatgtattaaatggaacagaaaaggtaagttactcaaaactgcctttgggagtcagcagaaactgaaatggcatctagacctccactgtaactgtcttcatttcaaaataataggaaggtggctttgagctgagattctaaaacaaaaccatttcaagattgatcaccagtggaatcaaattcatgtcatagctttggttctcaggttcttgtctcaagagtggacatctatgctagccatccatgtgttcattaatcacggatgtcttggttgggacgctcagatgtattcttaggtgtatcagctctaggtaagaaaatatttattttctcaagttgctgaacttttaatgatctctaacttgtaagttcatatgtaaattagtccttacataaaaattatatttctttattttgatatggartcatgcgtggacagtagcccaaatatatatttagccatcagtccatccattcatccatctatgtgttcattcattcattctgtggacattggttgagcaactcctctaggcagagttctgttttagatggggcaaagaaatggataaaacattattcctgatcttataagtttataatttgggagtaggaggctatgacaaacatacacaaataatcagttagacaaaaatgttatgagagacacaaataatgtgctgtgggactacacagagaggggcaatagactcagagacggtggcacgagagtggtttccacaagagtagagttgcttgggatttgtaagcatttacagaatttcatcaaggatgagtgaagtcagaagacagactaggagatgagggttaggatggctggagaggagacttgcttggggtctcctgaggagttggcttggatgcatggggttgaagcaggcacagggttgtgaatgtcaggcagagcaaagccttgggcccagccaccggaagaagcagctacatagctgcctattttgacagagttttttcagctatgttgtcaagggaaggtcttttggtgggtctaggacacagtcattctctggaacctgctctgattcacattgccaagatattatttctgccttacttgaaatccaaacttctcttgccgaactatatgtgtacatcctcttgcctaattctcgggagaggagagaggcaggaagtcactgttccccatatgatgttctttatgttcttaaagatgaagctctaggctgggcgtagtggcttacacctgttatcccagcaatttggaaggcccaggtgggtggatcacttgaggtcaggagtttgagaccagcctggccaacatagtgaaacattgtctctaccaaaaatacaaaaattagccagacgtggtggtgcatgcttgtaatcccagctacccaggaggctgaggcaggcaaatagcttgaacttaggaggtggaggttgccgtgagccaaaatggagcagtgtgcactccagcatgggcaacagcaagactctattaaaaaaaaaaaaaaaaaaaaaaaagagctgtagccactgtagccactgatctttgagagtaaatgacttgaccgggcgcagtggctcgtgcctgtaatcccatcactttgggaggccgaggcaggcggatcacgaggtcaggagtttgagaccagtctggccaacatagtgaaactctgtctctactaaaaatacaaaaaattaactgagtgtggtggtgtgtgcctgtaatcccagctactcaggaggctgaggcaggagaattgcgtgaactcgggagacggcagtgagccgagatcatgccattgcactccagccaaggtgacaatgtgagactccgtctcaaaaaaaaaaaaaaaaaaaaaaaacaggaaatgactttaaaggccccaaatttcatgggaactgcaagagtcaatcagaggaaactatggatagagtgtggcaacttccagggcaactctggtgatctgctgttacagaggggttcactcattacagcacgtgtctgcagaaaaatggcaagcaacactatacatcacatgctggttttcaaccagggcgggtatttggaaatgtgtgtgtatttgccagagaggcatttagtggcagtagtaggaaaccaaacacgctaaatatccttccaggtgtcagccagtcccccagaacaaaaatttgttttgtgtcacccaggaatcttgagtttattcaatgtccttgaaaatggataggcagtcattattaaaatgagatcgtttgtcaacttttactgatctaagtgcagcatacatccgcagtatttgcgggacaaatcgtgttgcatgacgttataggtggaagggcttgcacgtggcatgcaggctttctgcacaggaagtcgaagcttgatgcacggtctcatggatcagtgtaaggcatgggatttactttgacgttcagatgggtgtagggaatttgaaaagcacctgcaggagctggtaatgacataactgtgtgactccattccattgctggatcatgcactggatactctcaaaacatgtggacactgaaatcccagacacatgtcttaaggagcttcccatccctgagtgtagaagggtctgagaaacggtgtgcctttggaaataacgtaactgccagtaaatcagcctttggccctttgacagttacaaacagcaagagattatccgaagcagcagagcttagcagaatgcctgttccactccaaccagctggagtccttactagaagaaatagctcatgcagctgacagcccacttggtatgtgagtcagcctaggttgtcatggaaccttgtagaatttggagaagatatagattataagtccatgtctttatcatctttccatgcctatctgcacctaatatgtgccctacaatgtaggtgagctagagcaatgcctcaccaaagacagtatatttaaatagaatcttaaatgatagacaggagtgtcagtaaaagcactggtaagattttgcatggagggtcgaaaatgaacacagtacatctcagatatgcaaaagacacagtataacttaatctataattgaggataactgaccttatcctcaccttctggagtggtggtaaggcctactcaaactttctgctcaaagggacattatgagattacaatactggagggccttcaaccctgagaacttcccttccccattgacatatgaacctaccatccacaggtgagagaagagaatgagcaaagactctttgtagtggggatttttctcttttcactttcttatgctgcatgtgctctccctgtcattcatggaattgctgtttccaatccttgaccgtaaattttataagcttcagaaggaagagcagaggcagtatctatttatcttgagtgaatcctctaggggatgactactatattattattatgaaccacaatcggatatttttgtctgatttgtccagtggattttaattgctgggtctctcgaatgtagaatttgctttgtgtcctacccttgttctcgacacatgattcagagtacatatgcagtcgctggaaactgctctgattcacattgccaagatattatttctgccttacatgaaatgttaaaaaaatgaacaaataactactggtattttattttcaaaaagacacacccaagttattttccaaatcagcagttagagttcaataatgtttgggtttgcagaaagatcaactcattctgacactgtgttagtttaaccagagaataatactttgacttatggtcttttattgatttttttttctgatgcaaaaaaaaaatggcaaaagagaaatttaagtacaaaatttattgcggtaaagagattaaaactatttcttatgtaaaccaaaatcaacatttgtttcacttgactaccagtagttggaaaaactatctattacaaatgcaaattctggacaaaagaccaatgatggtccttgttcaagtcagtaaatgtgctcagaccaccagggagaatttcaggataactgtcttagtagagagatagaaagagatgacaagaggaataataaattacattactaataaatgatcacttccctattggacaaccatgagtgaccttcatatctttatgccctcaatgccaaggattcaaataacagattcccaaattcatgcttcatggacaaggatttccttttatgaagcttcttatgcatttttcaggatatacttaatctatgcattcagcaatgatggagaagatgaggccacagaggaggctccatcccatctggaccaccctcttcctctttgaaagatgtacatccttctcaccaactgtctaaagcccttcctgtgcccattcaccaagggctatctccattgggaatcattcttcatcatcaatataatgatcagggggaaactctgctatgaggcaagggaccagtttctaggcagaaaacctggaggacattttacgtattttaaaagaagccgattaaccctaaagcaatctctgccacttctccaagggctttaagatattgcagcaaccctggggctccattttctgttacagcccattttctgaagggagagagaaatccaaactgtctcctagaaggagagaagttagacagggctacctagctcaaaagtgtgaagtcagtcagtcctcccatgttcctctaggaaccgttcttcaccctcctagaagtcattgtgttattggaaaagtttcttaacttctcacaatgtcagttttatgcatatgtaaaatgggaataatcataatgcctgtctcttaaagatggaatgagggctaacacgcatggaaagctcatggcacagagcctgccatataacaggcattccacaactgtgaagccagcatgaatgcctcacttaatagaggagaaaactgaggcccggagagatgaagattcttggcccaagttcaaaagcatcaggctgcatctctgtctaccaccctgcaaccagacttgtcctcttgtatttaaaaaaacaataaaatataataaagttgaggagaaaccatcggatttaaaaatgaatgtcctaagtctaaaagtcaagatctgtatcttgagacacaagaaatttcctgttaatgatgaacgtacatcattagagtttcttatctttcaaattctagagatttatatggggattctttgaattacatacaaatatttttaacctttataagatttatatcaagtggtatattaataccatctgtggccagtacaaattccaccctacaccccggaattccatgtattatgaattaagtattctgtctattccatttgggtctataagcattcttatcatgtctatttgtttaaggacctcttttaagaaacagctcatttaatattttgtgtttgaaccatcttgaaggcaaatattacagtcattttccttttacatagaaaaaatacatatcatgaaaataaaataatacaaaataacattcatgggttccgagggcatatctcccaggatgtgaagtactgcctcactctggtagtatggtcagctggaggtaactaggaaacaagctaacaaaacaaaaggctgaacaatcaataaattaaacaacaaaccttcgctttgagattactaggtgatatagaacaggaaggcatgtggctgtcctgacaaccagcatctattcctccctggctggagttgaggtgatgggagggaaattgagtgacagcagaaagaatctctgtaagcagagctctcagagtgacacctttggggacccaaggccagccggggttaagattagtgtgaatcctctgaaatgtctgcttggtgttggccacacccttccagggcccctggcctgccctgccctggcatggccagttatgtctggaattcagggctgtcatcccctccccaagctctcttgtggggtccctggtgtggcttttcctcccacagtccctcgtttgcctttattatcagtagctgctccccacagtggtggcatcatgagtgctggagagctttctctgcctcagcactcttggcctcgcctctgggcgtcctctgagattgctgtcaccaccaggccggctatggactctctataagat

SEQ ID NO: 95522 - DNA, 76674 bp, Homo sapiens
  misc_feature (1)...(76674): n = A,T,C or G
catgtgggtttgtgtgcatgtgtgttcatgtgtgttcgtgtgtatctgcctgtgtgtgtgcatgtgtgtgagttcatgtgggtttgtgtgcatgtgtgtgactgtatgtgagtgcgtgtgtgtgtgcatgtgtgtgagtgcatgtggatttgtgtgcgtgtgtgcgtgtgagtgcatgtgggttgtatgcgtgtgtgtgtgcatgtgggttgtatgcatgtgtgtgactgcatgtgtgagtgcgtgtgtgagtgcgtgtgagtgcgtgtgtgtgcgtgtgtgtgagtgcatgtgtgtgtgagtgtgtgtgcttgtgtatttccccattttccgaagcagtattatttcttcactttactcctttatctatttcaatgcatctttctctttgtctagcttcacaccagtgttgccctgccaatggctgtggtactaaaatcagtcttaacttgaggtggtgtgagtcctcccgcttggttctttttcaagattgctttggctctccaaggtcctttgcatttccacatgaatttcagaatcagctgctcaggttctaccgtgaagccctctggggtgctgggcgacggtgtgggttctccgtgtgcacgggagaatgcgtcttagcctcaccaaggacccccggctgctcacctcccatcctcctgtctgctgtttttgccatgggccagcctgtgtgctggagcgagtggctgggagtttggtcacatgcctcccagtgtggcctgctccagtggcccctgctttggagcccaccccatccacccctgccacaagctggcgccatgtggccctgcctgcctccttccccgccctggttcccctgcctgcctccttccctgccctcattccccagccctcctctcggctgctcaagctctgggctcaggtgtcttcttttttgtgagacaagccggcttttcccacttccatccctctctgcgcccacatgccacctcctcactgctcctcggggagagagctcaaccgcacatccagacgcggatcacacctcgggctgcccctttcgctcgctgagtggaggctgcgtctgtgacgttttattctcagagacgccaggatgctcacctgagtctctgcccccagccaagggagaccctgagcctgtttagggacagcaggaaataatgacagaggctcaggacccccctcatatccccattgcccgactcggtggtggcccacgcagcaatgccgagagcagccaacgctgtgctggcagagccaccttgcaggaggggaggtccaggccccaagtccgagagcagaagacaaaacatctcctgtggacactgtaacaaggagccacaagcaggtggcttccaacaatgtgaatgcactgtcccccgttctggagggcagaccccaagatcacagagtggccagagctgtgcccctccagaggcttcagggaggatccctcctgcctctcccagcttctggggctccaggcttccctgggctcgtggccgtgccattcgagtctcggcctccacctccacatggcctcctgcctgggcctccgtgttgcatttcctctgccctctctttaaggacaccgtcgttggatttaggacctgccctaaatccaggatgatctctttatcagtgggtggctgggtcaggttcttgactttgcagcacaaaagaatttgagagcaagtccaaagctcaagtaggcaaagaagtttgtcacaaagcaaaggcgctgctcggagggagaagcagccccttagctcgaggggagtcctttctcgggagctgtgcatgcacattcatgaaatatggtgaggtcaggcgtgtaaaggcagacaggcccgcggttggctgtgcatgcctgttcatgaaatacggcgaggtcaggcgtgtaaaggcagacaggcccgcggttggctgtgcgtgcctgttcatgaaatacggcgagatcgggcgtgtaaaggcagacaggcccgcggttggctgtgcgtgcctgttgatgaaatacggcgaggtcgggcgtgtaaaggcagacaggcccgcggttggctgtgcgtgcctgttcatgaaatacggcgaggtcgggcgtgtaaaggcagacaggcctgtggttggcacacatgctcagtacctacatgctccaacacacactgcatgtatcattacatatagaatcctcacctgggggtgtgtctcttactattaaaatgagctgaacttggagtgtaactgtgtgtacagtgtcctggagaagcccctggcccctccgaggcaggaatgtgtggctaagagcttggtgggctttgggtgctgactggctggagattggggaagctacatcaggaataaggtatcttcattgtctttcccgggcctgtaccgggcatcaggaacttgtaagcatccggctgtcggctggtgtcctgtggggctgcttaccttgcgaagcctgctgcaaaaggggcccgggggcttcacacagggaacaaggacgtcagtgtggcctcctcatcctaccgatcctgcctcaagctcatctcaggatccctaactcaattacatctgcaaagatcctagttgcaataagtcacatgaggacaggcccttctgagattaaacccgggccagaagatgtgtttccgagatcggagacagaggcccatgtcctgctgacactgtgtcttgggtcgcgggaggaggacaccgttcagcccaccacggaaggaaaggcttccacggggaggaccggtccagccgtcattttctccccgtggcctctccctcatccccagcaggagcgcaggaggacaaggctgggggctgaacttcggggtgagcgacttgccttcctcattgatgggcatttgggacttgttggaaaatctttgcgctcctttatctttttcttggggctgggttgagccttgcagaaaagcgagatttggaagagtcatcctggtcttcattgtcttccatttgccagcaggtgggcgacagggagttaaataaaaacgcttcaactccgcgcgtgtggaaacgacctggcaggatctccctcgtacgacctgcgaggcggacgcggttgggatcctcattgtgccggagactgaggctcccaatggctgtcggtctcgcctgtgggygcctgggctcgaacctggatcggaccctggcgctgctccctgtcaggaacatctgctgacggctggtccagcatccacgggccccacttctaggagccgcacctgccaggccctgagtccagcatgacgcggtggagcataagccaatctgagtgccctatttcctctggccacagcgattggttcagggaagagcacgtcacccartcagagcccagcagacacagggatgcttttcctgcgtgtcctgggaagacaggtgggtttgctgccctggactcaaacccctggaaggtttggacctgcggggacacagcctccggccacgcggacacggcctccggccatgcggacaggccttcctgagattaaactcaagccagaaggctggagccaagagaggcaggcagaagcctgtgtcccactgacaagttttgacccccgaccaagccgggcccgaaaccaaacacacctggacttttcctacggatgagccaccagcccccttcctgcttaggccatcccggctcggcttcttcatgttgctgctgagcggagagcagaggatgcatctggaaggttctgttgccctgatcgctcctgggctcctcacacgcttctccgcgtggccagcgtcccgggggcctctgcgtccatctctcaaacctgtgccatgagcttgcagggaggccttctgttccatgcaggcggcttgtttataaagcgagtggccgctgagatccatcaataaaaggccgtcgatattctggggcaagaagtgggtaccgaacatggattctaaatcaaatgagaggtcattgagaatgagtgctgtaggtgacagggattctctgcccccacctgccctcgtaaagtctgaagaggctggaggcccccgggaacggtcacgccataaatcacttgtccttgctgcttgcaagttcttcagcacaggtgcatgtggccccgcagccaggcccgagacgcctcctgacctagtgatggagggagaaagaagggtggagtccaccactgtcccccagaggccagcagcttcctccactgctccgaggaggcgtagggggcaggcgtgagtacttcacgggcccagccggtgcctgtggggccccttgagtcttcatttgtcccctcattacacagatgtttataaagtacctgctgtgtgccgggcacagcctgggttcttggtatagagctgtcaatgggacagaaaaggagcttgctgtcagggcgctcacgttccggtcacggggggagacagacctgcaggaacaaacaggtacagggtgtgcgcttgaggacggtgaggggggccaccccatgggacaggacttgccacaggctttctgagcagccctgcccccctccccctgggctctgggagtgcctctgcccaccaccccaactccaaaacctctcctttccaacctgcagccgctcctgcagtcygtcctaggacgtacttcctttctcaggactttctgttttacacattttgcaagttcatgaaaactgtgcratccaagctttttcctctacagatgagtggagtgacgttttctygtcagaaagcatttttctgagtgatgaaatctccctggctgagcaccacagcccagataaatatgatggtggcgcacagcccttgtccctttgaaattctcaccagaggcttggaaccagctatgagccagggcgggaagtggctgcctgtgcgggtggctggctccttggctgtgcccagctcctcggctgtgcccagcagcgccgtccccaacgtgctcctgaagctgatggctggggttggaatccaagcacctgcactcatggcccacaggggaggctcctgtctgtggaacggggacgttcatctcctctcggggtcgctgtgagcacggggtgggcacaggggccatgtgtgtgctgagtgctgtgttactgttactagtttctctctggaacagctctggcccccgtacacccttggcgtctggttgtagggtccaggccttgtccagtgaccctcgaagggtgcacctggctcccggggtccctcatgctgcgccctgaccacaccccaaaccgtgtctcctgcaggtgcagacagatgagctatggctccyggggtccctcatgctgcgccctgaccgcaccccaaaccgtgtctcctgcaggtgcagacagatgagctatggctyccggggtccctcatgctgcgccctgaccgcaccccaaaccgtgtytcctgcaggtgcagacagatgagctacgcccaggacctgccccaggtctccgtggtcttcatcttcgtcaatgaggcgctgtcggtcatcctgcgctccgtgcacagcgtggtcaaccacacgccctcccagctcctcaaggaggtcatcctggtggacgacaacagtgacaacggtgagtgggcggggcctcggcacggtgctcgccgggcggctgcctgtggctgggttgagttggggttgggtggagcctccgggggcagagcgacagaggactgcaccccatctgtccgcaggggctctaaacctatgggggtccctcctgccttccagcctctgtcatggctgcgtacgtgctgtccccagtgtgtggctgccagtgcctctctctgcctccattatgcggcctctcccatgtgtctgcatcctctcttcttctcatgaggacccagactagacacagagctcaccccaaatccaggaggatttcatctcaagatactcaaccggatacatctacaaagtccctgcttcctctcctctcaggctccgggtggagatgaagttggggtcagccacccccttccacagaggccagtagagctgagctctccagagtgccagtcacgcctcccacctctcttgcccacagaggctcacaccagagcttggctggacagagctcgcagctggagcccaagccccatggttcctcagcgccaccctcctcagcttcaggtcccctgagggcagtgctactcacaccctgtagcacacaggcttgaaaccccaaacaaggatcttgcactgccccaggcctgtcccccatctgcccttcccaggcgcagagcagagagcctgcagccgtgacactccctctggaaatggaggaaaacatggggagccccttcctgacccctcgtggaggcaggaggctgtgccatggggctgtggggcaagctctggcctgcagcagtgccctagcccagcagcaccgtctacactggggtctgtgtgcagaggactgaatggcgtggctgccctcctgagccctgtctcgctggagaaggtggtgtgtggggaggaccatccagtccagctcggctacctgtgtcttgcccttggccacagggagctccatcaggacaccctgcccccagcatggaaggccacgtttgtgtgtccccccatccatgcatggacttggttttttacagctgactgcagtcctgtgtctccacagcatgggctgctgtctgtctctctgtctgtctgtctgtctggtgtgtttccttatttgctgtgtctcccactggaatgtcagcatcatgaggctggggtctcatctctctgtgacctccacgctgaaccacatgtggttcagtgggtcctaagagaatgtttacaatacacccatcccacacgcggcacgcagcatttccagccttgggtcttggtggccccgcgcctgccagcacctgccagcgtgctaaagtcttgtctctcctcagtggaactcaagttcaatctggaccagtacgtcaacaagcggtacccaggcctcgtgaagattgtccgcaacagccggcgggaaggactgatccgcgcgcggctgcagggctggaaggcggccaccgccccagtcgtcggcttctttgatgcccacgtcgagttcaacacgggctggtaagggccggaacaggctggacagccagtctcagcgggtccccctccaccatccccctcctaagccgccgtgcggctgcagcctggccgctgggttggccccggggctgggagactcgccgtagccttcaggatctgggactgagagccaccactgagtccacctgtgcggttacctctgcggcctctctgtgtccagctcctgaatgcaaaaccacgggagggcaggcccagcacgcacccaaggacatggcgcttagaagctcccaggcatgtgtatgaggcttggtctgtgcccaccttgccccaggagaatgtgacccygtcctgactccagcaggctcgggtaccgtgtgtcccccgcggggtgggaacctcagatcaggtggggtggggctaaggtgcagaagtccggcctctcaggccctgctcagtcactggagatggccacgagtgcccccgaggccttagcctagtgcaaggggcgtgggaagtgagcttctgggctgagggggtcaccttgtgtatggggtcctggggccaccagcacaaagcaaccccttctgggcggctcggagcagcaagacttcacctcctcaccgttctggaggcccagagcccgactccaaggtgtgggcagggcccgactccaaggtgtgggcagggccgagtttcccccagaggctccaggcccttaaggatccctcccacctctctcagctcctgagggctgcagcccccacctccgacccccacgccctccctgtgtctgtttctccatccctgccttatgcaaggacccttgtcattagagttggggcagtccaggatgcccccaggcaaaccccaaagccagccccacagagggcacctacggggtccatagtgcactgggtgtgttccccgcacccaggcaggccccgcgcccacaatgcacagggtgttccccgcaccagggccaggacccacccctgtccacccaaccacaaggaagacccgggaggacattttccccacttcctggagaaacaaaaactgaagatttaatatcaactctcctgactcatttttcaactcagggaaatatgggctgttgtcactgcagggggccttggtgggaagggccagctgatgtttgatctcagtgttacacggaggctgggactgtcatgattggctgggacaccccactgcatgtgaccttgggcctcctgctgggtccccggggaacctggcgttttggggcttcttaaagtccgtggtttccataacagcatcagtgggttcaagtggggacttggcacctctcaggcttctcccctcacactcggctttcctggggcatctcagtccccagccggcgctgttctgacaagacgctgcctcctctgccctgtgccctcccttccccttcctcgctcctccgcagggcgctttcctttccctcgatgtttatcagcttctgacgtgttgtgcatgaattgtgttccactgtctgcccccyacartgtcaccccatgcagtcgcacacgttgtgcactgcacaactacaccggcagccttttagtccctctgatgccgggtaagctccccgaggcctgagggcgtctgggggagccttgggtctgtcacgtcaaaatgcaattttaaaccggtccaaatttaattttcacaactgaaaacccagttatccatctgcaaatagcaccccctcccgtaactgtctccacaaaggattctgccttattagaagacctggcatttccagggagcttttcatctctgaagcacttcgctaacagtaattaattaatcctcctcacaaagctgaaaggcaggtaaataccaggcctcatgctcagaaggacgggaagaaggggtgaagacagccgtgtggtctcacaggcagggtcagggccttgcctctccccatgccggctctgcctgagccgacccgaatctgccctcaggccatccagcctctcactgcagcctctgggctctgtgtcagccagtggctgggtggctttggccctgtgggtctccagcgtggacggcgggcctcygcggccatctcaccttgcggtagaccatggcgtctccaagggcgagggctgcacctgcttcccaggacccctgcttgggacggggaatcgaagactgagctgatgcccatcgaggcygcttctactcaccttcctctctgccctcctcgccccccattgccccatcgctctgtccggcctcctggccagccctgcaggcccattaggcacacgccggggcttcggtgcagctgccgcaccctctgagactccctctatgcctccttccagtcactacccagggcagccctacttaaaactgtgagccccctctacaacatccacgactgcttatacctcatcctccgtcccgtccttgagcggggccgctgcacactcaygcaggttccacwctgcacaacggtgcctggtggcttttcatcccacaccgtgcgagctccccgtggcacggattgtttttattccttagttcatgattgtattccaatttgtgggaacagggcgtggcacatagtagatcctcaattaattcttgcaaatgaatgcagctcccacaggagcaggaaaggagaggagggactcggggctgggcagagagggagaccgagctggggagccccgtggtggacatagctgacctcttatggacccctgggcagcccttcagagatactgcagttgggccaacgtggccggtgtcagcgtcccccaggggccagtggcattcgaggggctaccccagcaggggtgaggccttggtcagggtgggtctgctgctgagaggggcccttgggcttccaagggaggatgtgggtctagctcagcagggggtggcagggctagatgcagaccaggtggggactggcctcccctccctgtgggcgagtggaccctcctcagggaatgcggtgggctggggccrcccctcctcacagctgtgcctccgcagggccgagcccgcactgtcgcggatccgagaggaccggcgtcgcatcgtgctgccakccatcgacaacatcaagtacagcacgtttgaggtgcagcagtatgcgaacgccgcccatggctacaactggggcctctggtgcatgtacatcatccccccgcaggactggctggaccgcggcgacgagtcagcacccatcaggtgagctgcgccctcaggggtcgagggcggccctgcccggcaaggagcggagcagagcgaggcgggcgtggggacgagggccagggatgagggccggggacgagggctggggacgagggcgtggggacgagggcgtggggatgagggcatgaggacgagggccggggacgagggcgtggggacgagggccggggacgagggcgtggggacgagggctggggacgagggcgtggggacgagggctggggacgtcccccagcaagcacaacctggtgcaggggctgagcagagaccacggtgagtgtcgggccgggtgctggggcccctgggctttgccataaaaacttggcacacagagcttgtctgtatcacagagatgcagacgcagccctcagggttcacaggagccagtactaacggcttgaaggttatttttcttcattcaaaatgcacttgataatccccaattagcaggaaaaggatcgccttgtgtttgacattttaaaaatcagtgaaattcagagaacccaatgggaggcacctcccacagtttttggcaggctctggatgccctgagctgtggcaggagcaggctcactggccccatcaagtcttcaaggcatggctgcccccctgctcctcatagccaccacctggacagctgctgaaaccccccgttccagctctcagctaaaggacagggcgtgacatgaacagacactacccaggagaagactggcctgcgccagcaagctcatgaaatgtgctccccacagtccagggagatgcaaattcaacccacagtgagatggggctctgtgcccactggggtggctgaaaggtgcaggctgacaataccaaatgttgacaaggacatggcacagatgcaactctcggacatggctggcaggactgtgaatcggtgcagccactttggaaaacccgcagctccttctgaaggcccgaaacccactccagtgtccccccttccagtgtcccccctccagcgtcccccctccagtgtccccctccagcgtccccccagtgttccccctccagtgttccccctccactgtccccctccactgtcccctccagtgtcccccgtgtcccccctccagtgtcccccctattccactcccaggtgtttttctcaaaataaatgagacatgcgtacatgcaaaggcttccacacaaacgttcacagcggcgttactcacagtagcctcatatgcgtcagcaggtgaatggatgagcagggcagactccacccacatcacggaatacttagaaacagggaggagtggacccttccacacctaacaacgtggtgagatgtagaggctcatgctgagcctcggagccacacatggaagagagtgtctgcgtgattcctgcacacagaattccacggaaggcaaaattcatcctgggtggaggctgagggtcggggctcacagggaaggggcctgcctgggacagttccagggcagcagtgttctctgctggaaaaggatggggtcacccaggggtctccatcagtcaaaatgggccaaaatgcaaagatcacatggatgcatttcattttatataaatttcacccctcaaagttgattttaaagaataaatgaaatattaaggcaggtgcggtggttcatgcctgtaatcccaacacttgggaggcccaggtgggtggattgcgtaaactcaggagttcgccctccctcatggggacagaaacagcagacagccgcaacgagatggggccatgttagaagttccaggacggcttccatggtggacacccagcgtgacgatcgcaaaggcgcatgtgggtccacgyggtgttgtcatcgcggccrgtgcccctgcgttccatgcttagcgtgcaggcgtgcagcctgctggatgtgtatgttttagggagaaggaatcaatgcacacatgtcaggtgtgcactggttcagtccaaaaggcgggaggaccggaagtggggacttccaggccatgggcggattcaaagattttctgattggtaattggttgaaagagttaagttattatctaaagacctggtatgaatagaaaggagcatctggttaagataaagggttgtggagaccraggttttatgatgcagatgaagcctccaggtagcgggcttcagaaggagcttcagaaggaggagattgtaaatgtttcttatcagacttaaaaaggggccagacttctggttaatcttgtctggatcagaaaagacctccaaaagaaagggaagtctctacagaatgttgagttcccccacaagacacagcattgcaagccatttcaaaatacatcaatgaaatacattttggggtaaaatacttaacttctttagggacctgctaactgtcattttggatgcattttatctctacaaaagagtctgtttggtcagacttaacatctgtgttttagtgttccagaattccaaagggaggagagtctaaggggcttgtccaaaccctcttcccatcaggacctgagctcgttttcctgggttactttggggtgcccttggttgagaagcggctccattcaattggttgggggtcttagaattttattcttggttgacagaaccaatacttaatcattttcacttgaaatcttattttatgtgaaaatgatttctactctttttgaaaattggaagattctaggccccaattcttactcagtcatgatgaactgaagctgagctgtggctgctccctcggacagagcagagccacagtcaccacctgtcccaacagccgctcccggcaagcccatctgtcctgtattgtttatcatttgctgatgctgctgctccacttggggaaataattctctagagctgggtccttacgggagagggagaatagggacagaccaagaggactgactatttcaagaaaaagaagatgaaggctttgatttcaccatgttcaacaagtgacactagccctcttctctcttgtactttacctgcctgaccttcgtgtaagtttgtctgtcaaaactcaccctggaggatcaaagtctgggcgagagccccatcagaaatcagctccccactcactggaggatcacagagtcacgtgctggagccctgtcagaatcactcctctcgcatagaggatcagagtcagagacatgagccctgtcagaatcactcccctcatgctggaggatcaggagtaataggcgagagaaaaaaataagaaggacacgatgctgatcatcgctgaaactgagaacacattctgctcatctttctccttttgcatacacttgaaaatttccataaaagtaaatatgcatattaaaagcagcggaggggccgggtgcrgtggcttacgcckgtatttccagcacttttgggaggccgaggcgggtggatcacctgaggtcaggagttcctagcctggcaaaaccctgtctctactaaaaatacaaaaattcgcagggcgtggtgtcaggtgcctgtaatcccaactacttgggaggcygaggcaggagaattgcttgaacagaggaggcagaggttatagtgagctgagatggtgccattgcactccagcctgggcaaygagagcgaaattcagtctaaaaaaaaaaaaaagaaaaaacagtgaagggcattttcaaggatgtacagcaggggtcagggaatcatggcccacagtcctgtatttgtaaataaagctttattgacacacggccatgtttcctcatttgcatatcagggcagaggggagcagctgccacccaggcttctggcacagagccaagacatttacacacttgccccgggcagagaaagtgtgggccctgctccaggacggcatttccgtgatctctttggggaatggaactttaggtgcagggataaccacctcactttttaagtcctaacaattttcactgtgggcaaaggattacctaggtgccgaggcaagagactgaaggcacaaactttcagtataataaagaaaatagttagaataagaataatcataatacaagtcagatatagagatgatcatggacaattatcaatcattattataaacattattaatcattagcttttaatattactctttgttgcattactaatataayctaggaataacctgmgggtatagggtcaggtgctgaaggracattgtgagaagtgacctagaaggcaagaggtgagccctctgtcatgcccgcataagggccgcttgagggctccttggtcaagcggtaacgccagtgtctgggaaggcacctgttacttagcagactgtggaagggagtctcctttccttggaggagtcagggaacactctgctccaccagcttcctgtgggaggctggatattctccaggcctgcccgcagtcatccggaggcctaaacccctccctgtggtgcttcaatggtcacactccttgtccactttcatgctcctcccgcactcctggttcctctttggagttcgtagtagatagcagaagaagaaatagtggaagtcttaaagtctttgatctttcttataagtgcatagaagaaaacgctgacatttgctgccttccctctctgcttcagctacctaaaagggaagggccccctgtcctgtgatcatgtgacttgcttcaccttgtcaatcacttagaagattcaccctccttaccctgccccctcgtcctgtatgcaataaatatcagcgcacccagccgttcggggccactactggtctccgtgtctttttttttttttgaggcagtttcgctgttgttgcccaggctggagtgcagtggtgcgatctcggctcaccacaacctccgcctcccaggttcaagcgattctcctgcctcagcctccctagtagctgggattacaggcatgtgccagcacgcctggctaattttttttggtatttttagtagagacggggtttctccatgttggtcaggctggtctcgaactcccgacctcaggtgatccgcctgcctcggcctcccaaagtgctgggattacaggcatgagccagtgcgcccagccaggtctccgtgtcttgatggcagtggttccccccaggcccagctgttttctctttatctctttgtcttgtgtctttatttctgacaatctcttgtctctgcacacggggagaacacccgctaagccctgtagggctggaccctacatttcactctttccattgtggatgcaaactctttctaaaacgtggcacgtgcttctctgccttctcagaaacagtttttaaataacattaaatgtcagtgtcggcgtccgcaagacacgaaggcttcagtcgtggcggggatgcggctgcaggaggtgcccatgtgcctgggactctctgcccttcctgcgttcacagccgcctgtggctcatctttggaggcctctttgctccctgcagagttgaagcacctgagcttcaatgggacagtcctaggcaggagtgtggcctcactgcctgggcctgtggaggtggctgccctgttggcctccaccctgttctagtcctcttcctgctcccctgctcctttctcccagacagacgctggggaccatcctcatcacggaggattcctgggatcccagttaagatccggcacccccatcacgtgagcaaggtgggagaacggcaggaaggacaggcagcctggcaggcggggggcaggcctgggggagctggctctcatcggggctgctggttcaagtgtgacttcggaggacacctggggacatgtgttcctccaggaagaggtggggcccccaggctgtgggtgcccagaggctgctgatgtgccaccagcccctccaggatcaagggctgtgctgacaccaggcctgcccacctgagaaccactcggaaattattccctccaaagctctggaaccccaagcactacctccattccccagggccctccagcttgcagagccctgtctgccgggggctgggcctgcggggaggagacccctgattttctccttcacccgaggaacaaagaacagggtgctgtccctgagacctctcctggtcagaagaggacctgggagggcggtgtgggcccggaggagtcccctctgagagctggccttgcagagccctgagctccaaggatttaaggagtcagcgaccccaaccccattgacaagccacacagaaacgagagcagccgctcccctccccggaaagcggatgccgggagccccccaagacgcagagcaccggcctgtttcacagcttcctgccccgtaaccggcgtcgtgaactggacatgccttcctgtgcttttcatccttaacgtactccagttttaattttaacttttcgtttcagtgcctctgattgaaggtggcaagtgttgactgaaaccaaagttaaaattgtatcgatcgaaattcataaaatcaaatgaatgtgaaagaaatgtaaataatcaagctctcgggtgatgtttccatgcgtttgtggctcgcacatctgcacgtacgtgtaccgtgtgccggtcaccgcttgggtcttgcacggcgaggtttcagtgtgcgttattctcgacgtgttccaaactccgtgtggaaggacgcggctccggtgcccttgtcttagcttctccgtggattgtgtcttacgcgcgcgctgctgtttacgtacctatcccaggttcacgggcaccgggctcactaggcctccctgtgcacgtgtgcaggcgacaggtccaccgcaggcctccggggatgtgggtcccgactccacccacacgggcggtgcccaccgcctcctcgccgtcttacctcggcatgagctgagcctttgttgttgttgtcgtttgagacggaatcccctctgtcacccgggctggagtgcagtggcgtcatctcagtccactgcaacctccgcctcccaggttcaagtgattctcctgcctcagcctcccgagtagctgggattacaggtgcacaccaccacgcccggctaattttttgtatttttagtagagatggagtttcttcatattggccagtctgatcttgaactcctgacctcaggtgatctgcctgccttggcatcccaaagtgctgggattacaggcgtgagccactgtgcccggccacgttggcttttcttgttatcagggtctgtggaagatcaaagcactcaatgggccattggtgaaactcatataacacaaatcaaccacactaaagtgggcacctctgcggtgtttcgaccatcacagtgtcgtgcagctgccacctccgtctcgttccaaagcattgtcctccctccccgtggggaccccacacccacgagccgccactccccgttccccccgccccagcccctgcatccacgaatccacttcctgcccccgtggacttgcctcttctgttccttgcatgcggacggagtcacacggggggcaacctcttgcacctggctccctgccctcggtgccacgtttccagggttcctccacgtcgcaggctgtgtcagcctcgctccttccactgcagaattgcggtccacagcctggatgggccactctccatgtatccacctgtccctccgtggctgctgggctgagtcgcttctgatgctaacaagaggcgtccggctggactaaggccccggaagctgagaactggagggcaggtgcgggcatcgggcagagcagctccagcaggcaggacctggggcctccaccctgcacccctgtgccccgcgtgtggcggaaccgccccgaggggaggctgtcaccacggtgacaggcagccccacgcgagcctgagaaccctcagcccacctttttctgtaatcacagcaggcatctctccggcaagtcaatccagttccagctggtgctgcctcccttgcctcatgggctttattttagaactctgagcaataataaaaaagacgctacccgctacaatagatgtggcagagaatctggctcttcacttcatcagagatcaccctgaaatgatggttgttgttaagaaaacaggagaaatacctgttgtatatgataaactataacttacccaatcaaaggttgctattaaaaatcaagggggggtattaaaatttcatcactgttaggtttgtggccgaaatctaatgacagaacaaattggatctttgcacaaataaaaggacaattgctttttaatgctcctgctattcttggacaatcgatgggcatttatttctgactgctgagtctctggggacagaattgcttcctttaaattatgacagaggccaacttttgctgttgtttttatggaagaacgcgttgatacgcagaggaggatcagggaagctcaaggcctgcagggcggcctgccgtggcatctggggatagcgtgaggctttgctgcttcctctgacagctcctgaggcctcagaagaaatgaagctctccacggacaaggaaattgttttgaggcaaaatctttcagcaaagatgagaagttcctccttccttacaacacacagactctgcctgctccttgctggagatgtgattttcctgcctctttttcaatccccgccaccttccagacacccagtagaaacctgagagggatgagtgaatgagctcgcacgtcgcgtggcccacaatggcacaccagcttatcctcccgctccactctgcagatcctgccttcactgctccgcagatcctgccttcactgctccgcggatcctgccttcaccactgctgtccatgcagcctcttcccaggggatttgcagcactgatgcactctcaatacatattagaaaaaatataactagcataccaatgcatgatttcacagagatggggccaggctaagtcggctgacgttttagaattattacaggaagtatagtacagctggcagtctgtggcacatagctgcacaggctgtgcactcagctccaagctgcgtcgttcagaatctgtcatcaacaaggttctgtggagttgagcagtgcacagcctacgcaactgcccattgcagtcctggctcctgatacacagttaggatgaagcatgggggaggcgggcaagtgactcactcgaacttgggaaatgatgttcaaggcaaccacagagctccttaggtaaactgatcttttttcaggggagaggggagacaggatctcactctgttgcccaggctggagtgtagtggtgcaataccagctcactgcagcctcaattcccaggctccagtgatcctcctgcctcagcctccctaagtgctgggataacaggcgtgagctactgtgccggccgattgatctttttttaaacctcctacactaagctgaattgaatgcgggttctgtcatctgttggcattcagcatttggacgctgtctgggctgagggcttaaccaggctccaagggactcaagtcctggtggctggaggagcagcggcccctcaccttgagcacagggacctgagtgcmcagggaggaggcacaggagggaggggtggtggggtcttccaggctttcctggctcatggcccagcaggcagggctcaggcctgcatggcsaggtcctcacgccgctgtctctgcctcccaggaccccagccatgatcggctgctccttcgtagtggaccgcgagtacttcggagacattgggctgctggaccccggcatggaggtgtatggcggcgagaacgtagaactgggcatgagggtgagtgcggccmcggtgtccagggacagggtgagggcgagtgaggccacagcgtctgggaacaggatgagggygagtgaggccgcggtgtccggggacggggtgagggcgagtgtggctgcagcgtccggggatggggtgagggcgagtgcggccacggcatctggggacggggtgagggcgagtgaggccgcggtgtctggggacggggtgagggcgagtgcggccacggcatccggggacggggtgagggcgagtgcggccatggcgtctggggatggggtgagggcgagtgtggctgcagtgtccggggacagggtgagggcgagtgcagccatggtctagggacagggtgaggtccagggctcctgctcagcgcactgagccctctccagagcctaggctgaggcagctggaagccaagctgggcggccaaggctcccagggtccctgagctggagttggggacagtgagatggggctaccctgagtcttgctagaagctcagtggcaacatcactgagaaattttgtagaatcacaaaagatggcatttcccatgtctactttatttttcatgccctttgttttgctgtttatgaattgcccccaggtgacaatggattgggaccttggaaaggtgggtccttcggcacagagggtgggtgtgaggctctgagctcggccgggcttctgcctcccgggactgtgtctgtgtgaggctctgagctgggccgggcttctgcctcccgggaccgtgtccgtgtgaggctctgagctcggccgggcttctgcttcttaggtttttattttggaggttgcgggttttttattttggagtttcgtttggtttcctttgtgttttgcccatggggcttctattcacagaaaagagttaaggctagttttaaaaatttatatgtagtttattaagttgcacctttcaaaacctgtgctgtaagcttgcggttcactttaaagatcgtactatcgtggacacaaattcaatcaataaaacggcctccttccccgtggccgcgattgtttaactcaggttgggcagattaaataatactgtgaggccgggcactgaggctcacgcctgtaatcccaacactgtgggaggcagaggtgggtggatcatgaggtcagannnnnnnnnnnnnnnnnnnnnnnnnnnnnnnnnnnnnnnnnnnnnnnnnnnnnnnnnnnnnnnnnnnnnnnnnnnnnnnnnnnnnnnnnnnnnnnnnnnnnnnnnnnnnnnnnnnnnnnnnnnnnnnnntaaaaccctgcctctactaaaaaatacaaaaattaaccaggcatggtggtgcatgcctataatcccagctactcaggaggctgaggcaggagaatcacttgaacccaggaggcggaaattgcagtgagctgagatcgcatcactgcactccagcctgggtgacagagtgagactccatttcaaaaaatatatgataaaataaaataaaataataccgtgaaacagaattcactgcttttgtgcctttaaagtcccttgagccttttaaaaatggcacttacaaacatagtgttttattttcttttaatcactttgaatgcctgatatcataccagaaatccccccgaccaagtgctttaaaatatctagtttaataaattgaattgagaccagatctgtgaaggatgtcaggactgtttgcaggtgcctttaatcctctcatcctgtccgattttaaactgcacatctagaatcaatcctcaattacacatttttaaaatggaagctggaagttaatctggcaggttctttaatattctgacttcccttaactgctgtgattgttaaacaccagaccttggcgggtcggccgtggattgaacgcacccacgcgggtgtcggcttctctcaccgtctcccctgatgctcaccctgtggggcaggagaccaggccagcagtcaggggcctaagaaagccgaggccctcagagggatggaacgcaccgcagagacgaggaggacagcctggggagggtgccggggaccggcagtgcgcagccaccaccgaggccgaagagcgagggaggacgggacccctggggtggagggcacccagcagatgtggtcctggggacagagccaccgtcagtgaaagacaagtcgcctcagcaggaagggcccaggggagaaacacgcccacctcccctccaaacaaaatcggctcccgtgggccaaacccagctgcagtgagaggaggtcccaggaggctgggtcgtgggtgcatcccaggctcaggctcagagcaaagccgggacgacagcgaacctgtgtggtgggcgagggtcagcaggccgggctgggggtgtgggtgctggaccacggagggccctggctgggcgagggtcagcaggctgggctgggggtgtgggtgccggaccacggagggccctggctgggcgagggtcagcaggctgggctgggggtgtgggtgccggaccacagagggccctggctgcagccgttggagagcttccctcccgtctccatgacacatgggcctttcttttttttaagacagagtcttactctgttgcccaggctggagtgcagtggcacgatctctgctcactgcaacctccacctcccgggttcaactgattctcctgcttcagcctcccaagtaggtggcaccacaggcacatgccaccatgcccggctaatttttgtacttttagtagagacgaggtttcaccatgttgatcaggctagtctcaaactcctgagctcaggtgatctgcccgcctctgcctcccacagtgctgggattccaggtgtgaaccaccacgcctggctgacataggggcctttctgatggcctgactcctccgcggggcaggggagcctgtgtcaccgcgggttctgtctttcaccttcatcccctgacaaggcacagctgtggccgcgcccagcgtttactccactccctgacctccctgccctccctgccacctctcccccgacctctccccctgacctctctcccgtcctgggggcttgaaagttttcaccttggtgtcctgtctggcggtcagaggttgctctacggtgggagacaggctgagaaccagaacccagttctcctggtgagggacaggagactcacctgtccccatcaccacgcccccgtccaactccatcaccatgctgcccgtccagccccatcaccacgcccccgtccagccccatcaccacgcccctcccgtccagccccatcaccacgcccccatccagccccatcaccacgcccccgtccagccccatcaccacgcccccgtccagccccatcaccacgcccccccgtccagcccccatcaccacgcccccatccagccccatcaccacgcccccatccagccccatcaccacgcccccgtccagccccatcaccacgcccccgtccagccccatcaccacgcccccccgtccagccccatcaccacgcccccatccagccccatcaccacgcccccgtccagccccatcaccacgcccccccgtccagccccatcaccacatcccccgtccagccccatcaccacgcccccgtccagccccatcaccacgcccccccgtccagccccatcaccacatcccccgtctagccccagccctgccgggccctcagatgctgaccaccgctttccagtcccccagctccttccctcctcccaccttgtgctcttggcccgtggaggcaccgcaggctgtcttggcccgtggaggcaccacaggttgttggaagctgcaccgtggtccgagtggccggcccgaggcctcactctgccggtgtcgagaactgcacgttgccgcccctgaggttgcactgcccccgtctgtccctatgcccctaaccacacatccctaaagcttcccttcattaacatctttactgttgagcccagtagggtgaactttctttcttgtggggtgtggcggacacgggactcttccaaaaaatatttaggatgcaaagctggcaagagacggtgattgacgggtgattggccggtgattgatgggtgattgacgggtgggctgggacagcggctgattcccagtccccaggcaggcagggccttcatagggacagaatgccagccggtgcgtggtggcatgttggggagagccacgatggacacgtggagttcagtggccccaggacagccaggtggggctcacagttggggttaaagcctgagaggcagagtgggggctatgcagaagcagtttgaggggatgacagaggcgggagaaatagaaatagaactggggtctcctgggagccagacgaagagacgtggtgtctggagggaaggaccaacaacaccagagctgcccctacgaacccaacttcgtttccccaaagagtggatgccctgaccttcaggtcggccaggtggggcccccaccagagagagagagctccggaagacgaggaggactggggcccccaccagagagagctccggaggacggggaggactggacactgaggccactgggggccctgatggccccccgggaagggtgtgtggtgtgtgtgtaatgggtatagggagggccccgggaagtgtgtgttgtgtgtgtaatgggtatagggagggccccgggaagggggtgtggcgtgtgtgtaatgggtatagggagggccccgggaagggggtgtggcgtgtgtgtaatgggtatagggagggccccgggaagggggtgtggcgtgtgtgtaatgggtatagggagggccccgggaagggggtgtggtgtgtgtgtaatgggtatagggagggccccgggaagggtgtgtggcgtgtgtgtaatgggtatagggagggccccgggaagggggtgtggtgtgtgtgtaatgggtatagggagggccccgggaagggggtgtggcgtgtgtgtaatgggtatagggagggccccgggaagggggtgtggcgtgtgtgtaatgggtatagggagggcccctggaagggggtgtgttgtgtgtgtaatgggtatagggagggccccgggaagggggtgtgttgtgtgtgtaatgggtatagggagggcccctggaagggggtgtggcgtgtgtgtaatgggtatagggggggctccgggaagggtgtgtgttgtgtgtgtaatgggtatagggagggccccgggaagggggtgtggcgtgtgtgtaatgggtatagggagggcccctggaagggggtgtggcgtgtgtgtaatgggtatagggaaggccccgggaagggggtgtgttgtgtgtgtaatgggtatagggagggcccctggaagggtgtgtggcgtgtgtgtaatgggtatagggagggctccgggaagtgtgtgtgttgtgtgtgtaatgggtatagggagggccccgggaagggggtgtggcgtgtgtgtaatgggtatagggagggcccctggaagggggtgtggcgtgtgtgtaatgggtatagggaaggccccgggaagggggtgtgttgtgtgtgtannnnnnnnnnnnnnnnnnnnnnnnnnnnnnnnnnnnnnnnnnnnnnnnnnnnnnnnnnnnnnnnnnnnnnnnnnnnnnnnnnnnnnnnnnnnnnnnnnnnnnnnnnnnnnnnnnnnnnnnnnnnnnnnnnnnnnnnnnnnnnnnnnnnnnnnnnnnnnnnnnnnnnnnnnnnnnnnnnnnnnnnnnnnnnnnnnnnnnnnnnnnnnnnnnnnnnnnnnnnnnnnnnnnnnnnnnnnnnnnnnnnnnnnnnnnnnnnnnnnnnnnnnnnnnnnnnnnnnnnnnnnnnnnnnnnnnnnnnnnnnnnnnnnnnnnnnnnnnnnnnnnnnnnnnnnnnnnnnnnnnnnnnnnnnnnnnnnnnnnnnnnnnnnnnnnnnnnnnnnnnnnnnnnnnnnnnnnnnnnnnnnnnnnnnnnnnnnnnnnnnnnnnnnnnnnnnnnnnnnnnnnnnnnnnnnnnnnnnnnnnnnnnnnnnnnnnnnnnnnnnnnnnnnnnnnnnnnnnnnnnnnnnnnnnnnnnnnnnnnnnnnnnnnnnnnnnnnnnnnnnnnnnnnnnnnnnnnnnnnnnnnnnnnnnnnnnnnnnnnnnnnnnnnnnnnnnnnnnnnnnnnnnnnnnnnnnnnnnnnnnnnnnnnnnnnnnnnnnnnnnnnnnnnnnnnnnnnnnnnnnnnnnnnnnnnnnnnnnnnnnnnnnnnnnnnnnnnnnnnnnnnnnnnnnnnnnnnnnnnnnnnnnnnnnnnnnnnnnnnnnnnnnnnnnnnnnnnnnnnnnnnnnnnnnnnnnnnnnnnnnnnnnnnnnnnnnnnnnnnnnnnnnnnnnnnnnnnnnnnnnnnnnnnnnnnnnnnnnnnnnnnnnnnnnnnnnnnnnnnnnnnnnnnnnnnnnnnnnnnnnnnnnnnnnnnnnnnnnnnnnnnnnnnnnnnnnnnnnnnnnnnnnnnnnnnnnnnnnnnnnnnnnnnnnnnnnnnnnnnnnnnnnnnnnnnnnnnnnnnnnnnnnnnnnnnnnnnnnnnnnnnnnnnnnnnnnnnnnnnnnnnnnnnnnnnnnnnnnnnnnnnnnnnnnnnnnnnnnnnnnnnnnnnnnnnnnnnnnnnnnnnnnnnnnnnnnnnnnnnnnnnnnnnnnnnnnnnnnnnnnnnnnnnnnnnnnnnnnnnnnnnnnnnnnnnnnnnnnnnnnnnnnnnnnnnnnnnnnnnnnnnnnnnnnnnnnnnnnnnnnnnnnnnnnnnnnnnnnnnnnnnnnnnnnnnnnnnnnnnnnnnnnnnnnnnnnnnnnnnnnnnnnnnnnnnnnnnatgccagccggtgcgtggtggcatgttggggagagccacgatggacacgtggagttcagtggccccaggacagccaggtggggctcacagttggggttaaagcctgagaggcagagtgggggctatgcagaagcagtttgaggggatgacagaggcgggagaaatagaaatagaactggggtctcctgggagccagacgaagagacgtggtgtctggagggaaggaccaacaacaccagagctgcccctacgaacccaacttcgtttccccaaagagtggatgccctgaccttcaggtcggccaggtggggcccccaccagagagagagagctccggaagacgaggaggactggggcccccaccagagagagctccggaggacggggaggactggacactgaggccactgggggccctgatggccccccgggaagggtgtgtggtgtgtgtgtaatgggtatagggagggccccgggaagtgtgtgttgtgtgtgtaatgggtatagggagggccccgggaagggggtgtggcgtgtgtgtaatgggtatagggagggccccgggaagggtgtgtggcgtgtgtgtaatgggtatagggagggccccgggaagggggtgtggcgtgtgtgtaatgggtatagggaggcccccggaaagggtgtgtggtgtgtgtgtaatgggtatagggagggccccggaaagggtgtgtgttgtgtgtgtaatgggtatagggagggccccgggaagggggtgtggtgtgtgtgtaatgggtatagggagggccccggaaagggggtgtggtgtgtgtgtaatgggtatagggagggccccgggaagggtgtgtggcgtgtgtgtaatgggtatagggagggccccggaaagggtgtgtgttgtgtgtgtaatgggtatagggagggccctgggaagggggtgtgttgtgtgtttaatgggtatagggagggccccgggaagggggtgtgttgtgtgtgtaatgggtatagggagggccccgggaagggggtgtggcgtgtgtgtaatggggatagggaggtccctgggaagggggtgtggcgtgtgtgtaatgggtatagggagggccccgggaagggggtgtggcgtgtgtgtaatgggtatagggaggtccccaggaagggggtgtggcgtgtgtgtaatgggtatagggagggcccctgtaagggtgtgtggcgtgtgtgtaatgggtatagggagggccccgggaaggtggtgtggcgtgtgtgtaatgggtatagggagggccccgggaagggtgtgtggcgtgtgtgtaatgggtatagggagggcccctggaagggtgtgtggtgtgtgtgtaatgggtatagggagggccccgggaagggggtgtggcgtgtgtgtaatgggtatagggagggccccgggaagggggtgtgttgtgtgtgtaatgggtatagggagggccctgggaagggtgtgtgttgtgtgtgtaatgggtatagggagggccccgggaagtgtgtgttgtgtgtgtaatgggtatagggagggccccgggaagggtgtgtgttgtgtgtgtaatgggtatagggaaggccccgggaagggggtgtggcgtgtgtgtaatggggatagggagggccccgggaagggtgtgttgtgtgtttaatgggtatagggagggccccgggaagtgtgtgttgtgtgtgtaatgggtatagggagggccccgggaagggggcgtggcgtgtgtgtaaatgggtatagggagggccccgggaagggggcgtggcgtgtgtgtaatgggtatagggagggccccgggaagggggtgtggcgtgtgtgtaatgggtatagggagggccccgggaagggtgtgtggtgtgtgtgtaatgggtatagggacggccctgggaagggggtgtggtgtgtgtgtaatgggtatagggacggccttgggaagggtgtgtggcatgtgtgtaaacatgtatagatcatactgcacattccaattctgctggtgatcaggttctggtaacttcccaggaaacagaagggttccagcaagataaggtaaattataaacagaataaaagaggaagaaaaacacggcagagagtgaagaggagcaggtccgaggcccatagagcacagccgagccccggggccacgcacggagcccacagccgagccccggggccacgcacggagcccacagctgagccctggggccacgccaggcccacagcagcactgccagcgactggagtgagtgccgcccggggtccgagctgggcacggctattcttgctccgttctgagggctggttctgaggccatgtctgcgctgaacaagtggaggctggaagccaaagggtccctttcaccagccacctggccagcatggggtgtacagtggggtctccctgcagccctggagtctgccggccagaggccagagccgggccggggctacagggaggggcacggtgacccccagcccgatggcggcgcctgacttggtcatattccagatccctgacctgtagggcgaccaccccactcaaccccgccatttagagaggagattcctctcaagcaacgtcccctaaatacgcttgttctcagtggagcaactgttgaatattaaacagcaatgatttaagaccacacatcctgataggccccaaggggagcagttctataaactgcccaaggactgtggatcttcctgtgtttagagcrgcgggcctgggttggggagccactcttcacctctgatcactcctctccccagacaccagacagcctagcagctcccaggcaggcggctgcctgaggccaggcccctcacaagaaatgattcccctctctctgcatctctctctgtggtctgtctctctgtgtcactctatactccttgtgtctgtctctctttgtctctctcagtctttctgtgtctctttatctctgtctctgcatctgtctctgcctcccagtctctgcctcattctctccatgtctctgtctctgtctctcccagtctttttgtctctctgtgtctctttgtctcagtctgtctgtatctctgtctctttgtctctctgtctctctctgtctctgactctgtctctgactctgtctctctgtctctcagtctctcagtgtgtgtgtctctctctgtctctctgtgtctctgtctctgtgtctctctgtctctgactgtctctgactctgtctctctgtatctcagtctctcagtgtgtgtgtctctctctgtctctctgtatctctgtctctttgtctctctgtctctctctgcctctctgtctctgactctgtctctctgtctctcagtctctcagtgtgtgtctctctttctgtctctgtgtctctgtctctgtgtgtctctctctctgtctctgactctgtctctgactctgtctctctgtctctcagtctctcagtgtgtgtctctctctgtctctctgtgtctctgtctctgtgtctctctgtctctcagtctctcagtgtatgtgtctctttctctgtctctgtgtctctctgtctctctctctgcctgtcccccacccccacacagctcctgggttctgacagatgtcaatgctgtgtggcccccacccccacatgaagataaaaaattctccctcatcctgaaaagtacccccgttctcttctaagctttctgattatttcaagaggaaaatctaggccaggttctagagcacctctgatgctgaacagtctcacctttcgagcggccatcagacgacaaagccttccagactgtggtatccaaccactttaactgcggtgtgtatcttattgtatttatttgtacagttatctctcatttttggcaagagataatggtcctctcctaaggcagtgataaagagtttcctgttaaaattcatgcagttatcctttgggtggatttaaagacgtgtgttaggtaaatggtagcacgtccctgggcgggtggcctgcagatgagggggcggaggaatcaggctgtcattctcctggcccctcccacagccctggggaggagctgaggcccagagaggctgagtgacctgcccagggccacgcagcagatggatgtgagactcacactcaggcctgcccaccttcgccttccactggcccaggtgcaggtcagccaggccaggagtccccatccctagggcagcccctccccatgccacggccccgccctctggcctgtcctgggcatctgcaaaaccgtggtctctctggcaccagcagtggcacaatgtccaggagaccttgacaccatgtcgcccctgcggctgctgccccggcctccactcccccttacaggaagccgtagtagggttatgagtgcgccgtctccacgtccccctgcccggcccctcctgaagccccccatccagctctgtccccctcgccagtgaccccagagctacctgcaaaggggagtcctcggtctccgccgtgagggacccagcagccggccgtgtccctcatgggctctgggatgacgccccctctctcccctctctcctgggtcctgggcagcccctgcccgcgtccttagccttggaagcatcagccaggctcgttgctgtaaggtcatgactatgtccttcaagccaccgagctgtggaattcgtggcggacggcagccacaggaaacacacgtgacctccacctgaccttggctcacccactgcagagtccttgcctggctccccgtctgctggggtcacagatgtttcctgagggcctgggtctaggccgcacgctggggagaggtagaggccctgaagctggagggcagcaggggcaggcctggcacgggggtccctcatgcagaggttttgggtcacatgccacagatggagggttccaccccccaacctccaccgcaggcctggcagatgcctgtccgctcgggtcaagcgctgtcccgggcttgcttccatgccacgtggtgaggctgcgtcaggccccaccaattctgcacaggtggccccgaactgagcacatatttcctttgcctgagcagaagggaggggaccccatcccccacccacgaaccaccacactgggcatctcctgcagaggcagctgtgggcaggtgtgtggtgtgagcaggtgtgtggtgtgagcagttactggcaggtgttagcaggtgtgagcaggtatatgcagttgtgagtaggcgtaggtaggtacaggcagctgtatgcaggtgtcagcaggtgtgggcagctgtgtgcaggtgtaaacaggtatgggcaggtgtgagcagcagtgaacaggtaaaagcaggtgtcagaaggtgtaggcaggtgtttgggcaggtgtgagcacctgtgtacggtataagcagatgtcagaaggtgtaggcaggtgcaggcagctgtgagcaggtttgggcaggtgtgagcagctgtgaactggtgtggatgggtgtgagcaggtgtgkacaggtatgaacaggtgtggacgggtgtgatcaggtggcctggggcagctgagggtacacggcagatacaggagctccacgtgaaggcagccagactccaggtcaggacacagccaaccagccctgggtcccacactgcctgcacagcctcagcagccacagtcccgagagacctggccgctccacactggggtcagggcagccctgggctccctgagagatggaggagaagtccagtggagaagaggacctgggcggaatcccatgggccatggagcacccggagagatccaggatacgagggttaccagattggatgaggataagaacagctgtggggcctgcgggaggaagccaggctgtgggaggccacacgaccagcacccacatggctttcccatcccgatgccacaaagaccacagccaaaccaaccctgggaaaacgggcatgaggggccgccatgcccaggatagaccacagggatcaccactgacttgaaattgggggcacagcaagacttagacacgggagacccccaggaggcgtggctggccgaggccaggcttgatgccccgaaaccttacaccttgcgaggctgggcgatcttcgggatggctttggttttcgctgattattttaaccaggtacagataagggtggactcttgaaggaaatcaaagtgcaagtttggagcttgaaaggaaagatagaagaaaggaaagaaggtgggaaggaaggaaggggaaagggctgggggagggagagacgccatccccccacgtctgtgatgattttgcagagctgactccctggcagccgtgatgacaggtgctatggggcctcagggagctccgcagacgctgtggggtcttcccctccggttccgaggccccctccagagacaccaggcctggagcccgcagcccccacactggatgtggctcccttggccccgacccaggcccaccgcgacccccactccagggccatggcccccacccgctccccgccagccgcctgtcggggctgtcattgctgatttattcacgagatcgatgcctgggggagggaggctggcatttgcttgtayttgaaaggcccgtctgaccttgaactccagcccaggggatcttctgccctgtcccgagggttgaactccagcccgggggaccctcctgccctgtcccgagggttgaactccagcccgggggaccctcctgccctgtcccgagggttgaactccagcccgggggaccctcctgccctgtcccgagggttgaactccagcccgggggaccctcctgccctgtcccgagggttgaactccagcccgggggaccctcctgccctgtcccgagggttgaactccagcccgggggaccctcctgccctgtcccgagggttgaactccagcccgggggaccctcctgccctgtcccgagggttgaactccagcccgggggaccctcctgccctgtcccgagggttgaactccagcccgggggaccctcctgccctgtcccgagggttgaactaccagcccgggggaccctcctgnnnnnnnnnnnnnnnnnnnnnnnnnnnnnnnnnnnnnnnnnnnnnnnnnnnnnnnnnnnnnnnnnnnnnnnnnnnnnnnnnnnnnnnnnnnnnnnnnnnnnnnnnnnnnnnnnnnnnnnnnnnnnnnnnnnnnnnnnnnnnnnnnnnnnnnnnnnnnnnnnnnnnnnnnnnnnnnnnnnnnnnnnnnnnnnnnnnnnnnnnnnnnnnnnnnnnnnnnnnnnnnnnnnnnnnnnnnnnnnnnnnnnnnnnnnnnnnnnnnnnnnnnnnnnnnnnnnnnnnnnnnnnnnnnnnnnnnnnnnnnnnnnnnnnnnnnnnnnnnnnnnnnnnnnnnnnnnnnnnnnnnnnnnnnnnnnnnnnnnnnnnnnnnnnnnnnnnnnnnnnnnnnnnnnnnnnnnnnnnnnnnnnnnnnnnnnnnnnnnnnnnnnnnnnnnnnnnnnnnnnnnnnnnnnnnnnnnnnnnnnnnnnnnnnnnnnnnnnnnnnnnnnnnnnnnnnnnnnnnnnnnnnnnnnnnnnnnnnnnnnnnnnnnnnnnnnnnnnnnnnnnnnnnnnnnnnnnnnnnnnnnnnnnnnnnnnnnnnnnnnnnnnnnnnnnnnnnnnnnnnnnnnnnnnnnnnnnnnnnnnnnnnnnnnnnnnnnnnnnnnnnnnnnnnnnnnnnnnnnnnnnnnnnnnnnnnnnnnnnnnnnnnnnnnnnnnnnnnnnnnnnnnnnnnnnnnnnnnnnnnnnnnnnnnnnnnnnnnnnnnnnnnnnnnnnnnnnnnnnnnnnnnnnnnnnnnnnnnnnnnnnnnnnnnnnnnnnnnnnnnnnnnnnnnnnnnnnnnnnnnnnnnnnnnnnnnnnnnnnnnnnnnnnnnnnnnnnnnnnnnnnnnnnnnnnnnnnnnnnnnnnnnnnnnnnnnnnnnnnnnnnnnnnnnnnnnnnnnnnnnnnnnnnnnnnnnnnnnnnnnnnnnnnnnnnnnnnnnnnnnnnnnnnnnnnnnnnnnnnnnnnnnnnnnnnnnnnnnnnnnnnnnnnnnnnnnnnnnnnnnnnnnnnnnnnnnnnnnnnnnnnnnnnnnnnnnnnnnnnnnnnnnnnnnnnnnnnnnnnnnnnnnnnnnnnnnnnnnnnnnnnnnnnnnnnnnnnnnnnnnnnnnnnnnnnnnnnnnnnnnnnnnnnnnnnnnnnnnnnnnnnnnnnnnnnnnnnnnnnnnnnnnnnnnnnnnnnnnnnnnnnnnnnnnnnnnnnnnnnnnnnnnnnnnnnnnnnnnnnnnnnnnnnnnnnnnnnnnnnnnnnnnnnnnnnnnnnnnnnnnnnnnnnnnnnnnnnnnnnnnnnnnnnnnnnnnnnnnnnnnnnnnnnnnnnnnnnnnnnnnnnnnnnnnnnnnnnnnnnnnnnnnnnnnnnnnnnnnnnnnnnnnnnnnnnnnnnnnnnnnnnnnnnnnnnnnnnnnnnnnnnnnnnnnnnnnnnnnnnnnnnnnnnnnnnnnnnnnnnnnnnnnnnnnnnnnnnnnnnnnnnnnnnnnnnnnnnnnnnnnnnnnnnnnnnnnnnnnnnnnnnnnnnnnnnnnnnnnnnnnnnnnnnnnnnnnnnnnnnnnnnnnnnnnnnnnnnnnnnnnnnnnnnnnnnnnnnnnnnnnnnnnnnnnnnnnnnnnnnnnnnnnnnnnnnnnnnnnnnnnnnnnnnnnnnnnnnnnnnnnnnnnnnnnnnnnnnnnnnnnnnnnnnnnnnnnnnnnnnnnnnnnnnnnnnnnnnnnnnnnnnnnnnnnnnnnnnnnnnnnnnnnnnnnnnnnnnnnnnnnnnnnnnnnnnnnnnnnnnnnnnnnnnnnnnnnnnnnnnnnnnnnnnnnnnnnnnnnnnnnnnnnnnnnnnnnnnnnnnnnnnnnnnnnnnnnnnnnnnnnnnnnnnnnnnnnnnnnnnnnnnnnnnnnnnnnnnnnnnnnnnnnnnnnnnnnnnnnnnnnnnnnnnnnnnnnnnnnnnnnnnnnnnnnnnnnnnnnnnnnnnnnnnnnnnnnnnnnnnnnnnnnnnnnnnnnnnnnnnnnnnnnnnnnnnnnnnnnnnnnnnnnnnnnnnnnnnnnnnnnnnnnnnnnnnnnnnnnnnnnnnnnnnnnnnnnnnnnnnnnnnnnnnnnnnnnnnnnnnnnnnnnnnnnnnnnnnnnnnnnnnnnnnnnnnnnnnnnnnnnnnnnnnnnnnnnnnnnnnnnnnnnnnnnnnnnnnnnnnnnnnnnnnnnnnnnnnnnnnnnnnnnnnnnnnnnnnnnnnnnnnnnnnnnnnnnnnnnnnnnnnnnnnnnnnnnnnnnnnnnnnnnnnnnnnnnnnnnnnnnnnnnnnnnnnnnnnnnnnnnnnnnnnnnnnnnnnnnnnnnnnnnnnnnnnnnnnnnnnnnnnnnnnnnnnnnnnnnnnnnnnnnnnnnnnnnnnnnnnnnnnnnnnnnnnnnnnnnnnnnnnnnnnnnnnnnnnnnnnnnnnnnnnnnnnnnnnnnnnnnnnnnnnnnnnnnnnnnnnnnnnnnnnnnnnnnnnnnnnnnnnnnnnnnnnnnnnnnnnnnnnnnnnnnnnnnnnnnnnnnnnnnnnnnnnnnnnnnnnnnnnnnnnnnnnnnnnnnnnnnnnnnnnnnnnnnnnnnnnnnnnnnnnnnnnnnnnnnnnnnnnnnnnnnnnnnnnnnnnnnnnnnnnnnnnnnnnnnnnnnnnnnnnnnnnnnnnnnnnnnnnnnnnnnnnnnnnnnnnnnnnnnnnnnnnnnnnnnnnnnnnnnnnnnnnnnnnnnnnnnnnnnnnnnnnnnnnnnnnnnnnnnnnnnnnnnnnnnnnnnnnnnnnnnnnnnnnnnnnnnnnnnnnnnnnnnnnnnnnnnnnnnnnnnnnnnnnnnnnnnnnnnnnnnnnnnnnnnnnnnnnnnnnnnnnnnnnnnnnnnnnnnnnnnnnnnnnnnnnnnnnnnnnnnnnnnnnnnnnnnnnnnnnnnnnnnnnnnnnnnnnnnnnnnnnnnnnnnnnnnnnnnnnnnnnnnnnnnnnnnnnnnntggcactaggggctccacgctgtctcctctgtcgccccatcgagtgtgtggcactagggactccacgctgtctcctctgtcgccccatcgagtgtgtggcactagggactccacgctgtctcctctgtcgccccatcgagtgtgtggcactaggggctccacgctgtctcctctgtcgccccatcgagtgtgtggcactaggggctccacgctgtctcctctgtcgccccatggagtgtgtggcagtaggggctccacgctgtctcctctgtcgccccatcgagtgtgtggcactagggactccacgctgtctcctctgtcgccccatcgagtgtgtggcactagggactccacgctgtctcctctgtcactccatcgagtgtgtggcactagggtgagtctctgtcactacttttccagtgcccagaagagtgtgaggctcagcagagtctcaccaagacgtcccgaatggaggttgggagccctgcagtggcctgcggtgtggtctgcctgtaatgagctcaagggaggctgaaacaccaacaaaataaatcgatccattaacccggactgttaccccgttaacacatacctcagcctccagtgtggctatcacacgtcagccagcccctccctgccaaaatatgccgtgtcccagctacaggaggaccgggcctcacccttctgatttaagggctgcggggaaggggtcctgcccgggcagccttctcatccactccgtgaggacttccccgccacgagggccaggtggcgcggccttggcagtggacagattaacaggactcccccgccacgagggccaggcagcgtggccttggcagtggacggattaaagggctccccagcccgcgtgggttatggggctttttctatgcccgtcgatctggcagcgaacgccaggtgcccgtagacccaccaaacccccctgcagttggtttgtaccccagctccttttgccttgtagcagatcaccccataatttagtggcttaaagtgactgtttcattttgttcacaatcttgtgggtcaggaactcgggaaggcggatgctgtcctgtgtggcggcccccatcacaaggctcacaggcaggacgtccagcaaggggcacgcacacacatggcagggggtgcgtggactccggagggttcagctggggcaggtggctgtgcgcggcctctccacagctgggcttcctggtggtatgtgaattttggtggcccaggctggaattacgatgccctctgtgccccaccttggatgacccggtggcgactgttgatggatgcagccacacgcctgcccaggttcaagggggcggcaccgggacccaggtcggcctggcagaagggtccgggaatgtgcattctttgtgtatttcactgttctttgcttgttcagcagagtgaggtggctgagattggggctgagagcctgtgactccaccaccgacggacggtgaccttgggcaagctcctagcttctcacagccccggcttcctcatcggagaaaggattcctttattaggattaaatcagtgaacacctgtggtgccctgaaycccgtamctggcactgagttggtgcttcacagatgccggtgaccatgatttctttctcgcctgggactcagggagaggctggtggcttcccagctaagcttgccaaccatgccggccgtgtggcccgagaagggtggggacggccccgctgaggcacaggcggcctctctcccagccccatccccgtcacgcgtgctcatgagagcaggacttactgcggggctgtgcctgcgagtgtggccctggggcctgccgcggggtgtggtcggtgtctggggcattagtgaatgarcagataagtcatctggatagtctctccataaagtgctcgtgccagggcaggacgggtggggcgtcaaagggaarcgagttattcattggctgaacagactcctgagtgagctcaggtgctggaggctgctctgggttcaggttccacagagagcaaagcagacaaagcgtgcgcctcgtggggcttgcctctggtgacccagggcgagatggggcgtgggctccacctgcggtggagaggcctaagtggggagaagaccagggaacggtgcacggagcggccacctgtgagccaggatggaggagcagaggcagctgcagggaacagtgttccagcagagggattggcaagggcaaaggctctgccgccctgagactggtacgtgtccaggggagggcggccccctgccccatgcactggcacaggtgtgtgccccaggaccacgtggccatgtgttctgcccctggctcctgtgcacccgtgtctaacccgtccacaccggcggcctctctgatcaattcagcccaattagaggagtaattctcccgtcttggggccaatttacatttctgcgacggtagaaatgccagctgctcatcttctaatgaggaaagtcctagagccagttagaggaaaatgagtccatcgcgtctattaggcttaataaaggtcaggacggaatcaagtgtgagagtcgggccaggaaagccatctgcagagcggaagttggaaatcgtttgctctctgtcttgaaacgctcggacatgctgctcctcgggtgttacaggaaaacctcctcttgcacacggaaggcacctcctggaccctcgagaccccactccgctggggggctgtgtgagcatcagaacgtctggggccgggggggtggcttttgcaattctccaagggggtgggttcatcaagatcctgttaataagccctgtctcgccagaggcaaagaggtgtcacccttcctctggggagggagcgaggaggtgctgackggccgccctgtcttgccagaggcaaagaggtatcacccttcctctggggagggagcgaggaggtgctgacgggccgccctgcctcgccagaggcaaagaggtatcacccttcctctggggagggagcgaggaggtgctgacgggccgccccgccacccacactcagggaaagggagtgccggggtcagagggacgctggggagggacgccggggagggatgcaggtgtcagagggacgccggggagggacgcgggggtgtctcctttctgcatgagtggagggcagagggagaggctggagagagactgaagccctgttcttgttctctagagctgctttgtccaagggcttgttccagccacaggtggttggtgcccccccgccacccctgctggggcggcacatggcgtcctcaccaagtctggcaccgccactccccagcagaccacagagcaggctgtagctacaagacgggccactcacctgcccacagcccctgctcaacctcagcaggtcaaccaggcctccaggctgcagggaggagacagatggggaaaccgaggctcagagcaagaaggtgtggggacggggaggtctctgtccatttgcacatccctgtggggaagccccgctgagcacgaggggtcttcagaagacccctccacgttgcctttggaccctgcctctgcccattaaccagcggggctgcctccgtaccctgagcctccgtttccccatctgtcactaaggatgacaatacgactacacccctggggctctttcaggattaaacgcagtggggctctcagtgcctgggatacagcaagcatgctaattttcatcacgtgcagacattccttaaacaccagttttcttttctttagaaaagctgttttagatgtaaaagcactggatataagttaactagaacaaaataaaaatcacccacaattctgcctctgtctgggccgagacgtgcacctcgctggagcccgtctgcgtctgtcagactctgtctgtggtgcgtgcgtgtgcctgggtgtaacgcggcctgaggtgttgctttcacaggcacacgcttcggagggagctgcggccagcagggtcggggagctgggccggggagagggtcgcaggcctttgtccgtgcaatgcacttccccacacgcgttcggggacggcaccatgcacagctgcacgctggtgccccggggttctgctgacgagctggggagccatttcggtgcctccgttccatctggcacagaaacgattcttcctgtatgctgagtctctcctcatgccctagccatttcctcaggctgaatttctagaagcgaaattactgactcaggaaacgcannnnnnnnnnnnnnnnnnnnnnnnnnnnnnnnnnnnnnnnnnnnnnnnnnnnnnnnnnnnnnnnnnnnnnnnnnnnnnnnnnnnnnnnnnnnnnnnnnnnnnnnnnnnnnnnnnnnnnnnnnnnnnnnnnnnnnnnnnnnnnnnnnnnnnnnnnnnnnnnnnnnnnnnnnnnnnnnnnnnnnnnnnnnnnnnnnnnnnnnnnnnnnnnnnnnnnnnnnnnnnnnnnnnnnnnnnnnnnnnnnnnnnnnnnnnnnnnnnnnnnnnnnnnnnnnnnnnnnnnnnnnnnnnnnnnnnnnnnnnnnnnnnnnnnnnnnnnnnnnnnnnnnnnnnnnnnnnnnnnnnnnnnnnnnnnnnnnnnnnnnnnnnnnnnnnnnnnnnnnnnnnnnnnnnnnnnnnnnnnnnnnnnnnnnnnnnnnnnnnnnnnnnnnnnnnnnnnnnnnnnnnnnnnnnnnnnnnnnnnnnnnnnnnnnnnnnnnnnnnnnnnnnnnnnnnnnnnnnnnnnnnnnnnnnnnnnnnnnnnnnnnnnnnnnnnnnnnnnnnnnnnnnnnnnnnnnnnnnnnnnnnnnnnnnnnnnnnnnnnnnnnnnnnnnnnnnnnnnnnnnnnnnnnnnnnnnnnnnnnnnnnnnnnnnnnnnnnnnnnnnnnnnnnnnnnnnnnnnnnnnnnnnnnnnnnnnnnnnnnnnnnnnnnnnnnnnnnnnnnnnnnnnnnnnnnnnnnnnnnnnnnnnnnnnnnnnnnnnnnnnnnnnnnnnnnnnnnnnnnnnnnnnnnnnnnnnnnnnnnnnnnnnnnnnnnnnnnnnnnnnnnnnnnnnnnnnnnnnnnnnnnnnnnnnnnnnnnnnnnnnnnnnnnnnnnnnnnnnnnnnnnnnnnnnnnnnnnnnnnnnnnnnnnnnnnnnnnnnnnnnnnnnnnnnnnnnnnnnnnnnnnnnnnnnnnnnnnnnnnnnnnnnnnnnnnnnnnnnnnnnnnnnnnnnnnnnnnnnnnnnnnnnnnnnnnnnnnnnnnnnnnnnnnnnnnnnnnnnnnnnnnnnnnnnnnnnnnnnnnnnnnnnnnnnnnnnnnnnnnnnnnnnnnnnnnnnnnnnnnnnnnnnnnnnnnnnnnnnnnnnnnnnnnnnnnnnnnnnnnnnnnnnnnnnnnnnnnnnnnnnnnnnnnnnnnnnnnnnnnnnnnnnnnnnnnnnnnnnnnnnnnnnnnnnnnnnnnnnnnnnnnnnnnnnnnnnnnnnnnnnnnnnnnnnnnnnnnnnnnnnnnnnnnnnnnnnnnnnnnnnnnnnnnnnnnnnnnnnnnnnnnnnnnnnnnnnnnnnnnnnnnnnnnnnnnnnnnnnnnnnnnnnnnnnnnnnnnnnnnnnnnnnnnnnnnnnnnnnnnnnnnnnnnnnnnnnnnnnnnnnnnnnnnnnnnnnnnnnnnnnnnnnnnnnnnnnnnnnnnnnnnnnnnnnnnnnnnnnnnnnnnnnnnnnnnnnnnnnnnnnnnnnnnnnnnnnnnnnnnnnnnnnnnnnnnnnnnnnnnnnnnnnnnnnnnnnnnnnnnnnnnnnnnnnnnnnnnnnnnnnnnnnnnnnnnnnnnnnnnnnnnnnnnnnnnnnnnnnnnnnnnnnnnnnnnnnnnnnnnnnnnnnnnnnnnnnnnnnnnnnnnnnnnnnnnnnnnnnnnnnnnnnnnnnnnnnnnnnnnnnnnnnnnnnnnnnnnnnnnnnnnnnnnnnnnnnnnnnnnnnnnnnnnnnnnnnnnnnnnnnnnnnnnnnnnnnnnnnnnnnnnnnnnnnnnnnnnnnnnnnnnnnnnnnnnnnnnnnnnnnnnnnnnnnnnnnnnnnnnnnnnnnnnnnnnnnnnnnnnnnnnnnnnnnnnnnnnnnnnnnnnnnnnnnnnnnnnnnnnnnnnnnnnnnnnnnnnnnnnnnnnnnnnnnnnnnnnnnnnnnnnnnnnnnnnnnnnnnnnnnnnnnnnnnnnnnnnnnnnnnnnnnnnnnnnnnnnnnnnnnnnnnnnnnnnnnnnnnnnnnnnnnnnnnnnnnnnnnnnnnnnnnnnnnnnnnnnnnnnnnnnnnnnnnnnnnnnnnnnnnnnnnnnnnnnnnnnnnnnnnnnnnnnnnnnnnnnnnnnnnnnnnnnnnnnnnnnnnnnnnnnnnnnnnnnnnnnnnnnnnnnnnnnnnnnnnnnnnnnnnnnnnnnnnnnnnnnnnnnnnnnnnnnnnnnnnnnnnnnnnnnnnnnnnnnnnnnnnnnnnnnnnnnnnnnnnnnnnnnnnnnnnnnnnnnnnnnnnnnnnnnnnnnnnnnnnnnnnnnnnnnnnnnnnnnnnnnnnnnnnnnnnnnnnnnnnnnnnnnnnnnnnnnnnnnnnnnnnnnnnnnnnnnnnnnnnnnnnnnnnnnnnnnnnnnnnnnnnnnnnnnnnnnnnnnnnnnnnnnnnnnnnnnnnnnnnnnnnnnnnnnnnnnnnnnnnnnnnnnnnnnnnnnnnnnnnnnnnnnnnnnnnnnnnnnnnnnnnnnnnnnnnnnnnnnnnnnnnnnnnnnnnnnnnnnnnnnnnnnnnnnnnnnnnnnnnnnnnnnnnnnnnnnnnnnnnnnnnnnnnnnnnnnnnnnnnnnnnnnnnnnnnnnnnnnnnnnnnnnnnnnnnnnnnnnnnnnnnnnnnnnnnnnnnnnnnnnnnnnnnnnnnnnnnnnnnnnnnnnnnnnnnnnnnnnnnnnnnnnnnnnnnnnnnnnnnnnnnnnnnnnnnnnnnnnnnnnnnnnnnnnnnnnnnnnnnnnnnnnnnnnnnnnnnnnnnnnnnnnnnnnnnnnnnnnnnnnnnnnnnnnnnnnnnnnnnnnnnnnnnnnnnnnnnnnnnnnnnnnnnnnnnnnnnnnnnnnnnnnnnnnnnnnnnnnnnnnnnnnnnnnnnnnnnnnnnnnnnnnnnnnnnnnnnnnnnnnnnnnnnnnnnnnnnnnnnnnnnnnnnnnnnnnnnnnnnnnnnnnnnnnnnnnnnnnnnnnnnnnnnnnnnnnnnnnnnnnnnnnnnnnnnnnnnnnnnnnnnnnnnnnnnnnnnnnnnnnnnnnnnnnnnnnnnnnnnnnnnnnnnnnnnnnnnnnnnnnnnnnnnnnnnnnnnnnnnnnnnnnnnnnnnnnnnnnnnnnnnnnnnnnnnnnnnnnnnnnnnnnnnnnnnnnnnnnnnnnnnnnnnnnnnnnnnnnnnnnnnnnnnnnnnnnnnnnnnnnnnnnnnnnnnnnnnnnnnnnnnnnnnnnnnnnnnnnnnnnnnnnnnnnnnnnnnnnnnnnnnnnnnnnnnnnnnnnnnnnnnnnnnnnnnnnnnnnnnnnnnnnnnnnnnnnnnnnnnnnnnnnnnnnnnnnnnnnnnnnnnnnnnnnnnnnnnnnnnnnnnnnnnnnnnnnnnnnnnnnnnnnnnnnnnnnnnnnnnnnnnnnnnnnnnnnnnnnnnnnnnnnnnnnnnnnnnnnnnnnnnnnnnnnnnnnnnnnnnnnnnnnnnnnnnnnnnnnnnnnnnnnnnnnnnnnnnnnnnnnnnnnnnnnnnnnnnnnnnnnnnnnnnnnnnnnnnnnnnnnnnnnnnnnnnnnnnnnnnnnnnnnnnnnnnnnnnnnnnnnnnnnnnnnnnnnnnnnnnnnnnnnnnnnnnnnnnnnnnnnnnnnnnnnnnnnnnnnnnnnnnnnnnnnnnnnnnnnnnnnnnnnnnnnnnnnnnnnnnnnnnnnnnnnnnnnnnnnnnnnnnnnnnnnnnnnnnnnnnnnnnnnnnnnnnnnnnnnnnnnnnnnnnnnnnnnnnnnnnnnnnnnnnnnnnnnnnnnnnnnnnnnnnnnnnnnnnnnnnnnnnnnnnnnnnnnnnnnnnnnnnnnnnnnnnnnnnnnnnnnnnnnnnnnnnnnnnnnnnnnnnnnnnnnnnnnnnnnnnnnnnnnnnnnnnnnnnnnnnnnnnnnnnnnnnnnnnnnnnnnnnnnnnnnnnnnnnnnnnnnnnnnnnnnnnnnnnnnnnnnnnnnnnnnnnnnnnnnnnnnnnnnnnnnnnnnnnnnnnnnnnnnnnnnnnnnnnnnnnnnnnnnnnnnnnnnnnnnnnnnnnnnnnnnnnnnnnnnnnnnnnnnnnnnnnnnnnnnnnnnnnnnnnnnnnnnnnnnnnnnnnnnnnnnnnnnnnnnnnnnnnnnnnnnnnnnnnnnnnnnnnnnnnnnnnnnnnnnnnnnnnnnnnnnnnnnnnnnnnnnnnnnnnnnnnnnnnnnnnnnnnnnnnnnnnnnnnnnnnnnnnnnnnnnnnnnnnnnnnnnnnnnnnnnnnnnnnnnnnnnnnnnnnnnnnnnnnnnnnnnnnnnnnnnnnnnnnnnnnnnnnnnnnnnnnnnnnnnnnnnnnnnnnnnnnnnnnnnnnnnnnnnnnnnnnnnnnnnnnnnnnnnnnnnnnnnnnnnnnnnnnnnnnnnnnnnnnnnnnnnnnnnnnnnnnnnnnnnnnnnnnnnnnnnnnnnnnnnnnnnnnnnnnnnnnnnnnnnnnnnnnnnnnnnnnnnnnnnnnnnnnnnnnnnnnnnnnnnnnnnnnnnnnnnnnnnnnnnnnnnnnnnnnnnnnnnnnnnnnnnnnnnnnnnnnnnnnnnnnnnnnnnnnnnnnnnnnnnnnnnnnnnnnnnnnnnnnnnnnnnnnnnnnnnnnnnnnnnnnnnnnnnnnnnnnnnnnnnnnnnnnnnnnnnnnnnnnnnnnnnnnnnnnnnnnnnnnnnnnnnnnnnnnnnnnnnnnnnnnnnnnnnnnnnnnnnnnnnnnnnnnnnnnnnnnnnnnnnnnnnnnnnnnnnnnnnnnnnnnnnnnnnnnnnnnnnnnnnnnnnnnnnnnnnnnnnnnnnnnnnnnnnnnnnnnnnnnnnnnnnnnnnnnnnnnnnnnnnnnnnnnnnnnnnnnnnnnnnnnnnnnnnnnnnnnnnnnnnnnnnnnnnnnnnnnnnnnnnnnnnnnnnnnnnnnnnnnnnnnnnnnnnnnnnnnnnnnnnnnnnnnnnnnnnnnnnnnnnnnnnnnnnnnnnnnnnnnnnnnnnnnnnnnnnnnnnnnnnnnnnnnnnnnnnnnnnnnnnnnnnnnnnnnnnnnnnnnnnnnnnnnnnnnnnnnnnnnnnnnnnnnnnnnnnnnnnnnnnnnnnnnnnnnnnnnnnnnnnnnnnnnnnnnnnnnnnnnnnnnnnnnnnnnnnnnnnnnnnnnnnnnnnnnnnnnnnnnnnnnnnnnnnnnnnnnnnnnnnnnnnnnnnnnnnnnnnnnnnnnnnnnnnnnnnnnnnnnnnnnnnnnnnnnnnnnnnnnnnnnnnnnnnnnnnnnnnnnnnnnnnnnnnnnnnnnnnnnnnnnnnnnnnnnnnnnnnnnnnnnnnnnnnnnnnnnnnnnnnnnnnnnnnnnnnnnnnnnnnnnnnnnnnnnnnnnnnnnnnnnnnnnnnnnnnnnnnnnnnnnnnnnnnnnnnnnnnnnnnnnnnnnnnnnnnnnnnnnnnnnnnnnnnnnnnnnnnnnnnnnnnnnnnnnnnnnnnnnnnnnnnnnnnnnnnnnnnnnnnnnnnnnnnnnnnnnnnnnnnnnnnnnnnnnnnnnnnnnnnnnnnnnnnnnnnnnnnnnnnnnnnnnnnnnnnnnnnnnnnnnnnnnnnnnnnnnnnnnnnnnnnnnnnnnnnnnnnnnnnnnnnnnnnnnnnnnnnnnnnnnnnnnnnnnnnnnnnnnnnnnnnnnnnnnnnnnnnnnnnnnnnnnnnnnnnnnnnnnnnnnnnnnnnnnnnnnnnnnnnnnnnnnnnnnnnnnnnnnnnnnnnnnnnnnnnnnnnnnnnnnnnnnnnnnnnnnnnnnnnnnnnnnnnnnnnnnnnnnnnnnnnnnnnnnnnnnnnnnnnnnnnnnnnnnnnnnnnnnnnnnnnnnnnnnnnnnnnnnnnnnnnnnnnnnnnnnnnnnnnnnnnnnnnnnnnnnnnnnnnnnnnnnnnnnnnnnnnnnnnnnnnnnnnnnnnnnnnnnnnnnnnnnnnnnnnnnnnnnnnnnnnnnnnnnnnnnnnnnnnnnnnnnnnnnnnnnnnnnnnnnnnnnnnnnnnnnnnnnnnnnnnnnnnnnnnnnnnnnnnnnnnnnnnnnnnnnnnnnnnnnnnnnnnnnnnnnnnnnnnnnnnnnnnnnnnnnnnnnnnnnnnnnnnnnnnnnnnnnnnnnnnnnnnnnnnnnnnnnnnnnnnnnnnnnnnnnnnnnnnnnnnnnnnnnnnnnnnnnnnnnnnnnnnnnnnnnnnnnnnnnnnnnnnnnnnnnnnnnnnnnnnnnnnnnnnnnnnnnnnnnnnnnnnnnnnnnnnnnnnnnnnnnnnnnnnnnnnnnnnnnnnnnnnnnnnnnnnnnnnnnnnnnnnnnnnnnnnnnnnnnnnnnnnnnnnnnnnnnnnnnnnnnnnnnnnnnnnnnnnnnnnnnnnnnnnnnnnnnnnnnnnnnnnnnnnnnnnnnnnnnnnnnnnnnnnnnnnnnnnnnnnnnnnnnnnnnnnnnnnnnnnnnnnnnnnnnnnnnnnnnnnnnnnnnnnnnnnnnnnnnnnnnnnnnnnnnnnnnnnnnnnnnnnnnnnnnnnnnnnnnnnnnnnnnnnnnnnnnnnnnnnnnnnnnnnnnnnnnnnnnnnnnnnnnnnnnnnnnnnnnnnnnnnnnnnnnnnnnnnnnnnnnnnnnnnnnnnnnnnnnnnnnnnnnnnnnnnnnnnnnnnnnnnnnnnnnnnnnnnnnnnnnnnnnnnnnnnnnnnnnnnnnnnnnnnnnnnnnnnnnnnnnnnnnnnnnnnnnnnnnnnnnnnnnnnnnnnnnnnnnnnnnnnnnnnnnnnnnnnnnnnnnnnnnnnnnnnnnnnnnnnnnnnnnnnnnnnnnnnnnnnnnnnnnnnnnnnnnnnnnnnnnnnnnnnnnnnnnnnnnnnnnnnnnnnnnnnnnnnnnnnnnnnnnnnnnnnnnnnnnnnnnnnnnnnnnnnnnnnnnnnnnnnnnnnnnnnnnnnnnnnnnnnnnnnnnnnnnnnnnnnnnnnnnnnnnnnnnnnnnnnnnnnnnnnnnnnnnnnnnnnnnnnnnnnnnnnnnnnnnnnnnnnnnnnnnnnnnnnnnnnnnnnnnnnnnnnnnnnnnnnnnnnnnnnnnnnnnnnnnnnnnnnnnnnnnnnnnnnnnnnnnnnnnnnnnnnnnnnnnnnnnnnnnnnnnnnnnnnnnnnnnnnnnnnnnnnnnnnnnnnnnnnnnnnnnnnnnnnnnnnnnnnnnnnnnnnnnnnnnnnnnnnnnnnnnnnnnnnnnnnnnnnnnnnnnnnnnnnnnnnnnnnnnnnnnnnnnnnnnnnnnnnnnnnnnnnnnnnnnnnnnnnnnnnnnnnnnnnnnnnnnnnnnnnnnnnnnnnnnnnnnnnnnnnnnnnnnnnnnnnnnnnnnnnnnnnnnnnnnnnnnnnnnnnnnnnnnnnnnnnnnnnnnnnnnnnnnnnnnnnnnnnnnnnnnnnnnnnnnnnnnnnnnnnnnnnnnnnnnnnnnnnnnnnnnnnnnnnnnnnnnnnnnnnnnnnnnnnnnnnnnnnnnnnnnnnnnnnnnnnnnnnnnnnnnnnnnnnnnnnnnnnnnnnnnnnnnnnnnnnnnnnnnnnnnnnnnnnnnnnnnnnnnnnnnnnnnnnnnnnnnnnnnnnnnnnnnnnnnnnnnnnnnnnnnnnnnnnnnnnnnnnnnnnnnnnnnnnnnnnnnnnnnnnnnnnnnnnnnnnnnnnnnnnnnnnnnnnnnnnnnnnnnnnnnnnnnnnnnnnnnnnnnnnnnnnnnnnnnnnnnnnnnnnnnnnnnnnnnnnnnnnnnnnnnnnnnnnnnnnnnnnnnnnnnnnnnnnnnnnnnnnnnnnnnnnnnnnnnnnnnnnnnnnnnnnnnnnnnnnnnnnnnnnnnnnnnnnnnnnnnnnnnnnnnnnnnnnnnnnnnnnnnnnnnnnnnnnnnnnnnnnnnnnnnnnnnnnnnnnnnnnnnnnnnnnnnnnnnnnnnnnnnnnnnnnnnnnnnnnnnnnnnnnnnnnnnnnnnnnnnnnnnnnnnnnnnnnnnnnnnnnnnnnnnnnnnnnnnnnnnnnnnnnnnnnnnnnnnnnnnnnnnnnnnnnnnnnnnnnnnnnnnnnnnnnnnnnnnnnnnnnnnnnnnnnnnnnnnnnnnnnnnnnnnnnnnnnnnnnnnnnnnnnnnnnnnnnnnnnnnnnnnnnnnnnnnnnnnnnnnnnnnnnnnnnnnnnnnnnnnnnnnnnnnnnnnnnnnnnnnnnnnnnnnnnnnnnnnnnnnnnnnnnnnnnnnnnnnnnnnnnnnnnnnnnnnnnnnnnnnnnnnnnnnnnnnnnnnnnnnnnnnnnnnnnnnnnnnnnnnnnnnnnnnnnnnnnnnnnnnnnnnnnnnnnnnnnnnnnnnnnnnnnnnnnnnnnnnnnnnnnnnnnnnnnnnnnnnnnnnnnnnnnnnnnnnnnnnnnnnnnnnnnnnnnnnnnnnnnnnnnnnnnnnnnnnnnnnnnnnnnnnnnnnnnnnnnnnnnnnnnnnnnnnnnnnnnnnnnnnnnnnnnnnnnnnnnnnnnnnnnnnnnnnnnnnnnnnnnnnnnnnnnnnnnnnnnnnnnnnnnnnnnnnnnnnnnnnnnnnnnnnnnnnnnnnnnnnnnnnnnnnnnnnnnnnnnnnnnnnnnnnnnnnnnnnnnnnnnnnnnnnnnnnnnnnnnnnnnnnnnnnnnnnnnnnnnnnnnnnnnnnnnnnnnnnnnnnnnnnnnnnnnnnnnnnnnnnnnnnnnnnnnnnnnnnnnnnnnnnnnnnnnnnnnnnnnnnnnnnnnnnnnnnnnnnnnnnnnnnnnnnnnnnnnnnnnnnnnnnnnnnnnnnnnnnnnnnnnnnnnnnnnnnnnnnnnatggctgggtggatgcagggatggatgggtggatagatgcatgagtggatggatggatggatgagtgcgtgtggatgaatggatagatagtggctaggtgggtgaatgagtaggtagatggatggataaaggaatggatggatgagtgggtggatgggatgggtgaatggatggatggatggctggatggatggatggatggatgagtgggggatggctggatggatagatggatagagtgagtggatggatgaatggttggctggttggatgcagggatggatggatggatgggtggggatgcatgggtgggtgaatggatggctggctggatgcagggatggatggatagatgaatgagtggatggatggatgagtgcatgtagatgaatggatagatagtggctaggtgggtgaatgagtaggtagatggatggataaaggaatggatggatgagtgggtggatggatgggtgaatggatggattgrtggctggctggctggatggatagatagatggatgagtgartggatggatgggkgggtgggatgcatggatggatgaatggatggctggctggatgcagggatggatggatggatgagtccgcgtggatgggtggatagatagtggctaggtgcgtgaataagtgagtagatgggtaaatgggtggatgagtgggtcattctatcagttactgtatccaaggaatattggcaaaatggaagagaggtgggcttgagcaaatggtggccataacttgagaggtgaagtctcatcctcattattttcaaagtgaaaaccagattttataacagtttagtggatcacaacacccaaaaggaaacacacagttcgtcacacagctaaacctatcagtcaagaaagagccaagttatccccaaattcttcttcccacttacaagggcagactgcccacaagggcgaaaagcccagaaatgccgcctcacaggctgcctgggagccaaagcctcgagctcagaacggtgccaagtgaagaggtgaactttggccacagaagcagccayggcttctctcyagtcttgtgagtgggcatcccagtcagcggcccaaagagaaaactgctcatccccccagatgctggaacacctcccaaggtagccacgtgggyacgcagatcttaggaaggaagacacccagcggagaccagggaggagctggacatgggggacactcagtgccgcctgcctgtggaccccctccctgtcccattcctgccacagaaaacaccccgtcctcyraggctgcagactgcgctcagcacccaggtcctggctcctcgctgggcctgcggctgtgccacgcaccgtcctkcctgcagatgagagtgcttggtgctggtctccaggacgtcgtcagcaaatgacccttccaggaaagcctccacattgttctccctgtgtgagggaccctgtggggagagaagcaaggggctgtgcccctctctctgtctctctgtcttcctctgtttgtgtgtctttctctgtgtcttcatctctatctctgtcttctctataatctgttcctttgtctctctctccgtgtctgtctctcatgtctctgtcttatgtctctatctcatgcctctgtctctccatctctgggtctctgtatnnnnnnnnnnnnnnnnnnnnnnnnnnnnnnnnnnnnnnnnnnnnnnnnnnnnnnnnnnnnnnnnnnnnntctctgtatctttctgtctctgtttctgtgtctctgtctacgtctctctatgtctctgtctatcattagagggcatgggacaagcccctgtgtgtgccccgccaccgtctcccttccctccacacgtccagccactgtcccttaggagtcctttggctgagtcctggacaggggattggggagggggacgcagcccctcaggcctggcccagaagcaccccccaaccctactctccgccccctcaccccctctccatcccctgctgtgagtccgggagggccagcacccaggaggtgatggagggcacctgggtcccgtgctgggtcccatgtggccatgcgaggctgccccccgcccatgcccactggctgctctgtgctgccacgtgagccacgtggtggctgtgatggtgccagcccggcctcgtgggacccaggtgctggttggcatgtgtgtcctgatgatacaaagagggctggcttcattcttgaacctcggtcttggagccaacaagcaggatcaagtggaccctgggccacgctagccttgcctggccctcggagtggtccccgcactcgccaagcccyggcatggcagcgctcttgggaaagggaggaagcacgccctccctggaggagctgcttgtgctctccgtcgaggccagcacayaaacagcctcaccaagagcsagggccacacccagcaatcctccccgggctgcactggcatccaggcggtgccgggcgccgcgtcctggcctccrtttagaaactgactgtgtctcgtgtgtggggcctacagcccgacaggagggctggtaaattgcagctcggtgtgcgaggaagtacttttgtccctgagagcctgggctgtgtcacctgcaaaccacgagaaagagctggggctccaggcagggccccgatgaaacctgtgtctgttctgccgaagcggccacaaagccacccagagctgcggagacccggcgtctggaaaccaacagcgattgtgtcgcgtttcctcccaaacgcccttaaacgggcaggacagcgtggcaggtgaggacgctgacaggccagtcagcaccagcggagggtgctacagaggccggcaggtttctccactctcacagcctcacgctggctttgcctgtcagccagaatcttccagatccgcgtagaacagtgagatgggcctctgtgacgggtgtgcatcccctgctctgcaagatcaggagctgagcaggaatggcgtgccacagaactgagcaggaacagggtgccaccgcctgccctggtctccaagtggctttatcgttattcaggacagcgcagccagcaggccaggagacaatggccattggtgagatggtttgttacgcacggatcccagagaagggggtaccaccaggcagggccacccaggaggcaccaggctggacaggaggcagagggtatgagggggatgtggccaggaatgggcaaggccgggtgagcaggcctggggggcctggcttccatcgtctcagcagctctggggcatgggccatcctcctgagtggttgggygggaggatggtagcccagagtgaaggacagaggcagtgggctgtggattcgcgttggctggtggggcgtggactctcgttgcctggtttgcatttggaaagacgctgggggggtgctcactagctctaggaaatcactcacccgggaggggcaggcctctcgggctagtgaggttccagatgtcaaagcatcagatacagaaaatatgaaagcatgattaatacacgggctccgctcctgctcgcccccttcatccctgggctcctgctgacggtggagtcgccggtgtggtgagggagggcggagtcgctggcctggttagggacagtggamtcacaggcgtggttctccagccatctccaaaggagccaccatcagggacctcacacacggcaccccggaatcrgctctctcttctccaggtgcccttggggkcagtgcccctcctggtaatccttgtgagggtggtgtcccggctttcacctgggaggacygaggggcccagacccccatccccaygcctgacctggcagggagcgggggtggttgaggactcggagtcgcgggtgtccctggactcatgctgcagggagggtgtgcggacatagggggtggggttgggcctgcatctccagggctgctccgtgaccgggctgttctggactgtcagygcccacgcgcaccaactgatgcagtcgaggctctttctttcagcttctgggacgtgtctgcattctgctcgagagagctggcagcaagctggggcctcctcaggtccccggtgccacctggagaatgcagaggccacagtgggcctcatgtcccctgaacacccctcctcggacatgagggctgaccccagaacccctaggtgctcacagaatgagctgtccctgcaggtacatcagaggctgacaggaatgacagctgagtgcacatgtgtgtgagtgtgtgtgtgtgactgtgtgtaggtgggagtgcctgtgtgtgactgtgtgagtgcgcctgtatgtgggwgggagtgcgtgtgtgtgagtgcgcctgtgtgtgagtggagtgcgtgtgtgtgactgtgggtgtgggtgtgagtgtgcctgtgtgtgggggtaacagtgcatgtgtatgcttgactgagtgattatgttgcacacgtgtgcatctgcggtgcattttcatgtgtgtgtgtgaagaaattgattgattctaagaattggctcacacaattgtggggttgccaagtctgagatccttaaggtgggcagtgggtgggttttctgtgtcatggtctgaaggctgcagacccgggtggggtttccgtgtcgaggtctgagggctgcagamccgggtggggtttccgtgtcgaggtctgaaggctgcagacccgggtggggtttccgtgtcgaggtctgagggctgcagacccgggtggggtttccgtgtcgaggtctsaaggctgtagactcgggtggggtttccgtgtcacggtctcaaggctgtagacccgggtggggtttccatgtcacggtctgagggctgcagacccgggtggggtttccatgtcacggtctgagagctgcagacccgggtggggtttccgtgtcgaggtctgagggctgcagacccgggtggggtttccgtgtcacggtctgagggctgcagacccgggtggggtttccgtgtcrmggtctgagggctgcagacccgggtggggtttccgtgtcrmggtctgagggctgcagacccgggtggggtttccgtgtcgaggtctgagggctgcagacccgggtggggtttccgtgtcgaggtctgagggctgcagacccgggtggggtttccgtgtcgaggtctgagggctgcagacmcgggtggggtttccstgtcgaggtctgagggctgcagacccgggtggggtttccgtgtcgaggtctgagggctgcagacccgggtggggtttccgtgtcgaggtctgaaggctgcagacccgggtggggtttccgtgtcgtggtgtgaaggctgtagacccgggtggggtttccgtgtcacggtctgaaggctggcatccttctctgggaactccccacccgtcttttctctcaatgcctggctgggtggggcctgcctgcgtgcacgtccgctgccatgcggagtgtccactgacgcaagcatcactcacagctgcagacatggtcccagcagcacctcacatccactgaataatgggaccttcacctcctgagcagatgtaaaaccgtcacatgggccacagcccacaggcgtggattgcagggcaggggtgcagtgtgtgagcacgtggcctgctgttggggaccaagtttggagtctggctgcctcaggtgctggctgggtgacttggacatactcctcagccttccgtgcccgtctcctaattcccacaaatgctcttgaaggacctgccccagggtcccctcgatggagagggggaaatgctctgggaagctctgggcctgctgcctttcacagagagaatattcgggaaaaccacggtggagacagaggatgagggacacagaatggccaggtggacgagagwgggtggacggagtgagcggatcacagtaagactgcggatacacggctgtttctggccagcgcgaaaggcagctgcatgtggtttgaccgaatagacacgaggttgcctcctcactgctgtggtgacagcgtctgaggtgttttctcgtactaggtcggtgcaaaagtaattacagtttcggatcatgaactttaaatcattataactaggctcaaacacacctttattcgtcaaaataggaagcattacaatcaacacatttttgccaatgagaaataagttcgtttattcctgtagcataaatatatctgtgcttcaggatttgacaaactcttggaaagcattttctgcatcctgctggttgtggaagcgttttctctgcaaaaagttgtcgagaggcttgcagaagcggtagttggttggygagaagtcaggtgaatgtggcggatgaggcaaaactttgcagcccaattcgttcagcttgtgaagcgttggttgtgtgacgtgcagccaggcgttgtggtggagaagaactgggccctttctgtggactgaggccggcggcaggcaccgcgatttttggtgcatctcatggatttgctgagcgcacctctcaagtgtgatggttttgccagsattcagaaagctgttgtgagtcaggccggcagccgaccaccagacagcgacctccagacagcgaccacccagacggcgacctccagatggcaaccgccagacggcgacctccagacggcgacctccagacggcgaccacccagatggcaaccgccagacggcgacctccagatggcgaccaagcccttttttggtgcaagtttggcttttggcaagttggagcttcttctcaattcaaccattaagatggtcagcttccctgaccgcagcacagcctgcccatgccagctctgcacagccccacagcccaggaggacggggctcgggcctcaagcatgcctgtgtctcaccgccagttaaccccactcgccacccatctccgctcagagctggggttcaggaagctgtccccagccagggcgcacctcctgcccaagcctcatggccccrctcagtcctccagctgcacccacacgtgatgagtgtgacgtctgagcctcgcctgcctcccctctagatgacagtttcacgatgraggccgcatgtccccagcgcttccaggagaaccctacgagccctgttgctttgcttgccttgaccagaagaacaggtccgacttcacgggacggcctcgcccgcaggccctttgccaggcccacagcgccgccaaagacaacgtcagtcctgaatgtacagggggagtttttgacccaacgcccacgcgcagcagggcccctctcctgtctctcctctcgctgtgatgtgccagcccggggcctgcagacgacgggccccagggacccacccatctctggaggagtctcctgttttcccatctctggcctctgcagttagtgacggcccctcagccttggtgtgtcacccacgccacccgtgtcttcctcgtgtgaccagaaaggggtccccatccagaccccaagagaggcctcttggatcttgtacaaggcagaattcggggcgagtccacagagtaaagtgaaagcaagtttattagagaagtaaagaaatgaagtaaagagaagaatggctgctccacaggcagagtggcccccagggctgctggttgattatttactaattaacttttgtggttattttttgatcatttgctaaacaagggatggattattcctgagttttctgggaaaggcagcaggatttcccsgaactgagggctccaccctttttagaccacgcagggtaacttcctgacgttcccatggcatctgtgaactgtcttggtgctggggggagtgtcttttagcagctaatgcattataatgagcataaaatgagccgtgaggatgaccacaagtcactcgttgccatcttggttttggtgggacttggcggctcctttactggaacctgtttgtttgtttgagatgaagtcttgctctgtcacycaggctggagtgcaatggtgcgatctcggctcactgcaacctttgcttcccaagttcaagcaattctcctgcctcagcctcccaagtagctgggactacaggtgcacgccaccatgcccagctaattttttattttttatttatttatttatttattttttttagtaaagayggcatttcaccatgttggccaggatggtcacgatctcttgacttcatgatccacccacctcagcctcccaaactgctgggattacaggcgtgagccaccgcacccggcctactgcaacctattttatcagcaaggtctttgtgacctgtgtcttgtgccgacctcctatctcatcctgtgacttagagtgccttcaccatctgggaatgcagcccagtgggtctcagcctcatcttacccagcccctgttcacgatgtggtttgaatggctctaatgcttggacttccgccctggctgtggggccagatggtcaggtagcacgggggtgaccacaggcatcgtcacccaaaccaggacacctgagagttaccagaggtgctattaataattaccccaagacaggggtatcarctcggattgtcttgggcagtggggatgcatggctagtaactagcattaactggtactatgtgctgcatgcaaggaagccacaggagtgagggtctttgccagctgtacctgccaaagcagcatggatgggtcagctcttggatgtgtaacaatccactctgaaatgttgcggcctaagacaaccatttccttggcccacaactctgggttggcacatggtctatgtggagcagagcggctctgctctcagctggccttgctgatgccggcagtcagcagccaggtgagcggggttggctggttggggtggggaggaatgggctcagctgggcggcttctctctgctccacatggtctctcatcctcatgctggcggccaggttacaagacagagatcggtgtgagtgcagtctcctgaggcccaagcttggccttggcactgggtgggttctggccctttctgttggtccaagcaaatcacgtgacgaaggcctagggtgatagcrtccccctctcagtggggagagctgcacacacagacgccagaaggcgagtccagcttatccccagttgctctcagtgcagagtgccagccgggctccggcctccttcacctgatcttcctctagtgtggccaggaaggggaggggcccgggcctcctgcctcttgagagcccctgagaggggggccaagtgcctctggctcctgtgggaggattttgcctgatccttaggtgttggtctcctctggcccacagagtggagaagttattgccaatattcatctgaaatttatagaggggttaaactgtttcccttgaggctgtgatgggagagcctttaaattctccctctgcataagcatcaatctcccggggagcgcggcacaaggcagatgatatactggtccctggcttcaaaatatgtgaaaaactacacggtcattaactctgacgcagaaaagagacctgccccgggtgtggggacgccacacaccagtgctgcttgcgcgaggagtcgtggtggggggtgggggctgtcttgttctttccctgttttgcagggattggaaaggggatgttgctgagggcatgggggttcactctccgactttatcactcctgagctaatggccctgctgaaaagccaggtcacgcaagccgtgggcccttgtgcttagggggcacctcacacaccccgaaagctcaggggtctgcggcccaagcccggagactgaagcagcccagtccccggctgtgacaggtcctcagctaatgatggaagttggccgactcccaccgcccgggagcctcgcctctcctgtagcttcggtccttctagagacacggtgggggacccgagggccgagagacctgaggctgcattcacccaagaaggggcctcggcaccacccgcaagctcagcacacactgacggggctggcacctgtggagctggcttggggaggcctcgcagaccgcccagcagtcccaccaggttcccatgtggaatygccccagcgccacagaaggccccggggacagagtggccgtaagtggctgtggggttcctaaagggaacacattcgttccgcagctatttatcaagcacctactgtgtgcccggcctcgctctgagcactgggaggcagctgtgagcagaagcgacagaaaccctgtcctgcggagctgagccatggggagggacaggcagagacggggacggatagcaggcggcgccatactgaggggtgtgagcctctggtccggacgcccagctatggggcaaggacggcggctctaaacaggatggagggagaggactcaccctgaagacttgatggtgacatttggggtttatttttactttttatgttttcagacagggtctcactctttaacccaggttggagagcgttacgtgatcttggctcactgcagcctcaacctcccgggctcaggtgatcctcccgcctcagcctcccaagcagctgggaccgcaggcatgcaccaccacacctggctaattttgtttttttctgtggaggtggtgtctcactatgttgcccaggctcgctggtttttttaatggacaaataggattgtccccgttcacggggtatggtgtgccgcactcaggtcagccgccatctccacatttgccatttccttgtgtgggggctcggctcctcctcccagttgccggctgggtcacggtcaggtccacggtcctccctcagcggcaccagcactggctcctctctgcctgtggttttggtccttttttttttttttttgagacggagtctcgctctgtcgcccaggctgcagtgcagtggtgtgatctcagctcactgtcacctctgcctcccrggttcaagagattctcatgtttcagcctcctgagtagctgggactacaggcatctgccaccatgcccagctaatttttgtatttttagtagacatggggtttcatcatgttggccaggctggtctcgaactcctggcctcaagtgatccacccacctcggcctcccaaagtgctggaattacaagtgtgaggcccctgtgcccggctggttttgtgcctttaactaatctctctggcactagagctttgaaggctggaggcagtggagcatgcagagacctgggaagggcgcccggcgtgggcaccacctgtgccaaggccctgaggggtgcacgtgggggtgctgggaaggccaaggtgcttcgaacccagggggtgggcaaggcaggcgtcaggagccctggggggcttcgtgttccccagcgtgaggcccgaggacaggattctgtggtgggtggggggaccgagtcaccgtggcctctgtactgggggtagacaaggaggctgaaactgctggaggtcgtcccagaggccagtgtgccaggcgcttctgaagacgggtgggcagacgatggaggacgaggctctgtcccgcccctgcagagcttccttcgttccggccccttccagcgaagggcagggctccgaggtgcttcccccctccttctcacgaaacctgggtggtctcaggttgagggtgggagacatccgcggagtgggagggcggtgggcgggattcaccagcggggccccttcccgctgcgaacagaaatcccgaccctagtctggaaggcagaaaggaagccccggctcagggggctggaaaaccccaggcttttctcaggcaggttgtcccacagcagagacaacagacagaaacccagaaaccacctgccacgatgtgaacctgatgcagaaacgcggttcgctccctcgggatgcaaaggccaacttcagcctggcacggcggcgccgcggactccaccatcccggggaaggagccggacccctgtgggtgacgtgggactgtggggcgggggtgtccccggctgggctgagctgagcagcgaggaggctctgggttgccggaccggggtcagggagcctggcgttagctgcgtgctgtgtggtcatctcggcraggagggagcggctccctcctgccccrgactctggatctgtcctgcggtgggtggtgtcggagcagccgtaagtgattggcgatacggcctcccggttctctctctccctgggactcggcttcctgaaggcagagagtccgggggagggaggagccccctgctcccccacacaagggactgggcctctggggtgggctgggctgacaggcgacccccggaggatgcagctaggggacgtgtgagtgtggccctctttgggaaaagggatctttgcagacatgattaagataacggcctggagatgagagcagcctggacgaggatgaaccagagtccagggatgactgagggatccgagctcagctgggcagaggctccaccccgtgcgcccctgcagttggcaccaccctcggcctcggcaccttctcagcaccgcggagggaacggggcaatgccagggctgcccaccctttctcgggtggtggggggattcaggagatgaggcaagcacagtgcccgccctgggcctggcacactcgtccagcatggcaggctcagggctgaggacctgagcacggcggagcttgggccacgtggatcagacccatttgttcatagtgatgtcagcccgtgggtggcatcggcctttttttaatggggtggatgggatgggacagcacaggatagggtaggataggatgggacggggctggctcagggctctccagggaaacagattaatagcagatggtggggacgtgggcttagctgtgaaagttcatctaaggaattgactcacccggttacgggggctgagggtaccgagattggccgtcggctggcaggcgcccaggagagccggtggcgtgagctccaagcctgaaggcaggggaggacccacgtcccagcccgaatcgagcagagtgtgtgaacactccctgcctcggcctttctgtcctactcaggcctgtaggggacagatttaaacatggctcccaccagaggccatgcacagaccacccagaatcgggagagcaaacgtcccagcaccctgttccctgccacgctgacacaaaaccaaccctcacaggcaggacagcgcggggggacaaaccggagtgaaagagcacgtgtaggaaggctggtattgcttaagtggaacgacacggaaggaagcataaaaggatacgcagtgacaaacacgtttctgctgcgcgtgggggttcagaaagccaggggctgcggggttttattagcggaggctggttgggcttttgattgtgtgtgttctggggatgcgtggagcggtgtctgcatggcaagcagctgtttgtaaacagattgttggtgtgttcgggtgctgggggaggtggctggtgcagtggggcggggggttccctgcacagaacaagcactgggggtgggaaccacagggtgaaaaacctgttaagtgttggggtcggtagaataaacccccctccccacagccatcgtgtaacgcacaagagaaagaagtcccagagaggacgcaacccagacctgaactttctctgtgggcggggtcccctgaaaacagcccccgagaggcaaagccccgggacccaccaggcccgtcggtggtgggggtgccccaggaacagagggccgggccccttggcctctcacgggcccctagctggccgggctgcccgcytccgttgggaaggacgccggcacccagcgccgtctccccgcaggtgtggcagtgtggcggcagcatggaggtgctgccctgctcccgcgtggcccacatcgagcgcaccaggaagccctacaacaacgacattgactactaygccaagcgcaacgccctgcgcrccgccgaggtgtggatggatgacttcaagtcccacgtgtacatggcctggaacatccccatgtcggtgagtcccccacaggccgggagccggggccatgccccagggtcggggtcaatgccacggcagggctgggccggagggaggccccctagggccccctgcaggtgtgagtgggtgtgttgacaggtgtgcacaggtgcaagcagttgtgtgtgcaggtgtgagtgggtgagctgtctgcctgggaaggagccttcctcacactgggaagagaccagctcacacccaccccggtgtggtgggcgtttttcctctcagcctagagcaattgccccgtggttagaagccagggaggggcggcctctccccaacctggtgccgccgcctcagccagggccccacttagtgccctgcacrgcacctgtcagccagtgcggacccctccccagccccgggcagcctcaactgtctggcggtttcatgaacggctcatacgctgtgtggcttcccgtcctcagcgccaccttttccaggtcacccccaccatggctgagtcacgtccacagtgtgaaagggcccctcgtgtggatccactcgtccgtggatggacgtttttggttgtttcctgttgggctttggcctatgagtggctgacccgcttcaagttgaggattgctgtttgttttctaatttgtaatttcccataaagagcctgaattctggcttttctcaaagcgccccacccccacaaccctaagaaaggcaggtactgagacgggtggccgcgacccatcccgccacaccccagcgtctctggaaccacccccttccttccctggccactgcaggcactgggtccctgagttctgggagggctcatcttagaaacgggcttgtctgcatcaaccctaatgagccagatcttaaggcatgacccagcgcacacacgcatacatttacatctgtccacatacagcgctttgtgtacgtagcaccaaagtgacccttctcatttacaatattactacttcttaaaamttcccaccacagcccctaaattggcttaccaccccctgctagagtgcaccccagcgtgtgggtgacacggcctgaagtggccccgggctggaccattcactgcaaatccagcatccagcccccatatcagctcccgccaggcagatcaggagccgtagacacgtgcactcgtgtctgagagacgagaagagggtacccggtgctcctacagccttgttttccatgaagtgataaggaaaacgtgcagggtgatgacctccccaagtgtgtgggcaactgagtgaggkgctccaggcccccgggcagtgaggccggcaaatgcctgtcacctccgtgtccaagggccctggtgtgagccccttggctgattaaaacctcataacagagcaacaatgagtttctggcgtgatcgtccccactttaccaatgagtaactgaggcacagagaagrtaggggactgtcccaggcccacataccagaaggtgacgggattcaagcccaggccgtgaaggccaagtcgtctgccctccccacaaggcctgagcctggagggtccctgggcagggtgcaggtgctccctcagggctggctgtccgtcagagtgctggtccctacagcctctcaggccccacagtcccaggaagacacagacaccgcactcggctgtgggttctcacggcagaggacacgggtcaaagtcagcagagggaagagacgcctgggcagggaccaggaaaggccaggtacaagctctcaggtgtccccccgcggggggtcccaaggacttgattctccggcacccatgcgtgacaacacgtgccaggcggggccagccaggagcccccaagcctcagtatccagggtcctcaccaggctggtctcgtggatatggctgacctcagtctccaccctccagaggtcaggctgatgccgtgcagtaaggccaggtgagcagggccgtcttctcaggcaggaggttcctgggcccgggtgggtgtggacgagccggctgcagcaggggccgtctgtccaggccggggctggcctctggcagggtccttcccatcaggagcagctgcctcagaccctctgtggatattaggaggctggggggggtcccamctggatggggccggatggggcctcagcatctgaatactgggggggaggctgctcctgtgagggsacttggtccctggagacccccaacctcattatggggaagacccaggtcwtggtgacacccaygtaccctctcrcctacttctggccttgcagaacccaggggtggacttcggggacgtgtctgagaggctggccctgcgtcagaggctgaagtgtcgcagcttcaagtggtacctggagaacgtgtacccggagatgagggtctacaacaacaccctcacgtacggagaggtagcacctcccccgagggccccgttcggcccracaggctttctgccctgactcctgcacacgtatgcattcagggtgatgcaggcacatccacatgcacacrgagaggtagcgcctcccccagagggtcccactcsgcccgacaggccttccgccctgactcctgcacacacgtgtgcattcacggtgatgcaggcacatccacgtgcacacacaaggtgcaggttcacataaacacacgcacctgcagacccacatgtccatacacacccattccttcacatggacctccctagaggcaggcaggtgtgtagtcacatccatgcgtgttcacattgcctgattcaatgtacctacgctctcacgtatgtgtacatagggatayaygcactcacctagatgtgtgtacagagacattcacaggcaggtrcgtaaatccatgcaaacactcatatgtacaagagcacgcggacacgagtatacatttgcacccagttttgctaatgtacacagctcttcctacacagatgtatgtttcactaagtgcatgaaccccaaaggggcctgcctgtgcacagataaacacacaggcccttgttatcaagcaaaataatgtgtgtgtgtacacgtctgtgcatccacatatgcggagccacgttcatacaccagcgtgcatgcatgaaggtgcccccacagatgcacacaatgggtgatatgcacactcacacaggcccatcagctacacagagacccccgtctccactggcccccacatgcacagcactccgtaaagccagcgagaaggtgctgctcttctgccctctccccagtctgtgcaggggatggggygcctcccaccatgagactcgagcgtcccagccctgagctggcactcggatggggcamggaaaagggtccctggggtggatggtcctcgctgagcctcccctcctgcagctcctggtccaccctgcgctgactccagtcccttgggcacagaggtttcccaggcagtgctgagtgtgcatcggggcgccgcccctctcccccagcctccctgtgcttctactctgcccactccatcctcaattagccaagtgcaggcacccccaacccagagcagccgtaacatccagactctgctgggcttcctcaacggtcccaattcaaacctgtgtgacctctcgtggtggccgtggtggatgggtcagctgctgctgcaaacccagcagcctggagacgcggtggacaaaagcaataagcatctacacttgctcacgagccggggccacccaggcagtgctgctggcctgatccaggctgtgctgatctccgatgggcctgttctggaggctggaggttggctgcccgatgacaacacatcccccagcagtctggcccgggcttgttctcagagggctgtcagggttccttccaagacagagtggaagctggaaggtctcccaagggtccaagccaaggccagcctagactgcaaggctggcgagcrgtctctacccactcagtgggagccgcaagggcacagggagcaggcggcaaggcagggaagccactccacagcctggggctgtcgtccctgctgctcaagtgttcccctatggagtgatggccaagtctccatctgtgcatggcggacacttccatgtctccatcagtgacaaactcggtcagccaccccttcccaggcggcccacccggccagagcatcccacacgccccctcctcctcccgcgggcacctccttaggtgctggctgcagagctggctgcgtgaagctccctrgggcygcaccctcgggtgactctggactttctcctggggcttctgcttgcaggtgagaaacagcaaagccagtgcctactgtctggaccagggagcrgaggacggcgaycgggcratcctctacccctgccacgggatgtcctcccaggtaggagtagcagcggccacccatgcagytcccaaggggacraccccaggccacccggaccctacaccctggggcagaggcacgggkccagcctgctggggtgttctgaggccaccagggctgcattccagggcttggagcagcctgagggcccctctagaagaggcctcccagcccgccccacctggaaggtagcagaacacrgggaattgaaaacagcctgggccgggtgcagtggctcacgcctgtcatctcagcacgatgggaggccaaggcagacagatcacttaagcccaggaattgagaccagtctgggcagcgtggcgaaaccctgtcgctacaaaaaatacaaaaattagccgggcatggtggggcatgcccgtattcccagctgctcgggaggctgaggcaggaggatcacctgagcctgggatgcggaggttgagctgagatcacaccagtgcactccatcctgggcaacagagcgagaccgtatctcaaaaaattaaaaaggaaccaggcctttggggtcagatgggctgggggtgcatcactcccccctcagtcaagggagacggcaacagcacttaccgctcaggactgtcgcgtgattgaagcggaagtgtgggaagcattggctctggggtggattaacacggcaatagtgctgttgacctccgagcactccccacctgggcaggactcacctgcagcccaggcccaggcccagccccagccccagccccagccccagccccagccccgcagaatcacagtggtcaggggctggccgtagtgaaggtccaggccattctgaccatgacccccataaggagctggacgtttctaaccccacgggaatgcgtgttccgctcacacacggcactgcatgttgcccaaattaaacccaactcctgtcctccccgaaacgagtggggccgcgctctgggtctgagccacattcatgacgtctgtccaggcggaagaccagccagctgtgcaagccgggagcctggccctgcggagcatttgggtgccgtccagcccgcatccccacgtgggccctgcccggcggtcctctcccgcccgcaacagcgtccccggggtgggaggctccaaggcagccgcgcagggccccgtttgcagctcaaggcagctcgcacggcctgtcagtgctcactggggagagcctgggcgctgctcacacacagtcccggtggtcctgtccccagctggtgcggtacagcgctgacggcctgctgcagctggggcctctgggctccacagccttcttgcnnnnnnnnnnnnnnnnnnnnnnnnnnnnnnnnnnnnnnnnnnnnnnnnnnnnnnnnnnnnnnnnnnnnnnctgtgggacttcacccaggtcagcctctggggaaggggggccgtggggttggggcggggcagggctgctgggacccctgggtgcctctgccactagagccagcccattgggtgggagctggagtgcggcagggggtggtcaggggacggggccttggatcagctgctcccttatgggccccgacgctcacagagagggcaggtgactggtcagggtcacacagccagagaggggtcgggctggacagtctgatcatagccctgcatctgcctcttccagcctcaggtgcccagggtagagggaggatttaggaaggggatgaggtatgattccaaccygggccgctagccctgcaggaaagatgggaaatcctcgaagctccactgaagtcagccccttcccggccccmctgggtgctgctgtgatgctggctttccattcaagctgccccaagaatgagcacgagggctgagagcacgaagcagcctccctgaggtggggggagggggaacaaggacgcctgcacctrgctgacttgatgygcctgtccccacagagtggccccattgtgagccgggccacgggccgctgcctggaggtggagatgtccaaagatgccaacttygggctccggctggtggtacagaggtgctcggggcagaagtggatgatcagaaactggatcaaacacgcacggcactgaccccacctccgcccggacccccacagacctcgggaaggcgctgggccgagccagtgtggctgagtgaccggggtgtgcccrgcagacacagcaggacagggctctatgtgcggccaggacagcagaggctgaggggccggggtgtggctgagtgaccagggtgtcacccactgcatctggagtacagcttctcctaggacaggcggctctacccgagggagggcgtctggggacagtgatgccaactcaaacacgtgccttctccacggtatctcctggccaggctgctgggacagccgccgcctctgcatgtaccacagccccccacgccccatagggaggccaagccccggaccatgcaccaggctgcaccctggtgtcttccacccgcaggcctcccatgctccaagcagcctcccccagcacttgcggccgctcagccctccaaccaagacctaagtcacacatcataatgcagctccttgtggtctggtaagaggggtgctggaggacatggacagcgacaaacctgaggccgtgtctaggaggctggcacgactgcttcagcagagaccaaataaagagaggattaggcagcagcactgtgtgtgtcttcctgggagccgagctgggggttggggcccggtcccacctctttcccaggcacctgggccctgccgcagcccagccccttgcctgttttaataaatacagttttattggcgcccagccacacccagttgcttactattgtctgtggccaccgctgcggggctctcggcacagagtcaggccatggccgcgtggctcacaaagctgcagacgcagactctggccgatgaggaaatcactggatgacgcctgtgctgggatgtggcctggcaggtggcctcacgtgtgcagacagaccatgaactcgatgcagccgggaaaatggaggagagcacgtcccctgcagccacacatgcagctggaggccgtcagcctgagaactcaacccgaacagaaaaccaaaaccacgtgttctcacttatccatgggagctgaatgctgcatgcacatgacgcagagagggaatagcagacgccagggactccagaggggcaggtgggagggggaggaggacgaggacgagggctggaaaaccacctgttgggagctgcgttcactccctgggtgatgggatcgttagaagccaaaacctcagcatcaagctatatacccacataacaaacccacacatgtacccatgaatctaaaattttttttttaaaaggccaggcacggtggttcacgcctataatcccagcactttgggaggctgaggtgggtggatcatctgaggtcaggagattgagaccatcctggctaaggtgaaatcccatctctactaaaaatacaaaaattagctgggcatggtggcaggcacctgtaatcccagctactcagcaggctgaggcagaatatagcttgaacctgggaggtggaggttgcagtgagccgagatcgagccacagcactccagcctgggcaacagagtgatactccatctcaaagaaaaaaaaaaaaaaatgggcaggtgccaaatttggcaagtccaggctccgagtctccagggagtgaggacgctgacccgttgtcaccagtcggagttcagcctgcggggacacgtcactgtccgctagccctgggcagaggcaatggggctgggaacacttcactttccgctagccctgggcagaggcaatggggctgggaacacttcactttccgctagccctgggcagaggcaatggggctgtacttcactgctctttccaaagcccgcaggggctcatgttcctcccccagcaccctgcctgctggggtgcccacccaccacacggcccctctgctcaacgccttcctctgggactccccagtcgttgcttcctgttcctgtaagaagccctgaggggtcccagtttctctgttctcagcagagaattctcccaaccccagcccaagcctcagccctctgtctagtccagatcttgccaaaattctaagatcatggaggcaaaacacgggcagtgagtgaggccccaaaagtgagtggcttgccagggaccccccccacccccagccagactcacaggagtccagaagtttcccaggtgaagttaggagtccagaagtttcccaggtgaaggatgtgcaacgtcccttatcttgcaacgtgcagtgcctgtagtttagaccaagaggatggcaggtgcaaactcggctcgctcacacaccaattcattaggcaaattgacaggcaagtcaaagctggctggttcatagcccacacaggatcccacagaaaacctgacacctggaaaattactctcgaatcctcagtagaactcccacccttcagggaggtgagtgttccctcccactgagggaagcctatggctgctccgcctcacctggcccagcccctcctccctggcaccaggaggagtcccgaggggagcacctgggatggcagatccctgcagggcagcggaggtgaggtgctgtccacgctgtccggacaggagactcttcaacaggcatgactttgacttgccaaacactctgcttcaccaaatacacctccaagtgtccttatttccctgactattcccctctgtccttacctgcctaagtggccacacgcctcttgagaactgcccctgttctggagaaagtacccacgaatcctagagatcatgtaatccaaagagctccccacccttgcatgggtggggcagagctggagatgtcccaacgtccgctgctgcctttgcatctgctgccacacggtgtcgctgttgaagatggtccctgcacggctgcatggccaacactcggccgtggccaccaggatgtccttgctggcctagactctcacgcctgcctcagaggggtgccccacatgggaaccaaccatactgtttaagtcacagtgacatgctgatgtagattggatgtttgtcccctccaaatttcaggtagaaatttaaccaacatggaggtggtgcctgctgggacgtgtttgsgtcacgggtggatccctcatgaacagtccagcactgtcctcatggtaactaacatccactctagtagttcctgagggagctggttgttagaagggtcctggcactgccctccctgctccctccctcaccacgtcccctctgctctgagaagaagctccctgaggccttcccggaagcagatgttggtgccaggcttcctgtagagcctgcaggcccgtgagccacttacaccccttttcttcacgaattaccctgtctcagatgttcctttatatgaatagcaaaatgccaaacggatggagacatgcatttgccctgaccccagcacagtccctgggctcaggaaaacgtgcagtgcagtccgtgggctgtgccatctgtaggctgtgccgtccgtgggctgtgctgaagccaccgtgatcccctaaaccctttgacacatgtggatacgtcccttcctgtaaggcacaatcactcctcctcatggacttccgtgtcctgttttgtaaccataggtccttggttggggccaccccaattgtatcaggtgggatccaaccagtcaaacaaaagggatttaatatggaggaccgattgcccaagtgagggaagagctgaggctttgaccaggctcacaactgccgaaaccgcctaccaacacccacaggctggaaggcctgggagctggggttccggcagtcggtggggggcctacagcaggcaactccaagcttggagactgcgtgttggtcgcctggaacggtccgtggtggagagacagacagagatacagacactatgattggcaatgctacacgccacggctgcgcttccaacagcctattgtcagacactggccagcacacccccaacttgctctcccaaaacccccagacgcagagcacctccccagtccgacggacgcgaccgagacacgcagagcacctccccagtccgacggacgcgaccgagacacgcagagcacctccccagtccgacggacgcgaccgagacacgcagagcacctccccagtccgacggacgcgaccgagacgcagagcacgcccccagtccaacagatgtgactaagacaggacgcacaagagattcctttcagagcaaaggtctacagaaacgccagctcctgtcccaggtactcgggaaaactgctgccaaccattctcttctccttagaggaggaggaggagggaggacagaggaggatgagggaggacacaggaggaggatgagggaggacacaggaggaggacgagggaggacacaggaggaggacgagggagggaggaagatgtttatatacggctgaaattttaatcccatttaattcttcaaataccttaagtagtactgagcactcnnnnnnnnnnnnnnnnnnnnnnnnnnnnnnnnnnnnnnnnnnnnnnnnnnnnnnnnnnnnnnnnnnnnnnnnnnnnnnnnnnnnnnnnnnnnnnnnnnnnnnnnnnnnnnnnnnnnnnnnnnnnnnnnnnnnnnnnnnnnnnnnnnnnnnnnnnnnnnnnnnnnnnnnnnnnnnnnnnnnnnnnnnnnnnnnnnnnnnnnnnnnnnnnnnnnnnnnnnnnnnnnnnnnnnnnnnnnnnnnnnnnnnnnnnnnnnnnnnnnnnnnnnnnnnnnnnnnnnnnnnnnnnnnnnnnnnnnnnnnnnnnnnnnnnnnnnnnnnnnnnnnnnnnnnnnnnnnnnnnnnnnnnnnnnnnnnnnnnnnnnnnnnnnnnnnnnnnnnnnnnnnnnnnnnnnnnnnnnnnnnnnnnnnnnnnnnnnnnnnnnnnnnnnnnnnnnnnnnnnnnnnnnnnnnnnnnnnnnnnnnnnnnnnnnnnnnnnnnnnnnnnnnnnnnnnnnnnnnnnnnnnnnnnnnnnnnnnnnnnnnnnnnnnnnnnnnnnnnnnnnnnnnnnnnnnnnnnnnnnnnnnnnnnnnnnnnnnnnnnnnnnnnnnnnnnnnnnnnnnnnnnnnnnnnnnnnnnnnnnnnnnnnnnnnnnnnnnnnnnnnnnnnnnnnnnnnnnnnnnnnnnnnnnnnnnnnnnnnnnnnnnnnnnnnnnnnnnnnnnnnnnnnnnnnnnnnnnnnnnnnnnnnnnnnnnnnnnnnnnnnnnnnnnnnnnnnnnnnnnnnnnnnnnnnnnnnnnnnnnnnnnnnnnnnnnnnnnnnnnnnnnnnnnnnnnnnnnnnnnnnnnnnnnnnnnnnnnnnnnnnnnnnnnnnnnnnnnnnnnnnnnnnnnnnnnnnnnnnnnnnnnnnnnnnnnnnnnnnnnnnnnnnnnnnnnnnnnnnnnnnnnnnnnnnnnnnnnnnnnnnnnnnnnnnnnnnnnnnnnnnnnnnnnnnnnnnnnnnnnnnnnnnnnnnnnnnnnnnnnnnnnnnnnnnnnnnnnnnnnnnnnnnnnnnnnnnnnnnnnnnnnnnnnnnnnnnnnnnnnnnnnnnnnnnnnnnnnnnnnnnnnnnnnnnnnnnnnnnncactggctggtgaccagtccccgtgctggagctcactggccggcccgcaggccgcctctcacaccatgtcctccccacctgccaggcaccggctcaccagcctgccgggcctgtgaatgccccagtcccaatcacgaggccctcccatgtttgtgcccagcgctgctgtaacacaggaccacagcaggtggcttcagatggcagaattgattccctcacagtcccagagtccaasgcccaggtgccagcccggcttcctccgagggctccggggctcctcccacctcctccctcgctgggcctgacccgtctctgctgccggtggcctgttcctcaccccacccccatgtgtctcctccacgcctgcaccctctcgtcaccttgcagggacagcagcctcggattcagggcccaccctgctccagggtggcctcatcttaatgttccatcagctaaggccttctctttaaataggtctcattcgggggttctgggtggacgtgaattttggaaagacagcccatgaccttctcctattgcccaaataggcccagaaacttccccgagtcctccgaggtgcagagctgtgctgaggtctgtggggagaagagaaaggctgacctgccccgctggacacgtgctatccccgagcccctcagtccatcgtcagaacggcccctcgacatgtgcgtggccaacgagcacacggaaaggcacgacgccagcaggcaccgggggctgcagaggaaagccacggcggccggactggctgaagcacccacgggcagcacgggcgagcctcggagcgccccaaaggcccacccgctgctggcggggtcacgaaaggccacgggcacttggagccaccatgggtcaccacctccct

SEQ ID NO: 95523 - DNA, 34998 bp, Homo sapiens
ccgggcagggtgcgctgccgtcctcccagtcccccccgggcagggtccgctgtggggcgcttcacgtccacgtgcttctaatactcggtcccagtgcagatgtgccacttgccccaataattccttctctagttgttgctttgttgtttttgcaaacaagattgtatccagagtcacatgctgtgtttggttatcatatcacttcagtctcttttgttctagaacattcctgcccctttttgtcttgtatgacattgacgttctggaagataacttcactttgggtttgcctgattgcgcccccaagtaggtccaggttgagttttggggcaggagttctaccccaagggatgccatgtcctccccagctgggtggggacgtttgtggcagcagcgctgaccacggctgcsggggtggtttctgaacctccactgcacgaacaccacgctgtctggttaataagcaccggtggtgacctgtggaaccaaccgctgcagcgcggttctgtgttcgccgcccctcgtccgagcgttcccccctcccctccctttttccatcacgtgagttttgaacgtgcagtaatccttcactgccactgccgtgcatttgatggggaccagcgggggccctgagcacttcccatctttggcacaagcccctgttcctagctcaccccagacttgctgatccccccatccctgcacgggccttggtcttggccatttctccaggttccctgagtggggaatggtgctgagaccctcctttgagtgattgttttggacagtttttgttttcttgctgtctgtttagagtagtggttctcaaaccctgcttgggccatcccactggggagctgggacaccacctggcactgtggtggcagtgggggtgacactcagacaagggccatcgagggcccctggaccagaaagcgaagagggcrttgggggcaggaggcctgtggggccatgtgtgggggccgtctgggtggcgggagctgttggggcrgggctgagcgccctcagcagcccactggagaaagcgctgctggggtcctcgtgtggggcccagggcccgacgtggaagcaatggagggctgcagggggtggcagtggggatgaatgagtaaggacagagtgcagcctgggtctcagacrgggggtgggggacaggccacagagattccctatctcagcagagaggagacaggctcaggctgccacgccttgccaaaacccagcctggccaggccagcccggcaccttccacctagataagttgtgctgctccagagaaagagcctggggtcagagtggacctgcgatgcatggcacaacctgctggacagtggcgatgaggggttcagggacctgggcacccagaagcgggcacctgatattgtacccagcaaaactgctcctaataatgtcattttttctctctcttacaggcctcaggcccaggcccaaggccaagtgagagagcccaggccacaggacatgctgccattctgccaagagaggctcttctgggggccaggctgggactgggccccggaaaccaaaactccgtgccttacccagccggggccctcctggagccttcttggggtgttgtggctgggaacccgacaggcaccagtgccctgccaggcctggtgccctcctggaccgcctgcacgtgccagcctcccacctgcttcctaaaggcaaccctggcccacacccgcatgcgcccggtgcagcctgccaagggccagtcggggggtgctgcgtcctgccagtgtccaccacagctctgcctgcccttcagcccagcaaggtttaatcaaaatgcaatgctttgcaagtctttactgcttggaggtggctgagttgggggccctgggcaggggtaagctggcaggcagtgccatggcaggccagggtcccctcccatggggtctggcccccgttccagcatgtccagcccctgaagttggagtggggggcggtctgcctttgctgccactgccaggcctctgccctgcagctgaaacttggccatcacatcaacagaaaacccctcccagtgccagctgcccagcgtgggcaggccctggggacaatacaggtccacctgaggggctgcagggtgacacccagcagccgctgccccctcactgcccacccagcgagggcagcctacccgagcctgccccctgccaggtgtgtgccctgaggctggcggctggatgcgtggccaataaaaagcagacctagcccggtgtgcgactgtcgtgttcagaggctgcgggagtgggcggtggacgtgggctcccacaaacatggtgagcgctggacaggccccgtgtgaacactcactgttgaggggcccccaggccccgtgtgaacactcactgttgaggggtccctgggcccccaggcaccgtgtgagcattcactgttgagggtcccccagtcccccaggccaggggctgtccctggagccctcaggaggcagtaagaaacatctagaagagggcagacccagtggtgaaccgcatccaacagtggtgagatgggtgcagctctacaggggcgtaatttacaaaccaccagactccctggttatgtgtgtgctgcggtggtgtttgctctccagcagatcaartttgtgcaatgatccattttgagaatctctccgtcaccccaagaagtcctctcgcacccatcagtccgaccccttccccgtgctcctccccagccctggcagccactcacctgcactccagacgctccagatgtcatgcatgtctcctggcttccttcggctgttttcacgcgccatcctcacggcaggctgtatcaggacttcattccatttcatggctgaagcacattccattgcatgcagggaccacattttgtttgtctgctcttctgtccatggacatctgggttgcttccagtttggggcttctgtgaatcctgctgctgtggacatttgcgtagtcctcgtgtggatgctgctgtggacgtctgcgtcgtcctcgtgtggatgctgctgtggacgtctgcgtagtcctcgtgtggatgctgctgtggacgtctgcgtagtctcgtgtggatgctgctgtggacgtctgcgtcgtcctcgtgtggatgctgctgtggacgtctgcgtagtctcgtgtggatgctgctgtggacgtctgcgtcgtcctcgtgtggatgctgctgtggacgtctgtgtagtctcatgtggatgctgcgagttttcgttgctctggggtagattcgtagcggaggaacaactgggcgacacgctaagtttatgtttaactttttaagtaactgcctaactgttttccaaagcagctgcaccatttttcattcccatccatgctattgtttttcagttaaatagctccactcctccccctccccaccctccacagaactgccagtaaaactggactatggagtattgggtggggtcacctacaaggtcatctgcagcaagtgagatcatcgcccctcctgcctggagaggtgggactggggaccctgtgacaggaggagctgcccttcctggagcctggtttttctttttcctctgtgctccatgagaagtcagtttagtgggctacagccagcaaaggaaccaaaaccaacaggagctctgggggtgccttgcatggcgaggctccgtggctgcacgcgtgtatgcaggtggctgtgggtgtctgtgtgtcctgggccactgtgtgcgatggtcccactgggaggtgtggcccccaaagagtggaacccacaggtggacacacccatgcaccctcgttcttgcccaaggtcacacatcgagacagcagggcccagatggatggccccaagctcggtggctcccgtgctgcccacacctggggacaggcccactgtggggggtaaggggtggaggtgttctaattcgggctgagccgtgtgactggcaggggccccagctgttgggcctgggcaggactgtttttagaaaagccccaactccctgcccctacccgggcccgtggctatttatagtccgggcctggagaagtcagtgagtcactagcgttcgcctctgcagggtcagtccaagcccccttagtgaggtggtctagcatgtcccccagtcccccaagcctctatctgacatctgctagcccagagccccaggggtccccaggaagggctcagagctggtggccccccccaggccttggcagcacctccttgtctgatgggactttgtggttcctggtggacatttaacattgtcggtttctctcatctggaaacaaacctccatgacgctcttggtttctcctgttgcagtctgcctcttccctacctgcacagctctctgctgtgccccaaattccctccttgacacccccagacccactgccccaccctcaggtgcagccccttctcagcaggctccaggttctgccaaatctcagagccctccaaccctgctccagccccttcccaagctggggccggtggtctgttcacccccgaccagctgtcacccccaaggtggcactaggaagttcatgcatgaagactgcttttccactgaggccccactgactgcttggaacccatacaacggcattttccccgcaaggatgctgagggagaggaagtgtcgatgtgcccggtggaagaagaggggactggggacatgggtgcagggggcaggaggccaggcttcaaacagcccctctcccccaggctggggcacggtcaggtgccaagagaggaggggtggggaggctgcaggcaggggtgggcagtggtgtccttggctgcacctgaatcactaactcagtgtgagcgacctttgctgtgacaggcccaagctccactccttcctcacagggagtgtcccgtctccatggactccctgtcactagccttggagttgccctgagcccaaggagcctcgtggctccaggctctttggcaactgagagccgtcagggagggaacaaaggaccccgcctccctgctctgaagcaagaacctgattctcttttccgcccttggggccccaggacccttctcttggccaccagggctggcttcctccaagcctcatctacttgggaggggtggggcgggatgggtgagacaggacaaccagccgggaacacgggagcctcgcagaccatcgcctccctctggggcctagtccctccacaggctgggccgggaaggtctggtgtgggacctcttgggaacctgggccccacggtggcgtgcatccctgggggttgctcccatgccagccaggtgacgctgacaggatgggtccctttaccccagacttgggtgctgagggccggagctccatgctggagcccgcctgctcgctacagccaggcccgagccacagcgcgcccgggcgggacgcggggcccctgccgtggggcagaagtgcgggcagttgcggggacacaaagtcctcggagaggacgcgctgcgcggctcttcgcggccgccagggggcgcgcccgcgcccagggcactcggggttccacggggggcaggtgcgctcctcgagagtgcggaccctctaggtggggtgcaggacgcagctccccttttgcaaaccgcactccttccctggagggaacgaccacccctgcagttgctggaaccccgaagtcctgggcccggcaagggcttggtggggggtgaggtcgcggtgcacaagccctggtccccgacgggctagcgagaaactgcctccgttggcaaattcgtgggggcggctccccaggccatctgcctgcctggccgttggtccgtgcggcccctcacccctaaagtgctcgagactcaactgggcttcccgggcagcggcgagggggcggggatgtggcggccggaggtcaccggggcgtcactgcgcccgccctggccctcccccggcccgccccctgccccgccccctgccccggcccggctccatttaatggcgcggacgccggcggcggcgggctcctggccgggccagcgcagcggaagagccaagccagcatgtcggggacccgagcctccaacgaccggccccccggcgcaggcggcgtcaagcgggggcggctgcagcaggaggcggcggcgaccggctcccgcgtgacggtggtgctgggcgcgcagtggggggacgagggcaaaggcaaggtggtggacctgctggccacggacgccgacatcatcagccgctgccaggtgcgggctggggcgccgggtccctcccccaccgcccagcgagcccccctcccccgacccagacggcccctgtcctcccatgccctggccggtcactcacccgcttggatgccttccttccgggagcacctttcccagggccaccccacccacgcacgcacacgcaccactcacacaacccccgacccacacacaccgccctccttccacccacccctactccaccaccccggcagcgggccagggcacagctataaatacaagtcgctgagttggggacacccgatccttagggggtggcgcatgccatgggtgtgacgctggaccctccatgggggaaccagaggacccagccccaggatggtttgaggacccccaagacaccccccttcctcatttacagtgatcacctggggcctgtctgggtctgggatagggcttacctggctccccgcaaggtctgcaggtggtggagggggtaaaagctgcctgctgggtgggggtgaccccggtgagtcagccaaggagaggcagaggtggaagggggccaggccgtcctggggggcaattggggccgcgcctgagggagggtgcttgggaygatcctagccagacatgggagagggagggccacagacttctggccagggtgaccccgtggctggcagtgccaccgaggaggccagacctgctttgtcccccagggcccagggctgggcctctgccagccggcagctgctctcagcgcccccatctgttctgactgagctgcacactgggcactctctcgggccgccaccctggggctacatgccccatgccagggcagccaagtctgctgcccatgggctgacttacagctccaggcacaaaggggtcaactttgggatgcacgcgtctggggtttggagcctgcctggggctgctgccaataatggaacaagggcccccgcaccgtcccttctccgggttctgtggcctccttcctgagctccagagaggagggctggggcccaagacgaagggagtcagcccagcaccctgtgtggctcagggctgtccgagcccctcctgccggaagggactgtggcttcctagaaagttcttcctggaacrgtgggggacctccccccttgctctccgtcctaagcagcaggcaagcrcatccctcgctccagagatcccccaggtcctagaggtggtcctcagcccatgctccctccacactgcctctgccccgccaccttgtcctgggccgccagggggcatgtccagcgctctactgctcttcaccctccagggcgccctcagcgtggggcagccccggcccctgaccctccttagacctctctgctcccgtgaggcccaggcccctccctatgagctgccagctctggtgggcgccatgcacttctgcagggcgggctggggcccccacaggtgctgtacacagcattcacctggctccgcgctcccagctgtggagatggttctggatctgggcactccctgctgtgccccccacccagtccccccacagccccgctcactcgcagctgcacacgggagcacggaggatgcagcaggctggagcccatcccgcactccggccaccaggctgcccccgccaggccacccccaccaggccaccctatagcctgagggagcccctggctctccaagtgagtgggaataaaagaggtttgtccctggagcccacacctgtccccctgcagcctcctcacgagccagtgaggcaggatcatcctgaagagctccttcacaggggaacagaggctcaggcgtggaggaatgagtcactgccacatttggagccctcactggtgccacgtgcccaccatgatagcccagggcctggccctttgtccccacctgcgagtgcggggaccgagctggatctcagcggggcgccgctctgcaagggaaggtcagggactggtcttctttggggccccagccccaggctctctgcaagtgctcagtgacccctacctcacagtgcccatctctcctcctagcggtgggggttctcccctaccaccgggctcccagcacctcccctgttcttgtgcacaccatgtctgaccaccccatgtcgtcagaggctggcagagggtctggctggatctccccagggaagactgcgtctttcttacttggagtgtggatgcctgaagccagatgaaggtacccgacatgggggtctccaggcgcacagaggccaaacctcaccctctcactcaaggggctgagcagaggacagagcgagggccgagtggtccaggtggtcaaagtgcacgccgtgggcagagcgggctgggccgcatctgggaggcaggctggctgccaggagggctgaagctgccagccctggcaacaagcctgttctgctccccagtccccaaagggtcacctgggcctggggccaccctgggttttggctatgctccttccctggctgcccaagcctctggacacccaggctctggctctgcctgctgctgacgcctgcaccagcagagccatcacttcgagcccagctctcaagccccctggtggcccctggcacttggcaagagttgctgctttgctcaccctggacatggactttccactctgcccagaggtgatctggggctgcccaaagccccgcacggctcgcctcattcttttcccatcccggtggtttggggcctgtggtcagagtgcatctgggggcccctgagagtgtcgtcacctcccacagcctcccgccttgggtccacctttaggacctgtttcctgggcggcctcccttctccaggctgagcctacattttgcatcccccaccttctgaccacacccccacctcacacctcggctgtctttcctccattccagggcggctctgggtctgttcggctgcactatgccccctggccccactatgccatcttcctccttgcctgctcccctggctgcttccaagcctctctcccctccaggctgagtctcctctgagccaggtctgccctccctgctctgcggccacatcacatcgtctgcctgtctgtgctggggtcctgtgttccctctcttctctctgggcacggacaccccatcctacttcygagggggtccccaggtacctccgcctgtgcttcctcccttgcgtccatggcgtttccttcccctgcgtgctgtccagctcctacccctcaaatgggcagctgaaggcaggtgcacctgggtctcccctgccccctgttcccaggctggcagtgcccggccttcaccccctagttcctccttccatctccaagatacttcctctggataactgggctccctgccgaggaccacagggctccagcgcgccctggtcagggtttagaatccccgtccttctgctgcagtgctgacctcagggcactgggctgtttatgtctggccatgcccagtacacgggctgaaggggcctgccctgggtctccatagcgcactcccagcctcccgtgccctccaggtctagctagagccagtgtccagccagcagacgggtggaaagctatggccatgtatgcaggggtgtgagatcacagggtgtttctctgtggtgtggcagcgccaggtgggagctggcatcctgtgcattgagggcccctgtgctgtggctgttggggctctgggcaccctttccaaggggccatcaggtaacgctttgccttaggctccagggtgcaccagagaccttctgggagtcagaggggcagctgccttggccagggaatgcctggggttgcttccagaaagaggtcttccccctaccccacctctgcactgttgatggtgctggttactgggccgtggctccaggacagagggtccctgcagttacacacagccctgcctcattgcaggaacaccagtcccgggcagctgagacctgcacacctgtagcagtgacctcggttctgtcccagacctcaccccactaccaaaaggggcagagaacaattcctttgggttgaaggaatgaatgaatggtgggagcctgcaagcagagcccagaagggagtgaagcagtgtaagtgggtgaacccacygcaccacactggtagtcacaggtgtgtgcacactgggcgccagggccccttgctctgtgccgggcacagtcgtcgtacaaactgccattgagtgccagtgccaagaggttgggcccaggagcctcacggcctctgaaaagcaccgccggcctccccctgcgcttgccactctgctgccttcactgcctggcgtgagctcgctgacagccaggccctgggccagggctggggatggacacagaggcaggagagctggtcgctcccattccagggggagaggtgcaaacagccactccactgtcccctcctccccaagcctgcatgagagctgaaccaggaggtggtatagcatgggcctggcacagctagggccgagggggaagcgggcagagtgcagtggcgttgaggcacggcgccgtcagacatgcagtccgctaacgctgtggggaggagaaggctctggagcatgggaggtagcgagcctcgtccaggtgttgctgcaggtagggctgacgatgggggctgcattgcaggggagaaaggggcctccttgggaaccctgggccaagcagacgctgtggccagaggagtcatccatggcagtaaagggcctatggattgcagggcagagaagggcagtggcaagtgggccgggagtggagggggccctggcaggtcaaaggaggtcaatggacagcccccaagccaggcagatggcaggtggcatcccaaggatttagggacggggtggacaggagcaggacgatggctgcagggcaaggctgggacccgcacgggtgacaagctcagtgcaggggcagggcatgcgccatctgggcagtgtggaggtgaggagcaaggacaaagcctgtgtgtggagacgccttgcacgtgtcagcagcatggcgtcggcgtgggagggaggaggtagcgtcggcgtcgtggggaggagcgtggcgtcggcgtcgtggggaggagcgtggcgtcggcgtcgtggggaggagcgtggcgtcggcgtcgtggggaggagcgtggcgtcggcgtcgggaggagcgtggcgtcggcgtcgtggggaggagcgtggcgtcggcgtcgtggggaggagcgtggcgtcggcgtcgtggggaggagcgtggcgtcggcgtcgtggggaggagcgtggcgtcggcgtcgtggggaggagcgtggcgtcggcatggtrgggaggagctgtggggtggcaacccagaggcaaggaggtgggcagaggcccacgaacctggccctgaccctcagctcgtccccagctcacagcacagccctcccctggctgcctccaaggagtctccagytactgagtggccactccgtgccagckcagcccacccctcaccttcccagtgcctgtggaggcccaactagggtgacgctgggagaggagagggcttggaggagccacgggtcaaatgcaggaggccacacctgcctgcccaggaggactgcaggagccggatccttaacacctggaggggagcgggtgggtgcggtggcgtacatctgtaactccagcactttgggaggccgaggcgagcggatcacttagggtcaggagttcaagaccagcctggccaagtgaaacccggtttctactaaaaatacaaaaattatctgggcatgctggtgggcgcctgtagtcccagctactggggagggtgaggtggtagaatagcttgaactcaggaggcagaggttgcagtgagccaggatcacaccattgcactcyaacctgggcgacagagtgagaccctgtctcaaaaaaaaattccattgtttaaagctgtccaggctgtgtattttgttttggcagccctggagactatagatagatagatgatatggagagaggtgtagagagatatttacttataaatatatgtacatatataaaatgcctggagggaccagcaatggtgggaggactggggagtggccccgagaggtgctgcgggtgtgagggtgcgcacagcctcctggaggggaggggcctgagtggggcagtggagatagggctggccacagggccgtgccttccctggcccccagaggggtgagttgggtggacccgcagggacaaagcaggggtcagagctgtgtttggttcctgagtgggccttgtccaggatggagagagcctcttttcctaaactccctgccaccagggaggcagytggcacggatgtcccctagggactgtgagtgacaagccagactaggcagagagtgggggggggggkggggctcagtgtccgtgggggctcagagctgtgtcctgacccaagcctgcaccacagaggggaagaccccaagagaaacctggaggcaggtagagagcgccagggggccaccaggctcccttggtgcccctaactctgggcccccagcctggtctgagcctttgggtacaggtcactcaaggcaggtgttctgcaccatccatcttcatatcgtctctctcactcgcacccttgcatcactgtgcttctgagagttgggsgcttaccttaatctactgtccctgacctggcaaacagtggaaaggtggcatgatgtggccctgcagctgctacacctctaggcgccatcattcatgccatggctctgtgacagcaccccctagagttgtgcagtgtgcaacatgggtgactgtccatggcagctcacagcatgtggctcagcccattggccatgcagggggctcctttcctaggagcagcagggctgggcttcctctccacctgtaggggcagcagtgggcatcttaggtaaatgcaggactctgcagcccctagaggaccctgagtggtggctgaaggatggatgtgcccatggccttcccagagctcaggtgcctcagctctgctttcagaggagcagggcagccgaggggtgcctggcagagaggcctgccggctggacgtggggaccctggagcttggcctgaggggctgtggtgggagccgtgcctgagcagggctgtcccgtggcacacactcgccctggctcttctgcccatcacttatccccatgaggcaggaaagacagagtgagtgcggctgccctgggggctcggcactggggggatggtgacaggactcggggctcagggccgggctgcctggaacaagcagaccctgaggggccccctgcagcaggatccatggacccatctactgggccagcaggggccaggaaaggagaagagggagaccggtggggctggaggcaccagtgcgtctgtgcaagaggaggaagccctgtgagagggcagcagcctccggactgccctgcacaccgtgctgagaggcctggcgtccacctgcagcccaaggcagctccaaaagaaggtcctggtgcttctccaggaggcgaggctggccctgatgtttggtccctcctcatcggccagcctcatggtcagccttggctggtggctcccatggcaaggcagaccctggcctggacctgaaggctctgcctttgtgcagagccccagcctgacggtaccagttttcctttgttcccctttgtccagccctccttggatgcctttgctgtgggaatcccaggctgaagctggaggaaaggcaggaggacttcttgtccccagcctctcaccacgtgcctgtgcagcctgacgtcctgagacctcaactggtgatggggaggacagactggkgtctctctggggccatcgtcctgggctccccagaactgggagcccctgcggatcagcaggccccaggctcagygtcctgagctggctcctgctcccaggggtggcctggcactggccctgcggtcattggacacccactggcctacgacaagccgcgcctgttcctaggagcctgtgtttgcccccaacagagccagggtgtgcctagcagggcgttcctgggcctgttgacgtgggcactgggcactctgccatggtaggcagcacttggcctgactgccaggtcatccctcgacgcctgcccccccgcccaggcggggctgtgtacaagggataggcttcccttctctcagtttccctacctgtcctcagagacctcacccctgactgcccccaaaaggcagcagatgcagtcgtgggcatgaaggtactccatgaccccagcggagaggaattaccacatatgtgccgaggcaaggacagagtaagagtgggggtctccaggagggtgctgtgacccccaaacccagaatctgttcgagtcacgccagggcctgccccgtcccgatggactgaacctgtgcgcccagggctgactcagcgtctgctgagcagcacaggctgagagccctgcccatccgcccaggctgcagaagtaccctgaccctccacccccaccctgccttggcgcctggcagcattagctcccacaaggcctccaggtgccctcagaccaccctccctcctgccaccaggcttcctgcatctctccacctcccaggatccccacccagttcacccagcaccgccccgcccagagccactgtcctgaactggtttcctataaggactgggcccagccaggcagggccaggcagaagtcagggcgtggaggtggggactcctgccctgcgaaggggcttcagggctctgagtgctgcctaatctgccagtgtgtgaagttacgtcccaggagggtgagccccctgcctggcatctctggatctgccccccctctgtccccagggttgccctgccacgaggcgccggggctgtttccgtgtaactcttgtccagatgcatcgtgaggagctagtgcagagggagggggccgccatcacggagggtcctgcttgggcaggcggggaaaggctatgtgagacaccccactgccaggcttgtgagggtgggaggggagctgagacccctctgccgggcagagagcagtggggtgtggctgggagaatcccccatgcrtagacaagttgagggcttttctgccgggaggtgaggcaggaaggtggggctggatctgggctctggggtcctggggacagagtgggccccaaaagggaagtagtgaaggagagaccagaccagtctgtggggcagggtatccgtgtgtggccccccgcaaccccaccgggaccctgcttaccctccaggtggagctcaaggagagagggcaacaggaagggtcccccatgccatccagtggctggccagaagtggggctggagacctggccttctctcctggggcagagaccttctggggctccctccaggctctgtcacacygggcctacaggggtctcttayggtggcataaagaccaaaaggtgctgkagggatatcccttgccgttggtgggggcctggcttcaggggcaatgagcyatcatgggccatcagagatgctgcctcttcctcagctgtgaagcggggcctcctgcctgcacgtaggggagccctatsagccgtgccttgggactggagtgtccctgtatccatcatgccaccagcccacctgccctgcaggagcagagggtgggggcagcaggggacacccactggacctgtgccctgctgagcagagccaagcaaaaggcaggagggctttggttcttgccccacctggagagggtccctagcttatcctctagcttccactggcacaagaggcccttggggaagcgaaggcagtggcatccagggcgtggcacagtttgcttgtatcatgtggctgtctcatggcaggagggggattggagcctgcacatgctagtcccaggccctctccccaccatcagcaggaatccccccagagaggggagcctgtggctgggtgtttcccagaacagggctggctcagaatggctttttctttttcattcttagacgggaggtgcctgcccaaagggaagggtttctgctaaagtgggtgagggcaggtttggccgtgggggtgctgaattcatgttctgtgggagggttaggcctcctcattcctgcatgagaggagcgagctccagagcggggcccgcagctgcagagacctgcaccaagccacctggaggtgttggcaccagcctgggccagaccctccccgacccaggcccctgaccaaactgctgccctccttccaaggtgcaggatgcccacatcccagtcccgcacagacgcatcagagctggccaccaaaccagacaccccaaaatccaacagcagtgccctgcagggacagacgaagccccatgtgggtcagtccatgtccggrgggtcctcagtacccaagtgccttcagctcagccgggtttctgttccaggggggcaacaacgccggccacacggtggtggtggatgggaaagagtacgacttccacctgctgcccagcggcatcatcaacaccaaggccgtgtccttcattggtgagtgccctgccccgacctgtgtgtgagcaggaaagggggtgtcagccagcccaggagccccacgcatgggggcacggggcaccagagcctggtgatgactgctctagcagtaggctggaccccagcctccaccygccccaccaggcactgktgcacagaaacctgcatagccsgggcctgggctgggaacgcagctgagaggacacagggctgatgggaggaggggcagagtcacatccaccgcgcaggagcgggagtgcctgatccctgatccctgatccctgatccctcacatgcacatacttcctgtgtgggcatggagaccacacgcccatgtgcccgtgactccatgtgcatacctgtgagtgagtatgtgcttgcgacaggcctggcttctcgctgcgtggcgaccaggctgtgtggacaaggccgtgccctccccggccctgccgagccatgtggccgtcctcttgcctgggctgctgtggccacgtggcaggcctggttccagccccttcccagtccgtgctgcagagggacctccttccacatcgcctgccccctcctgggtccggacacagctcctcccctgcagccacctgtgaccactcagtgctccaagaggcgagccacctctgtccccagggttccgtggctctttccctccttctctcggtcagaagcctgctctgtgcaccctggcctcagctcttagcccaaaacccccttgctcagagaagcttttcctgatcccagtggccaagccagccaggccccttcttgtactttcccttccagctgtttccagacttcagcaaggccatccttgtgatgtatctgaccccttcccagcccgtcaggaagtgggggtcaggcgcctcaggtgtgtgcccagcagatgcatgggcctggacccattcaatgtgagcagagggaggaagatagcgcggaggtggctgccgcaggggccatgtgtggtcaggggctgagctggagtgactcacccaagaccatcccctggggtgcagacccagtccctggccctcccagcagtggggccaggacagtgtgggggcggtccctagttcacagcagggaggccctaagcagtgaggtggcctgcccgccatgtcgcaggagcccctagccctggcagactgggcagtagcgctggctggccrctccgggttgtgctgcaggaagcccttctccagccgccagcctcgtcctgcccagccctgggccccacatggcaggaaacaaggccaaagaggcaccgcttagcaagcggcaggacgtgccagggctcacacagacaccctgagcttgcaacactccgggcctctgccgcgtgtttatttcaggatgccgtggcatttgggtgaccttttgtgctcaccatggcttgcgtcgtctccgggtcactctcgtctggactgaagtcccgtctccctcagctgagcctgtgccatggccagcctcagcgggaactggcaaagggaaaggggttccttggggaggcagcaggggtttctgaaggcttcatcttcaagcaaggggtttagagctcaggagtgtatttgtgtttttttgttttttgtttattttgagacagggtctggctgtgtcactcaggctggaatgcaatggcacagtcctggctcactgcagcctcaacctactgggcccaggggatccccctgcctctgtctcccaagtagccaggactacaggcttatgccaccgcacctagctgatatatatatatatatatatatatatatatatatatatatatgcatttttttttttttagaaatggagtcttgctgtgttacccaggctggcctccaactcctggcctcaggcaatcctcctgcctcagcatcacaaaatgttgggattataggcatgagccaccatgccccaccagagcggtgcatttgtgacaatcgatgaacctacactgacaggtcatgatcacccagagtacatagtcacctctgggttcacacttggtgctgtacattctaccagtctggacaaacgtatgctgtgtatctgccactatagtatcgtacagaattttttactgtcctaaaacccccgagctccacccatttcattcatctctcccccctcaaccctcggcagccactcaccttatgctgtctcctcagttttgccttttccagaatctcagagttggaattgtacagtatgtcgccttttcggattggcttctttcactcagtaacatgcatttaactttcctctatgtcttttcatggcttgaaagctcatttcttttcagtgttgaataatactccactgtctggatggaccacagttgatttctccttttgtttactgatgggcctcttgactgctgccgagtttcggcgattatgaatagagctgcacatctacgcgcaggtttctgcagggacatcaatttccagctccttaaataccgaggaatgtgttttgcatccatcaccaccatccacctccagaactttcttatcttcacacactgaaatgctgaaatatcaaataactccccagtctccctctcccagcccctggcgcctcccattctactttctatctctatgaatttcacttttccagggacttcatataagcggaatcatcctgtttgtgtccgtttgtaactgccttatttcactcagcataatgtcttcgaggcctgtgtcagaatttccttccttttttaaggctgaatactcttccatcgtatgggtagaccgtgttctgcttacccattcatctgtcaatggacagctcttggctactctgaataatgctgctatgaacataggtgtgcccatttcatgctgggttgttttttgttgttgtttgtttgcttgtttgttttttgagacggagtctcgctctgtcacccagagtgcagtggcaggatctcagctcactgcaacctccgcctcccaggttcaagcgattctcctgcctcagcctcccgagtagctgagattacaggcatgcgccaccatgccaagataattttttgtatttttactagagatggggtttcaccatgtgggccaggctggtttcgaactcctgacctcaagtgatcctcctgcctcagcctcccaaagtgctaggattacaggcatgagccaccgcacccacccatttcatgctgttcttaatgtatgttttccagtgtctgggacacaactctgtctctcatgcctctgtctctcatgcaggcaacggggtggtcatccacttgccaggcttgtttgaggaagcagagaagaatgaaaagaaaggtaggtccaagctcctgcagacttgccctgtcccagacgcggtgccctgagcggttgttggctggagccttcctgagggtttctcccacggaggggactggcaggggtgggttcccaacatagctggcccagctcatcacccgccggctctacccgcgcagaaagcgagtgagctgggcaacccagaggcctcagatgctggtggcctcagcatcacggggccaggtagcacctgggaagtccaggaaggagccagggacctggaccagacacccagtgggaagtggggactgctggcctaactatgcctgcagggaaggatgtggctcctgggggctctgcggagcatctggccaggcacgcagaggccagacccaccagctgggggtgtgggcaagtcagacctagtgtgggcagggacggacggcagcctgagtgggtctgggaggacgctgagctgcagcctcaggctcaagggcgggacgggtgtgaaaagagcaagaatgtgattctggggacatgggcaccagggggtacccagactgaggccctgagggggcaggtcaccttcagagtggcagcagctagggaggaaagccrggcactcacaccagctctggcttcccagcctggagtgggcgaagcctgcaggcacgagagtgggcatcctggcggcggggtggagtgagggtccggragtctcagstggggaggagacaacgaggggcgggtctgccgcttgctgcgcaacagaggtggccctgtcagcctcctccctgcatgccttacctggatgggagccgggcgagctagcccagctctggcccctcacgtgtgagctgcagcgcacctgtgaacactgacccacctgtgtgccgtgtccccgcaggcctgaaggactgggagaagaggctcatcatctctgacagagcccaccttggtacgtttcccactggastacagggaacagcccctcctgcccccaccattgccagccggccctgctcctacatggccaccgagatcagggaagtccccaaggccttcttgctccacatggctccattagcttgtacattacccttttcaaagagcttcaagttgggagctgggtcaggggtcactagcccatttgcaggtggggagactgagccccagacactcatggtcacaccccagtttgtcctctttgaaatctcaaccacccccttcccaggagactcaggccagcaggaggtgaggtccatgtatacacatctgtyctctgcttctctcctgtctcctgctgccctcacctggcccgcccgacagtgtttgattttcaccaggctgtcgacggacttcaggaagtgcagcgccaggcacaagaggggaagaagtaagtctgccgggacacwctcaccctcggggagtcttctgggcccgtaagccggtagactgtggggcgtgtctggtcctgggcacarcgaggagggtacctcaacccactcaaagcccctggagaatggcaccgtcaaaattccacagcgcatcacccaacccccggacgagccagcccgtctctctctggggttgcacactgtccttgccggctgccactgccacgcggctccccccaggagtgcataagccctaccgtcacctgtcacacccaccacctttcctgactccacacggccccagggaagacacgaggaacactaaagcagtttagtagaacctcagatgtgccaaggacacaggagtgaagcagatgagtgtcctgcctcagagaggtgatggtcacacacttacccactcacactctcacacaggcacacactcatgctcttacatacacaccacacgcccacgcatgctcgcacagttatgcacatgtgcacacgccacacaagcccacacacccacgcaaatgcacaaaagtacacacagccacacatgcacacactccacatgcacacatccacccacaggcacacaccataccagtacatccatgctagtgcgtacacccacacacgcacacactcacagctcagccagacacaggcagcaatggtgggcactggagtcatgagccggcgggggtcatggcctcagtgggatgcctgagctcctcagggctcctgggttctcatgggtacccrctccccatctttcagtataggcaccaccaagaagggaatcggaccaacctactcttccaaagctgcccggacaggcctccgcatctgcgacctcctgtcagattttgatgagttttcytccaggtacctgagccgtctgcagtccccggggaggatggggagaagttgccggaagggactgtggctagtggggagggccctgaggaccagcrtggaccatgacagggggtgatgatgactgtcccttgtgcagattcaagaacctggcccaccagcaccagtcgatgttccccaccctggaaatagacattgaaggccaactcaaaaggctcaaggtgaagtcggggccgcartgtgggggctgcggaagtgctcctccagggaggctggatgtcctacctggtgctcgttgaacacccttggggcacayctgatactaggcattgttatgggctggccaaccttcttgggacgcaggcctcccctgccccaggccacaggctcactctgctgcttggcccttccttgcagggctttgctgagcggatcagacccatggtccgagatggtgtttactttatgtatgaggcactccacggcccccccaagaagatcctggtggagggtgccaacgccgccctcctcgacattgacttcggtatgtccgggagggtgtgcgtgccaacgacctttcgtgcctgccagggaagacccagctgcggagagccgtgggaaccgatgggggagggaggggcagacccgctttccaaggccacagtgccatccatgcccgcggaaatgatcctcgtgtccttagtgttcctattgtcagcaagggaggggagaggagaaagggctgggctagagatgaaagaacagggtgacaaggtcaggggtggggccagggagcctggcaaggtgggtcagagccagcccttccgatggtctgtacagccatatcccgtcctcacccccacgggcgcaccagcttaccctcacccccgaggcggcctggtcacctcaggccatgctgtgggcaactttctccctcctctcaccccagactcttttgtgagccacatggcccagcacacagcacccattcggccactccmccaggacaggccaggctggygaccccacggagggggccccccacggtttgaactgcccactgccctttactgagaaggcctcttgggccggktggaataatctacagggggtgacaggtagccccctaaacctgctctgtcttgcagggacctacccctttgtgacttcatccaactgcaccgtgggcggtgtgtgcacgggcctgggcatccccccgcagaacataggtgacgtgtatggcgtggtgaaagcctataccacacgtgtgggcatcggggccttccccaccgagcagatcaacgtgagtccccagcccctcgggaccccgtgggaggacagggaggccaggcaggggtgccgggggtggggtgagcagtgccagggtggaggctctgcggaccttgccagtgccatctccccatctcccaccagggcgcttcctgccgtgcaggccaggggagagcttagtaagaggcgctggggtgggcctgttcccacggccacagcacgtgagctcacacggggtgcrcacatgcccacacgtacacgtgacctcgttcccctcggagtgtgtgaggcccacaggcaagtgcggacgccttgcagttcctcaggacaccctcattcggggtagctggtggactcaccttggctcagagaggacactaagcatcttccctcagccttgtccccaggttggggggtcctctgtcacaaccaagctagaattggggctgaaagccaacccccacaaccctgcccagctctccagccccaggaaggtttctggaagctgctgtggccccagaatcctcaggagaccccagccttcctctttcascctcaacctgtgacccttggtagggcaaggacatggcccttgtgcctgagcaggaggaagggcaggtgctgggaaagccaacacggggaggggcggacgccatccaragaggcttgagagggtgcagggatacatatcgggagatacacacacccctgacccccaaagccaagctgcagggccaggcccgcctcccccagctgcccatggcaggaggggaagacagcaaggctgcccgtgccttccccagctcacaaagcctagtggtctggtgtgttcaggaagagcgctcgccggctcgggtggcattgtgggccaggccttgcccattgtgagcctcagctgctggacaggcttaccaggggtgtggggatgtccgggagctggatgtaaggactgtcggtggaggcggggcaccctcagggattctgagagctgtgtgcagggaggagggggagcagcagggccaggctgcacaaggctcccacgacagctcacatgacgtcctccctgttctcatgtaggagattggaggcctgctgcagacccgcggccacgagtggggagtgaccacaggcaggaagaggcgctgcggctggctcgacctgatgattctaagatatgctcacatggtcaacggattcactgcgtaagcaacccatgctgccatccccactgggaccgtccctgactcccgacacctgcagaggcaagcagcacttgacgcaggggctgagggccaccaagtctccttggacaaggtttccactgatctcgacccttccacwaagcacggcccagaggttagcggtatggaggcctgtgcagggtgtgttggagccagccgtaggagcacaaactcccaccccagggctgatgccgtgaaggatgagggcatcccggcacttgtgagaggttaaaatgcttcatgtggagagcggaagtacccaggacgaaaggatgcactgtcatcctgctagaaggacggcagcatgggtgccggcctgttgaggcatccgctctgcaggcccctctgctttccacagactgacccaggctgcccagctgttcgggctgtctcccagggatctgaaagaggctttgtgtgaggggtgggctcacagcttcctttccagctcagtcagacaggccaaggctgtgagtcgcacatctttcaccagggttgagagcatcagccaaaattcctggagaattaaccagacccctgctaggtgggtatagagctaatccggcaacgggaagcagaggaaccgagtagctgagggtgtggcrtctgggatccgtgaccctcactttccttgtgcgcratgcagggttcacggcgcagcctcatcacgtgctagggccagcatggaggacaggcagggtcagcagtgctcagcagacccatccatagcctgctgcatctggcgccccttcaggctttgcccacggagggaggaaaaacagagcccatggcacagggcctggtgccgaagatggaccaggaagggaggctgccatcattggcatcagtgggtgggtgggcagggaccaggaaggtgactaggacaagggtgccatgctcacgggctggacacagggcagtgctgggccctaaacacggctgtgctgtggggaaagtgcacgtgtggggacgggaggggagaagtggagcctgggggagcaggggtcccggggggcactcgaggtacaggggacttggaaaggcagagatgaggtgcagggcgtgagcagaagcccccaccctctggcatgtttgtcaatggcgcttttttgggatcacttaatctctcttttccactcagtgtaaatcagcagtccctaacttttttggcaccagggaccagtttggcgggagatgattttcccacagacagggcaggtggcaggggtgtggcggcggatggtttcgggatgaaactgtcccacctctgatcttcaggcattcgattctcacaaggagcatgtggcctagatccctcgcatgcacagttcacaatagggttcaggctcctgtgagaattgaatgacaggaggtggagctcaggccgtaatgctagcttgcccgccactcatctgctctgcagcccaattccaaacaggccaccaaccagtactggtccacagcccagggactggggacccctgctgtaagtaacagaagcgagaggtcaaaagcaagcggaagaaaccccagcactgctgaccacttcttgggtttgcccggccccttggctttccacaggctggccctgacgaagctggacatcctggacgtactgggtgaggttaaagtcggtgtctcatacaagctgaaygggaaaaggattccctatttcccaggtatgtgaagtggggcaaccgttctgcctgttgggccgtttcatggtattggaatagataggacctgtgacttctcagagaggggtgagttcccacgttcacaggacacagggcaagcagcttgtctccagtgaccagcctccatcatggcttttgcctctcacgggtttctccccacarcgttccccaggaggcctggctgggcaggggtggctgtaggccccttccagtgttttgggaatggctcagggggacagactactcgcctgggaccctgggggaccttcagctgccttgaggaaaaggcccacctgcagggagccacgggaggcacacaggagttagtggatgcggtcggctctggaagatgtaaagctctatgcggacgtacaggatgactatttcatctgagaaaatacgctttgtggcgagatttttaagacctaaccgggatccctgctccatgcaccccttcttctggaaagcatgaaggaggtgccattttcctgggtttcacaggtttcagtttcgtgtgcgtctggatgtgccccctcgacctcggtccagggtcatgttctgaccctgttccccacaatggcttcctcctcagcagccctgggcgagctgctcctggctggtctccactcagcagatctttgtaggccacacagggccacttggctacaggagccatgtgtgtccttgcaggcggtgtccctgaccctcctgacccttgacctttgagaggctgcacttgtgaggactgcaagctctcctcatggtggtccagggtcccagggggacacgcaaacactgcctggctccaaggctcaaacacacttgcagcgagaacccgtattccagcatcttccatctgtaagggtggttgtcttctaccaggagccacagagtcctgcacagggccgggatccctgccctctgggagttgatgctcttggggtgggaggacacagatgcttcaggatcccttagtgcttcaggattctagagtctcagaatttccaagccaaggcttggagtgcctcagctgatgtcacagtggaggttctagcagagtgggtagcacatatgtgtcatgtccctctggtctggaaggcgtgtagtgtctgagccccactgctgtcccctgctyaccacccaacactgagaaaatcaaactgggccacgtgcccacttgctgccttccttgcagctgagtccctaggcaaggaggccctggatgggggtggccgtgtcaccaaatatccgcttccctggtgataggaggtctgtgggccccactcatctcctgtgtgcttcccccagctaaccaggagatgcttcagaaggtcgaagttgagtatgaaacgctgcctgggtggaaagcagacaccacaggcgccaggaggtgggaggacctgcccccacaggcccagaactacatccgctttgtggagaatcacgtgggagtcgcaggtgggtgccctgcatccccagccaccctccctgcaccctggatgccccaaggggcccacatcccagcgcagggcttggtgagcaataagaaaaccaagtgtggtcaccaagcgaatatattgcatggcaggaggggaggacgactcggagctggggcagtgtggctccgggctagggtgtgggtgtgaccttgccgggagcccctgcctctccgcatccagaacaacagatgggacacatcccagccatatgagtgtgtcatgtttaccctcataacccagaggtgtttgcacctacagagaaagggtctgcagggagagtcactaagtaactaacgttgccatttccaaggaagaagggaggagactcctgttttccgctgcgggaggatcagtcccccaacatgcactaccttcataacttaaaaattagaactgcctccatttggagagaaaatagccccttttaccatttgaactacacagaaagatacgacactaaagacaactttttctgaactttctgcctccagtgtgtatcataacagtcttttctgctctctcagtcaaatgggttggtgttggcaagtcaagagagtcgatgatccagctgttttagtcrcagactgagctgatcccaacaggccctggcagygtctggacttgtgtaaacagcagcagtcacgttcctcggccgccacaaccaacaccaaagcaggaaaaccattttctgtacttttatatttctgttcaacctgttggtttctacaatgattttaaacattggaaagccagccttgtgtatatttttaaaaattatattcaaaatgagccaaagtgctcagagaccttctatgacacattagtgtcacatggttgcgtgtccagccgaagcagtgtaataaacatctccaatggccactgaatgggagcagttgttacatgtttgatttgactttgtctttattgcttttaaacactgaaagacaacaattcactgtgacaggagtctggaggatgtagcttcctaagagctgcccatgttttttgggtaacaaagccaagccttgtgtttactcagaaaattaaatagaacaagcccatataagagaccaagtcaattaaatatggtttgttttgagacagagtcttgctctatcacccaggctggagtgcagtggcgcgatctctgctcaccataacctctgcctcccaggttcaagcgattctcctgcctcggcctcctgagtagctggtattacaggggcccgccacgacgcccagctaatttttgtatttttaatagggatggggtttcaccatgctgcccaggctggtctcaaacgcctgacctcatgattcacccaccttggcctcccgaagtgctgggattacaggtgggaggcaccgcgccagcgtgtttagtttttaaaatgatattaaggccaggtgcagtggctcagagttcggagtaagtttagaaaaacaactgcccttccagtatcctttcaaagacagggaatcctacagagacgccagtctggcggggttagaccctgacttttgagcactgtggctgtcagctggtctcgctagcccaggaagttcagcaggctctactgacacggcaggggcctgggggcataggctgggttatgagattcctgtgactccagggatgcaagcaacttttctagacagtaccaagaacagccctcagtgacttgagcggcaggaaagccatgcaacygcacggcyctgccccaggccacgggcgcttccttcctcaggccggagtccctcagcagcactagccaccttgagatggggtgggacacacaggcagaagccagcctttgagtattcccagatgctctcctttcataacacagcaagagagacaaaaagggagccccgaggcaggggtaagctcctggggagagggggctgcgggctttctctactcagccctcacatctacactgggccctcaaagtcaagtcatctaaattgaaatttgagagctgcaaaataggttttcaaacctctgttttgtagtagctgctaaatcttccaccagaacacaagttgtcatcgttttctttcctctcgggatggaaggcaggcgtttcacagggtaaaaagacaccaacgcagaggggaaatacttctcccccagcaccaactcactcacttccacgtgaaccagagacaagaggctctggcgtctgagcggtgggttagtgcagacaggcaggtcaatcattcgggtctccacccccttcttctcagtagcagatgtttggagggtctgagtggttatagtaaggggctctctccacttttcatcaataacacagccccagtgtagatggggtcagagtggtctctgttgaatacatgggtaaaagacaaattagtgataattgtagtgaattcttatcattttatgacaatatttattcagaatggcatccattctgaataaaagtgggactttctggtacagaagcagggctcagtcattcttgacagtttctagctcctcacctcctcccagttgcccagggtggtccacccagatctctgctttatacacctgccagctggtgaccagctccctatgggacacctggatacaacctactggactcagcccctggcccccacacccctcacggactgtgcagacgtgccacagtgaccaccacccagtcacagcaagatgccatgaagctgatgcctgccggctcgaaatcacaccccacaggaaatgcacttgagtaacaacaccctggacctgaatacagatttggtgcacaggccgctggctcgctccccaccatctggctgggcctgcctgttccccgtggctccccctccccactggcctgtgaggaacgctgcctcctcgctcccgcccggttgagtcacacacctgctctgcagtttcatgtgttctgctgtgctgcctcctccagctctcacctgacccttgcacccaaacctcactctcctggtcaggactctcccagagagaccatcatgataggaatgaactgatcactgctcagacaaaagccacaggctgcctgccaaagcctagaagcaagctgctggtgagaggaatgccagcacagctggatacacaggcctgaggccatcagccagggtcaggaggcatcccacgagagcacacactgtaaccccatgcccaccacccccagagccccatcagggaagggccaaagtttacagccactctccaggagagacctcaagacgaattagaggaaaactatgacaatgattttgtttaatgataattttcctttttcctagcactctggaaagctgccagtttctttacaagttaaccatcaatctgatgcagggcaggtgagccccaaaattggggcttaaccctggagggttcatggcttcacccaggaaggcattcaagggtgagccagtggtgttagccaggcaagtttgttaaagcagcagaatcctacccagcaacctctgaggaaccggcatgtggcctgggggacagccccactccataagctgcccgatgttctgtatctgtccacgatggtgatgagaccctaggagagttgcaagtctgaacacagggaaatctttagaaatccccacgatccataagattgaaaacaatcctcctctctgagaacttcatctatttctgggataaaccaaatctgtgtttagtcacacgtgactccaactgagtaactttcaagtcatttccctaaggcagaaaaaattctccattatgccagcaaagtggcaaggaagagccaagaatgcttgatcccatccccaccacagggaaccctgcacggcaggaggagaaaggacatctaagctggagactggtaaggtttcagccacccatggctaggaaagcatacactgcctctgagggggcgtgggcagctgcaacacgggagtcacgtgggaggggtttgcgggactccaggcatcacctcttcacaccggaggcaacaccgatggagtcgtgagaacatagtccaggtgtgtccagaattggtgggttcttgatctcactgactttaagaatgaagcactaggtcctcacagttgactgttacagttcttaaaattgttatgtctgcagtttgttccttctgatgtttggacgtgtttggagtttgttccttctggcagactcacggtcttgctggcttcaggagtggagctgcagaccttcacaaggagtgttacagctcttaaggcagtgtgtctggagctgttcattcctcccggtgggtttgtggctttgctggcctcagaagtgaagctacacaccttcccagtgagtgttacagctcataaaaagtgtggacccaaagagtgaaagagcaaagccccaaacatgtggcagaacaccaacacgttcccactgcctgctcgggcggcctgcttttattcccttatctggccccacccatatcctgctgattggtccattttacagagggctggtctgttttacagaaagctgattggtccgtcttgacagggcgctgattggtgtgtttacaatccctgagctagacacagaagttctccaagtccccacagagcactgattggtgcatttacaaaccttgagctagatacagggtgctgattggtgtctttacaaaccttgagctagacacagagtgctgattggtgtatttacagtcccttagctagacataaaggttctccaagtccccaccagattagctagatacagagtgctgattggtacatttacaaaccttgagctaaacacagagtgctgactggtgcgtccacaatcccacagctagacataaaggttctccaaatccccaccagattagctggatacagagtgcccatgggtgcatctacaaaccttgagctagacacagggtaccgattggtgagtttacaaaccttgagctaaacacagtgctgattggtgtatttacaatcccttagcttgacataaaggttctccaagtcgccgctagactcaggagcccagctggcttcacctagtggatcccacaccggggctgcaggtggagctgcccgccagtcccgcgccgtgygcccgcactcctcagcccttgggcggtcgatgggaccgggtgccgcggagcagggggccgcgcargagcccacggcaggggggagactcaggcatggcgggctgcaggtcctgagccctgcctcgyggggaggcagctgaggcccggtgagaattcgagcgcagcgccggcgggccggcactggtgggggacccggcgcatcctccgcagctgctggcccgggtgctaagctcctcactgcctggggccggtggctccgattgcggggcccgccgagcccacgcccacccggaactcacgctgacccgcaagcgccacgtgcagcccgggttcccgcccgcacctctccctccacacctccctgcaagctgagggagccggctccggccgcggccagcccagagaggggctcccacagtgcagcggcgggctgaagggcccctcgagcgcggccagagtgggcgccgagagcgagcgagggctgccagcacgctgtcatctctcacagggcgaagcccacgccacaggacgggtcggttctgtacccgccggggcaggggagagccgcctctggtgagcagaaccccggagaagggacgacgcgggtgcacctcgcggcatggggacaccaagtcagacgaacccgctgtgcaagaacattttccacacagcggcgcatacccccgcccgggggcgctcggcagccgcacgcggccctcagagcgcagcccccacacgcctttacttctggaaggcggagaccgccacagtgaggagctaagccagctgaggcaacacagaaaaacccccgttcctacccaaaaccaaaaagcggggcgcggaggcgcgcgcctgcggtcccagctaccggggaggccgagaagggaggatcgcctgagcccgggaggcgcaagctacagtgagccgagactgccactgcactcagtctgggtgacagagcgagaccctgtctctaaaggggaaaaaagagctaggaagaagcgggctgcctcttaacttcggagaagtaaatgaggaactataaccagtgtctaccgtttaggaaccaaacaaaagctgacaggaatcccgccaccgacccagccgccccagactttgccctggcctatcccgcgccgctcctcaaactagacccgccccgacgtcgccctggcctatcccacgccgatcctcaaacgaggcccgcccccgatgcacaagctccgccctcgttgcaccgtcctgaccctcggcctcgcccccgccccctggctcttcccgcgcagccgaatgccgcgacctggctcccacccttcgtcgcttcgcgccgcataggaaccccgcccctagtctctcctcccgcctatcctgagcggcgcgcgcacaaatctctcccacggacccgcccaccctgatcctcaacctggcccctggcctttcccgcggcgtcgagtccagtacaccgacgcacgagtcccacccccgatctctccctcggcctatcccgcgccgctccgcgcaggagtcccgcctcccacttcgcccgcagcctatgacgcgccgcgtcgctccctctcctcaaacccgctctcgcccgcggatgggcgcgcrgctgtgacgtcacggcgtcgttggtaaggggctggcggccggggagctgcgtagctcccggccccgcggccatgcccaagcggagctgccccttcgcggacgtggccccgctacagctcaaggtccgcgtgagccagagggagttgagccgcggcgtgtgcgccgagcgctactcgcaggaggt

SEQ ID NO: 95524 - DNA, 44293 bp, Homo sapiens
  misc_feature (1)...(44293): n = A,T,C or G
cgagcggaggcctgcgtggcctcctgagcagcagctgactacccgtctcatgctggacgggacccctgggcgggtggacatgagaccactgttggccagggacgccgtgcggaggcctacgtggctgcctgagcagcagctgaccgcccgtctcactgttggccagggctttgtggcgtgggtgttttccagtctgcctggagcagcgagaagcagctgtgcagactggtggcggtgggagggtttgctgggactgatggggacaccggccagcttgtctggtgtccagcagccctgccggacttggcctcctgtcctgtcgttgggagccctggctggggctgctttgagcaatgacgctggcccagagcagcttcccacatgaccccagagccgagggtctgccctgtcctaggttaggtcttcatggtttagagtaaaaccgtgagggatgttaattatgggcattgaagacttaaggttttcctaaatttttagtgagcagtgattggccttcaatacttgtgctgagaggaattttaagccaggggaagtgtaagaaaatgttcccattcaggagagattgtgttggagtttctttcttcctctgtatgtattttgtggtgtccacctttaaccacgtttcatccaaaacgatgatgcagctttaacatgaatgttacatttttattttcaaggaattattatctatgttccctttgtaaaggaaagataatgttgtaaatctttttattagataatgtaaagatgtatatcagtatttttggatcatgttatagattatggatatattgtttaataaataaagtattttttggaacaaacaattgaaagtgcatctgtattagcccgttttcacgctgctgataaagacatacccgagattgggtaatttgtaaagaaaaagaggttttttttaaaaaaatttttcttttctctttttttgagacggagtcttgctctgtcacccaggctggagtgcaatggcactgcatgatttcggctcactgtaacatctgcctcccgggttcaggtgattctcctgcctcagcctcctgagtagctgggactacaggcacgtgccaccacgccctgctaatttttgtatttttagtagagatggggttttgccatgttggccaagctggtcttgaactcctgacctcaggtgatctgcctgcctcagcctcccaaagtgttgggattacaggcgtgagccaccgcacctgacagaaaaagaggtctggtggaccctcagttccacatggctggggaggcctcacaatcatggcgggagacgaaaggcttatcttacatggcagcagacaatagaaaatgagagccaagtgaaaggggtttccccttaaaaaaaccatcagatctcgtgagacttattcactaccacgagaaaagtatgggggaaccacccccaagactcagcatcattttgggaaacaggtgtaaaatgtcagtgttgtgcccagagacaggtgtgtgaaattgaattctgaaggggtatgcagtgattggagagtggtttgcggagcttgctggctgggggtctggggaggaccctgtgccttaccttgggtggttgctcaggaagctcagtggccagtgctggggctcaagttgacttccaaggaagacgtgtgagaatgctgcagttgctttcttttttttttgtttgagacggagtctcactctgttgcccaggctggagtgcagtggtgcaatctctgctcactgcaagctccgcctcccaggttcacgccattctcctgcctgtgtcccgagtagctgggactacaggcgcccaccaccatgcccggctaattgtttgtatttttagtagtgacagggtttcaccgtgttagccaggatggtctcgatctcctgacctcgtgatccgcctgcctcggcctcccaaagtgctgggattacaggcgtgagccaccacgcccggccgctgcagttgctttctaaaggagtactgtgcttgctctggaagggcaagacttaccgtgttgcacttgccttttggaagctgctggagtcagcttaggctctgtattagtccattcttgtattgctataaagaacgacctgagactgtgtaatttataaagaaatgaggtttaattgactcacagttctgcaggctgtacaggaagcgtggtgcggaggcctcaggaaacttacatcatggcagaaggcggaggggaagcaagcacgttttaccacggcagaccaggagagaaagggagcaaaggggaaaggtgccacacttttaaacaagcaggtctcctgagagttcacttacctccacaagaacagcaaggggaaatctgcgcccatgagccagtcacctcctaccaggcccctcccccaacattggggattatgggcggggacacaaatccaaaccatatcaggctgttatcacaataccacagactgggaggcttaagaaaaatgtcttatatttctggagattggaagtccaagattaaggcgctggggttgtctggtgcctgtccagggctcttcccttgggttgtgaacactgccttctcatgtgtgcctacgaaactgactgggagagggagctctctggtgtctcttattttacggatgcctgtcctgtcggatcaggaccccacccttgtgactgactttaaccttaattacttcttcagaagttccatctccaaatacggccatattgggggttacagcttctgcatacgaattctgggggacacaaacataacaggagctgatgggtctcaagatgttgccttgaggagtgcattaacagaacccgggaagagcttggtcatcacgaggtacagtcggcctctcacccaccgtccaggtgaaaaccaatccgtagactggagtcctcgctggaagaggaggctgagatgctgggggaaggccccacaacgccgaaaccagcacctgccatctcgctggaagaggaggctgagatgctggggsaaggcctcacaatgcggaaaccagcacctgccatctcgctggaagaggaggctgagatgctgggtgagggccccacaacgctgaaaccagcacatgccgtattttcctccaagcattctctgagggtacatgtgggctttgctagggtgactgtgccctgggaaaaagaaaaatcagttgttattattttctgagacagttttttttttttttttttgagacagaatctcactctgtcgccaggctggagtgcagtggcgtgatctcagcttactgcaacctctgcctcccaggttcaagccattctcttgcctcagtctcccaagtagctgggattataggcaccgaccaccatgcccagctaatttttgtattgttggtagagacagggtttcaccatgttggccaggttggtgtagggaccagccccacagggtcggtgggtctctccccatgtgcggagacgagagagtacagaaataaagacacaagacagagataaaagaaaaggcagctgggcctgggggaccactaccattaagttgcggagaccggtagtggccccgaatgccaggctgcactgatatttattggatacaagacaaagggtcaggataaggagagtgagccatctccaatgataggtaaggtcatgtgggtcacgtgtccactggacaggggcccttccctgcctggcagccgaggcagagagagagaggagacagagagacagcttacgccattatttctgcttattagagacttttagtactttcactaattttgctactgctatctagaaggcagagccaggtgtacaggatggaacatgaaggcggactaggagcgtgaccactgaagcacagcatcacggggagacggttaggcctccggataactgcgggcgagcctgactgatgtcaggtcctccacaagaggtggaggagtacagtcgtctctaaactcccccggggaaagggagactcccttttccggtctgctaagtagcgggtggtgtttcttgacacttttcgctaccgctagaccacggtccgctaggtaacgggtgtcttcccagacgctggcgtcaccgctagaccaaggagccctctggtggccctgtctgggcataacagaaggctcgcactcttctggtcactcctcactatgtcccctcagctcctatctctgtatggcctggtttttcctaggttatgattgtagagcgaggattattataatattggaataaagagtaattgctaccaactaatgattaatgatactcatatataatcatatctaagatctatatctggtataactattcttattttattatactggaacagctcgtgtcttcggtctcttgcctcggcacctgggtggcttgccgcccacagttggtatcgaactcctgacctcaggtgatccacctgcctcagcctcccaaagtgctggtattatgggcgtgagccaccgtgcctggtcagaaaaatcagttattttaggggatggtatgggtggtaatctttatgggttttgaatcattcctaatcccaggggtccaagatgccactggcctgctagtcaaagggagggcgtgtggaggtcaggtggtaagggggtccacagacctcatctgtggtcgtctttccagttcctgaatgtgtaattgcaacagttacacttgacaatgggcaaacaactcccacactcatctgcagagcaagggccagccaggtaggaagggccaggtggatgtctcctttccagggttgtatgaatgattcacctgggaagaaggtgagtggcctctggggatgtggttaaggaggacaggaatgactccatgcaactgctgctccagagcctcatcaccaggacaaatccagctcgccggttttctgtgtgactaccaggacccatctgctgtcacgggcgtagcctccacctcttgcacagctccgcagtcctgcctcgggccaagtgtggtctcctgctctctgccctcatctgctcagagattggcatcctctgcacccgctagggttctatggaattgggtgagctgaagtaacaagtgctttgggaggccgacgcgggcggatcgcttgagtccaggagttcgagaccagcctgggcagcacatgagacctcatctctacaaaaatacaacaacaacaaaaaattagccgggtgtggtggtgcacgcccgtagtcccagctacttgggtggccgaggtgggaggatggtttgagctcgggaggcagaggttgcagtgagctgagatcaaccccagaactccagcctgggcaacagagctagaccctgtctcaaaaaaacacaaaacaagtgctggcgatgcctcaggcaggggatcccaggccgggaggctcctcgggacagcagttactgcgtcaggagggcaggagctccccaggtgtgcaaagggtttgagggcacggagggctgaacaggcagaagggacagggaggcaagaaaacacctgcaggaggcagctgccccctaagctaaggctggggacccaggaggggtggtccgtgcaggagctggggaggccgctggggaaaggggcgccccctgggctcggcctcggaggagcgggccggcccccaggtccctcggccgagcccacgtcccgggcctcgttctggagaaccctccagctgctgcttgggcgtcttgggctgcgctcagcctagtcccttctctacctggagggatgcgcccgacagccggcgcgccggaggcctcaggaaacgcaggacgaggcggtggccgtcgagcctccagtgccagtcggggcggggcttggacggcggggcggggactgtaggcgcgcagggctgggcctggagggcaggcggggcggggcccgttaggcgcgcggggcggggcttcggcggtggggcttcggccgctgggcggagccgtcaatgcgcaggcgcggcgtcgccccgcccactccggctcggcggctctgggcctgcggcgggcgctgcgggttgnnnnnnnnnnnnnnnnnnnnnnnnnnnnnnnnnnnnnnnnnnnnnnnnnnnnnnnnnnnnnnnnnnnnnnnnnnnnnnnnnnnnnnnnnnnnnnnnnnnnnnnnnnnnnnnnnnnnnnnnnnnnnnnnnnnnnnnnnnnnnnnnnnnnnnnnnnnnnnnnnnnnnnnnnnnnnnnnnnnnnnnnnnnnnnnnnnnnnnnnnnnnnnnnnnnnnnnnnnnnnnnnnnnnnnnnnnnnnnnnnnnnnnnnnnnnnnnnnnnnnnnnnnnnnnnnnnnnnnnnnnnnnnnntggaacacgggggggcgtccgggggatcccctcggggggcgagctcggaggaacggggtcctgggcaaggtcccggcgaggccgccccgagcctgcgcgtcgctaagtccaggcctgctgcgtggggcttcgcgcgctcgcggggttgcggcccgggcagggggagggcccgggtgctcggagccttcccttcgctgccctcctgccccctccctgcttctgcaagcgtgtttcaatttgtacaacgtgcataaaacatgaaattacccttggccacttccaggcgcgcagccagcggctccctgcccttcccctccgggccctgagtaccggccccccaccaaggaggagcccgaggtctccgtcccggcggcgatgctgccccgtcggcctctggcgtggcccgcgtggctgttgsggggtgctccgggagccgcgggttcttggggtcggccggttggccccctggcccgcagaggctgctgctccgccccggggacccccgaggtgccgctgacccgggagcgctaccccgtgcggcgcttgccgttctccacggtgtctaagcaggacctggccgcctttgagcgcatcgtgcccggcggggtcgtcacggacccggaagcgctgcaggctcccaacgtggactggttgcggacgctgcgaggtgggtgaggcttgggaagctgcggcggttccgcgtccctgctccgctgcgccttcccgtggaggcttcaaagcgggctgagaacaacctggatgggggtgccagcccctggctgcgctgagaggggcgtgtgcaccgccacaggctgctggaatgaatgaccacgaacgagtcgcttagaacaacccaagttttgttgttgttgttgttttgttttttcttttttttaagacggagtctcactctgtcgccaggctggagtgcagtcacggagtttcactctgtcgccaggccggagtgcagtggcgcgacgtcggctcactgccacctctgcctcccgggttcaagcgatttgcctgcctcagcctccctagtagctgcgactacaggcgcccgccaccacgttccgctaatttttgtatttttagtagagacagggtttcaccatgttggccaggatggtctcgatctcttgacctcgtgatccgtccgcctcggcttcccaaattgctgggattacaggcgtgagccaccccgccctgccaacaacccaagtttgcctggcgcagtggctctgcctgtaatctcagctgccctggaggctgaagccaggagttcaagaccagcctgggcaacatagccagaacccccgccccactcacctctaaaaataaaaataaataaataaaagtagccggcccaggattgaaaaaacaaaaagtaaaaaagttactccagcccaggagttccagttttagtggactatgatctcaccactgcattccagcctgggcaacagagcaagactacatctctaaaacaaaacagaattcccctccccaccaaaccccacaagtttgttctctaagctctggaggccaaaagtgtgaaatcagggtatcacagggctgcgctccctccaaagcctccagaggaggctccttcctgcctcttgtagctctagctcctggtggccccaggtaccaaattactccagtctctgcctctgtttttcatacaggtttttcttctctgtgactcttctccagttgtcttataaagacacttctcattggattgagggcccaccctaatccaggatgatcgtatctcagtactgtcaacttaattacatctgcaaagaccgtttatccgttttttttttttttggagatgaagtctcactctttttgcccaggctggagtgcaatggtgcaatcttggctcactgcgaccttcccctcctgggtgtaagcaattcagcctcccaagtaactgggattacaggtgcccgccaccatgcccggctaatttttgtatttttagtagagacggggtttcaccatgttgaccacgctggtctcgaactcctgacttcgggtgatccactcacattggcctcccaaagtgctgagatgacaggcatgagccactgcacttagctggaccgttttttctttttgtttttttgagacggagtctcgctctgttgcccaggctggagtgcagtggcgtgatctcggcttactgcaagctccgcctcctggcttcacgccattctcctgcctccgcctcccgagtagctgggactacaggcgcccgccaccacgcccggctcattctttttgtatttttagtagagacagggttttatcgtgttagccaggatggtctcaatctcctgacatcgtgatccgcctgcctcggcctcccaaagtgctgggattacaggcatgagccaccatgcccagccccattttttcaaataaggtcccattcacaggtcttggggcattgggaagcagacgtatctttttggagcccattaggtaagatgcagggctcctggccaacaatgcctgctcctctcctcccactgcacttctgcccagtggcatacaagtctgtgcacgaatgagggacttctcagcctctggggctggcacttccttttggtaacagtgcccagttttctctttttttatttatttttttgagatggagtcttgccctgtcactcagggtggagtgcagtggcacgatctccccttactgcaacctccacttcctggggtcaagcgattttcctgtctcagcctcctgagtagctgggactacagctgggttacacgcctgtaacccagttctgtgggagatcgcttgagcccaggagttcaagaccagcctgagcaacatggtgaaactctatctctacagaaaattaaaaattagccgggtatggtggcatgtgtctgtgtgctaaaatagtaaagcgaggtagaagagaattggttgactcttaatttacaacaaaatgatatatttaaacctgtagaactggcaccaggtcctggggctgaacatagggtgtgctgtcattgggaagatctggaattgtttttatcttttttttgttggcccttgtagaagattgaaattattaagaacactcagaaagtttccagaccgtgtaatctgggagtgcagcgtatgttaaaacagttcagaaagttagcaagttgaactggggtctaggctcagataatggaagcagctctttccctgcagaaaggctgggagtcactggaaatcgctggaccaatggtcactgtgtaggagctctcttgagtggaagggcccccaccctcaccctgctcccgaagtaaggacccctctggggcgatctcaagctgctgccctgagtgcacaccatggcccagggcctgtgggctcacgaatgttgtccccggaggcaggtgaggatggacgcccaccctgggcttggctaagtcgggccccagtcctggctcagcactgctgtctgggtggccctaggcagatgaccctcagtgcctgccctacaaaatgggacttggagccactgcctcaggaacaccgtgcgggtaagtggggcaggaacctagcgtgagccttgagcacaatgcttgggttcccgtgctcccagcctgctcggaggccagcaccctgggctatgccgctgctgccctcatgggcaagggacctccccggggcatgcaggagcggggaggaagctgtaactgagattgaggggtgaccacgctcttcctctcctctgccttgcctgagcctgactgggcaagaactggctgtccccctgggtccccgctctctggtcagcacctttttgggaatccgtggccatggacaccctgtcctgctgcagggccgcccctcggtgtctgtgtgtgcctgtgggagggcgccttcctctgcgtcctgctgccccgagtttggtgagggcgaggctgaatttcactcatgtttgagtccacaggtttggtcctgaatgtctgctcagtaggtgtttgctgatgtgaggcttagttgttgaattttaggtgaattatcccttcatgtggcttgcttttggagagagagcttgtctagacttctgaaaactcattaagcatcatattcaaaaatctagaccatttgctcaggatggatgctgcagacgtttagtgagcacgcctgcactggcaggaaggtgggagcttcgcggtgtgaaaacaggctgggcccctgtgtcacctctggcggccttgcccccatggccccctccgtctttgtggggctcccatcgttaacactggaccaccgggagggagccctccttttcatctttcccgttagaaggtaaacatcacaggagtgggaaattctgtgctcattctgtgtctggaacgcggcctggcctgcattcttggggggtactcatgtttgtgttgagaaccctgccacaggcgcgtcacaagtgtgtccgagtcgaaagctttgccatgagtcctggggctcctgagcccactcgggacagggacgcagtgagcgcaggtgccagggttccctcaggtgccgcactgaagtgtcgggccgaggcccaggtgcccagcaggcccctctgcaaaaattgctcatttgatgaaagagasataagtggctttctgatcagaaaagcaaggtggacaccacagcctggttctcagagctccacgaagaggtgacaggcwcccgtgactgcacctgctgcctctctgcagcccccatcacctgggaaagtcgtctcaaggaaacccaaaggcagaaagacgcctgctcacttggggcagcagtggttagcaacaccggcgaactagctcagagggctcccactggtcacatccaggcattcagcaaataaggcggccaagacttatagcccagtgaataaagtgagaagccgagagcccacatcactgtgaataagcagctacataaacacgtcagtgggagcgaagggaaagccctccctcgtggcagagtcagctaagaggccgggcgcggcgactcatgcctgtaaccacagcccttagggaggctgaggtgggtggattgcttgaggccatgagttcaagatcagactggggaacatggtgaaaccctgtttctactaaaaatatcaaaattagccgggcatggtggcaggcacctgtagtcccagctgcttgggaggctgaagcaggaggatcgcttgagctcaggmggttgaggctgcagtgagctgtgattgtgtcactgtactccagactgggtgacggagtgagaccctgtttcaaaagaaataaaaggaartgtaggtggacagatggatttaggaaaatcaccagttggcaaccatcctagtaactgatttggtctaggataatcaaagatgttaatgggtgaagcttgaggagcaacaggatgtccacatagtctcaagcgtctgcttgtgaggtgcacacacatcacgaaaggaagtgtggtggcgtggcaggagggaagcctgcagacatcccgttaccgtgggaccgagccgacctcaccacaagtgggtgggcaaccttggagctgccaatgcctggcctgtgggactctcatccatgggcccagccttacccacttctgcacactgtgcccagtgcccggcccaccacctcccatgtgggacctagttttggtttttttgagatggcttcttgctctgtcacccaggctggagtgcagtgttgcgatcatagctcactgcagcctygacctcctggrctcagatgattctccctcctcagcttcccaaataagatcactctctgggggctgggcatggtggctcaygcctgtaatcccagcactttgggaggccgcagygggcggatcacgaggtcaggagttcgagaccagcctggccaatgtggtgaaaccctgtctctactaaaaatacaaaaattagccaggtgtggtggcrggtgcctataatcccagctacttgggaggctgaggcaggagaatcgcttgaacctgggagggagaggttgcagtgagccaggatcgtggcacttcagcctgggcaacagagtgagagtccgtctccaaaaaaaaaarctcgctctctggggcgagtgaccacttgcctcatctgcagctccccccacgctgtctcataggrtcttcttcctgtcacaggctgtagcaaggtgctgctgaggccacggacgtcggaggaggtgtcccacatcctcaggtgaggtggtggctcccggctcccccagccttccctgttgcctgtgggtcatttcctcatggagcctgtgggcagctggggtgacgcggtgcgaagccagccgatgacatcttggtttgtgtgtctcagtgtttgttctgtggtttttcggtgctatctcaatgcatctgtggtgtgtaatcatttccccccatttggcaatgcccatgcccatttcttggcactgtctgtaacagcaaagctcctcccccatgaacacactacagggtggcactggtctccgggtgtccatgactgtggacagtgctttagatcatcctcagcaggtgctttggggcaacgtgcacttactctgttaaactccatccctgggacttgctgtctccagggtttatttcatgtgtggggcttgctgtctccagggtttatttcatgtgtggggcttgctgcctccagggtttatttcatgtgtggggcttgctgtctccagggtttatttcatgtgtgggacttgctgtctccagggtttatttcatgtatggggcttgctgtctccagggtttatttcatgtgtggggcttgctgtctccagggtttatttcatgtatggggcttgctgtctccagggtttatttcatgtatggggcttgctgtctccagggtttatttcatgtgtgggacttgctgtctccagggtttatttcatgtgtggggcttgctgcctccagggtttatttcatgtgtggggcttgctgtctccagggtttatttcatgtgtggggcttgctgtctccagggtttatttcatgtacatgggcagattccttttcccagagcacggaactttggtttctccaaacccctagccactgggtgtgctctaggctttggggctttgcaaaggtgcaggctggttgggagggaggtatccttgggcacacgtctgggggataatgggccgagggtggggagatgcaggcagagggtggaaggcagtgggggcagtgcggtcgaggaaccctgagctggaccctctgtgagcatggtgtgaacgggaaggatgggagccgggcgtgtaggacgttctgtcctttgagggaagccttgtaggacgtcagaatcggggcctccacttccgtctccctgtgcacagctttcggattggcctctgtccttcctcagaatccctcacatgcgtgggctggggaggagcccccgctgaggctgcaggcagggcagggtaatcaggatttggagtcaggcactggtcctgcggcgtgtccttggggatggtggcgtaggggtggggacagagccccaacgtccctcctgtcctcatcccaggcactgccacgagaggaacctggccgtgaacccacaggggggcaacacaggcatggtgggtggcagcgtccccgtctttgacgagatcatcctctccactgcccgcatgaaccgggtcctcagcttccacagcgtgtctggtaagcctgtgccacccgtcggggcccaggagtccctccyggtgctggtggagttcttccttgccagcgtctgcaactgtggggtgcttgggtgggtgaatgagttagggccggcgctggggaaagaaccagcgtctgtagcctggccgcctagccccacctcgcccggcccctccagacatgcgtgctggtgagggcttgtcattctggtcccttccgactccatcccgctctagaggtgtgtgaggtgcagagtggcatgtgtgaggggatcctgacccagggtgccagggcgtggcaggcatgaggggatcctgacccagggcgccagggcgtggcaggcgtgaggggatcctgacccagggcgccagggcgtggcaggcgtgaggggatcctgacccagggcgccagagcgtggcaggcatgaggggatcctgacccagggcgccagggcgtggcaggcgtgaggggatcctgacccagggcgccagggcgtggcaggcgtgaggggatcctgacccagggtgccagggcgtggcaggcatgaggggatcctgacccagggcgccagggtcctgctctggagctgggcctctccccgcaaggccgggctccaggccccggtcactctgtggtcgggcgcctgcactgttgggtgttgagcagcatccttggcctccgcctacaaggtgcccatggcacccccaacccaggcattgtcccacatgcccagggcaggatcagccccagctgagaatcttccctcttctactcctttccacgagtgtgtgtgggggtgggaagttttttcctctcttttcatgttactcattttttttttgtgtcaccataattataaaggtcctgtgaggcccagatgttttcgtccttgggccagcgatgtgggggtgcctcttctcctcagccctggcgctgaggctgatgttccttctgggtggcttgcctgtgcaagatgggggttgggactcaccagcccgggggcccactggaagccaagtgctgcggcagcctggtcactctctgcaggaattctggtttgccaggcgggctgcgtcctggaggagctgagccggtatgtggaggaacgggacttcatcatgccgctggacttaggagccaagggcagctgccacatcgggggaaacgtggcaaccaacgctggaggcctgcggtttcttcgatatggctcactgcatgggactgtcctgggcctggaagtggtgagctggggcagctgcttggtgcagaggtcgccacggggtgtcctctcacggctctcatgggcccacgtggtggcacaggtgcatggggcccctcggggtgggaggtcttggttcctggccctgggcccctcaaggatgtgygggctacatacacccccatcctgagggaggcctggccctgccctgtcctcccacgagagggtgattttgtgtccactgcctcggggccacacagagaggatgcagttacaggggacaccgccccggcagtggtgggcttctgggagccgggtgtgaaggaaggctcatccagggtcagcttcgtgaccttctgctgcccactgttcctccagggcccctctgtttacccgcaccctcaccagccgagtgtcacaggcagagctctctgtcctgtttacccaagtggacgaagcaaacacaaaaccatgctttggtgccatccagtaaattatgacgcttcagtagcttttttttctggccagccactgattatctttattgtaaattacttttttgcactcatgagctgtgtaggcctccgactcacagtaccagcacacaggactcggagaggcccacagctcgggagctttgatgccttatggctggtgggtccagaggtggctgggtcctgggctgggctcacgccctactcccagggagcctccccactgcccccgaccccgggcgtgccccctgggcagtgagctgctgtgtgtggagggtgtcactcgtacrggaggaaagtccatccttcagcctcttggcatgacctcaggctgctgcagaagtgacacctggccccggaggcgaccgacgtcttgtcaggaggctggcaggtgggtgaacgtgcttctcttygccccaaggtgctggccgacggcactgtcctggactgcctgacctccctgaggaaggacaacacgggctatgacctgaagcagctgttcatcgggtcggagggcactttggggatcatcaccacggtgtccatcttgtgtccacccaagcccagggctgtgaacgtggctttcctcggtgggcttcctcgatgtgtgccttgagatgggtggttgggctcgagcgtctgctctgatggtgccactgttggtgtgaggaaggggatggagggaccccccsccaaggacagtcggttcccgtgtctcctgacatctctgcttccaaaggaatcaggaatccaggacctggccttcctggtggtcatgggtaaaggtgtagagtgaggcctctctctgtctctggtcagaggacacttcatttcataagaaaacaggcttgtgttgcctcattcaccccatcgtgttggttgagtagcttgtggagtaaggttgagggacatgctgtcatttggcatcagttcaggacaccactcttagttactgtggggataaagaattccctcctgtaatggggggcttccccagtcagcccagactgggggtctcagcagacctgcctgctgctgtgtctccacaggcctgcttcactcacagccacttcttcggttctcctgggacctgcctgcggctcctttcttgcttcatttgaatcgggcgggtttatccagcatttcctcctcaggagttcagaagtcgcacagcccggcagtcttcgcgcgggaggtggcgggtctagctcaccaactcccagttcggtgtcttgagctgccrgaagcttgggcagccctggaggatgctgagactccgcatgcttgttccttcagccacttacatcttcttgttgtgatgtgtgttccgtattttaagcaatctcaccaggattattattttatggccactttctctgccctccactctcttgtgtccgatcttcygtctgggattatgttgcaaacatatcctcgttcatttcctgcagtaaaggtctcctggtgaccacttcttcacttctggcgtgtctgaaaatacctttatttcatcctcattcttgaaggctcttttccacaggcgcatggcttcaggctgttgtttgttttcttttatcccggtggaaacgctgacccgctgtcctctggcctcctcgctgttgggaactttgctgtcggtagctgctgctgtgaagggattctgcctctctcctggccccccttgggccacttaaagatcattctttctgatcttctaaagttttcagtgtgtggtgtgtgtgtgtacgttctttttcatctccttggaattactgaatttcttaaacctgtggcttggtatcttttaccagttctagaaattcttagccattattgcttcagatattgtctgtgttttcctctccttttgggactgtgattcaggatagaatgtctcagtccgtcttctgtgtctcttaatctcccctccatattgtcatcatcgtgtctctctgtgctgcattctgtgtgatttcttctcatctgtcttccagttcacgaatgccctcttctgctgtgttttatttgctgctgaacccctccatgagtggttccctccgtccattgagttttacattttgattatgaaagtttttatttctaaaagttttgttatttttgtcaaatctgcaatgttactttttatagttttctattctaggtattctcaagctcaccatttgtgtctttaaacatagtttgacgtctataatcccagcactttgggaggccaaggcgggtgggtcatttgaggtcaggagtttgagaccagtctggccaacatgatgaaaccctgtctctactaaaagtacaaaaattaggctgggcacagtagttcacacctgtaatcccagcactttgggaggctgaggcaggtggatcacgaggtcaggagtttgagaccagcctggtcaacaaggtgaaaccccatctctactaaaaatacaaaaattagccgggcatggtggcggacgcctgtaatcccagctacttgggaggctgaggcaggagaattgcttcagaccataaggcagaggttacagtgggctgagatcatgccactgcactccagcctgggtgacagagcaagactccatctcaaaaaaaaaaaaaaaaactttgaataattttttgtgatgttttataatcaggcaattccattttttcaagtctgtgtagtctgtgaaagttttttttagagacaaggtctcactctgttgcccaagctgaagtgcagtggtgtgatcatagcccctgggttcaagccatcctcttgagtagctgggattacaggtgcacaccaccatgcctaggtaattaaaaaaawttttgtatgtagaaacagggtctcatgtaactcctgggctaaacgatcctcccactgtggcctcctaaagtgcgggggttataggtgtgagcctgagccrctgcacccagcctgtgtggtctgtttttagtgtctgttgtttctgctggttcatgctcctggctccttagtttcttgtgtgcttggctgtctgtggcagtgtgcagctcattatgtttgaagaattatttgtaggggttcctagatgccaaagacgaggtaccttcctccagagagggtttgcttttgcttttgcttttgctaggtgtctttgggtctgttcagcctgagagtgaccaagttcacaggatgaaattctgtgaaactcccaggtagcaagtcagtgtagggctgtgtcgggctgatccatggtcatgatttatcaggagagtgtttttttttttttttacattattcttctgtatttttttgagagacaaggtctcrctctgtcatccaggctggagtgcagtggtgcaatcgtggctcactgcagccttgaactcctgcactgaagggatcctcctgcctccctagtagctgggaccaggtgtgtaccaccatacctggctacatttttaaaatygttttatagagacagggtctcccatgatgcccaggctggtcttgaactcctgagctcaaacaattctcctgccttggcctcccaaagtgctggggctacaggcatgagcacctgcgtcgggctccattctgcttttttctcattctgttcagccatttcccctgcagtcttcggggcaagttggttgggacaggcttgcttctggccctgacttctaagatgtggccctgtgggggtctcctggattcctcactctgggtaggctgggaagcttgaggccaaacctgctagcggggcaagggctgtcggccaacagcgttgacttggtgctactcagcccccaggtcaggctcttccctcgctcttgatgctcttcagcgtttttttgtttttgtttttgagacagagtctcactcttgtcaccmaggctggagtgcagtggcacaatcttggctcactgaaacctccgcctcctggttcaagcgattctcctgcctcagcctcccaagtagctgggattacaggcgcccaccatcacgcccagctaatttttgtatttttagtagagacagggttttgccatgttggccaggctggtctgtgactcctgacctcaagtgatctgcccgcctcggcctcccaaagtgctgggattacaggtgtgagccactgtgcccggcctcttcagcggtttctttggtgttttttggcccagcgtttgtggtgttttcactgggcactgggtcacgtggcctagcccattgctgctgggtggaggccccttctcctggatctgccccaatcaggccttgcccgcttcactggtgcccctcccaccatggctgccactgtcctcccacagccaacccagccatcagttctcattgcccctctcgcccattgcctccggcacaagcctggcctgtgatgctgcccccacaccgcctcctccccgccctccaccttcagcccctggtggggctcctcaccacctgaccccggaacggctggggcagccttgactgcttctgccgacttactctctgggyggcagtgccatctggatcggtggttcctcttcatccaggttttctgtgttctgctctgatcccactccaactgcagtcacctgtgtgcygcccgcctgtggtcctgggagcccgaggccagcccggctgccgcatcctgctcttcgcactccaggtctcagayaggagtcactcgcctcttcgtgccacgcccacgtctaagccgggtggaacaggccctgtgaggatggycctggtgtccctcgtgctcgtgggctcggtccagctctccagggccccagtcagccctggctcctgctctcctgcagctggggcgacttccgacgaggcactcttgtcccacttcctggggattcctgcccactctgagcaagatgcccagtccccaccgccagaccctccaacaccaccaccacctcccacaccccagccctctacgcgtctgcagccacaccccgacatggtgctcgggtcacaggccttgaggtgctcctgtgtcacccagtgcaggtgtctgcccccagcctctgcgcctgtgagaccttctctctggaaaattcttctctgatatccacatgcctttgcattgcctccctgtctcgccctgaaaggtgggcacgggccccctcctgctgcagcgtctctggggctgcccgcctgcagacatctccactcagttcctttccatctttgcacttgagggtcggcttccccagggcagcggcctcactggtagcccccaccaaccctggagcactaacacgcctgttggatgaggtcctgagtgcagggaagacctgagtgctgattgtgttaagagaaatgcagccattcccaaaggctgcctgttgctggctctgtgtttgcagaattcccaagatacgccccctctgagtcccactgccgtctcaggtgctgtgtggttcttcggcgccttcccctcctgatttgatgctggtggtgacaccaggcgtgcacctgyccctcctgatctgatgctggtgacaccaggcgtgcacctgcccctcctggcatctgatgctggtggtgacaccaggcrtgccctgcccctcctgatctgatgctggtggtgacaccaggcgtgcaccttctcctgatctgatgctggtggtgacactaggtgtgcacctacccctcctgatctgatgctggtggtaacaccaggcgtgcacctgccaggcaaaccytgggctgtttgttgcagtgccagtcctcgtgctcctcgtggctgcccagctcacccacccacatgagtcgggctgatgttgctgctttgaagggggacttgggtgggctgggtttagctccgtgtggtgcttgacatgctgtgacccgtttcaggctgcccaggctttgctgaggttctgcagaccttcagcacctgcaaggggatgctgggtgagatcctgtctgcattcgagttcatggatgctgtgtgcatgcagctggtcgggcgccatctccacctggccagcccrgtgcaaggtactgaccccccacacagggggcagctggtcctgcagctccttctgcacgtctggacacatgggacggctcagagaccccgggtgggcggggggtgcccgggcgggcgggtggggggtccctgggcggagcatggagtggccgttgggctcaygtgtaagaaagctgctcttaacatatttaggacaaagaacaggctgccctggtcctgtgtaaggtttgtagttacacagatttcctgatcttcygcaggaaggacgggaaggaactaagtggcyatttttggtgagctgggagactttctttccatttcttcttttctttgttttcccatgttgctttctgtaagcacgtttttcttttatgctgggaaaaaagccaataattttttgttgttgggggatggagtttcgcactgtggcccaggctggagtgcaatgtcacgatcttggctcactgcagcctccacctcccggattcaaaccattctcctgcctcagcagcctccacctcccgggttcaaacgattcttctgcctcagcagcttccacctcccgggttcaaacaattctcctgcctcagcctcctgagtagctgggattacgggcacctgccaccacactcagctaatttttgtatttttagtacagacagggttttgccgtgttgtccaggctggtctcgaactcgtgacctcaggtgatccacccacctcagcctcccaaagtgctgggattacaggtgtgagccactgtgcccggccaaagacgactttttaaaccttctgaaagtcagcttaaccagagagctgtgtgctccgcaggctgcctgggtccttcttggccacgaaagatcagtggttgctattacagctgttctgcccgagcagccctgattcttgccctggcagccggagcctctgctcactctgccttccttgctcacttctagagagtccgttttacrtcctcatcgagacttcaggctccaacgcaggccatgacgctgagaagctgggccacttcctggagcacgygctgggctccggcctggtgaccgaygggaccatggccaccgaccagaggaaagtcaaggtgccctrtgtcctgcttgcaggtccccgctctctgtccgtccagtccagccttgtcttgggatgcctggaacggtcattggtgcagcctagacagtgtgggatgtggctgaaatgtgactgggtttcatggctttgagagagtagcctctttggatggaaaatgtattcctggtgtctaggccattttcattaatatttaaaaagtacttcctcccsaccatgaccctccccaaccccatgctgtgggatgagcaaggggactgccccattgctggtcccctgcagcctgtggttaagcggccagtcagcggcagctccgcatagagtcgtgtggaaggagtggaggcaggaggagcccctggggctgtggaggcttagcctggacctcgggagtcctaggatgggcagttttccttccctaggaggaaggggcgttgactgtgtgaccagatgatttggccttttgaggccaaaggaaggaggggcaaggcctgggcagggggagccctcggtcaccgtcaccggggcctgggcagggggagccctcggtcaccgtcaccggggcctgggcagggggagccctcggtcaccgtcaccggggcctggryagtgggagccattggtcactgttaccgggacytgggtgggaggagccctcrgtyaccktcaccggggcctgggcagtgggaggcgcccttggtcaccgtcaccagggcctgagcagtgggcgcaggactttactcccgcttagttgatttcaggctcgtgttagcctgggtgttgcccttgccatcttcccccctcacctttgccgcctgactgtcatgattccagtgcttctgggcaaaacggtgtctgctcccaagggctggggtgyggtcggctgggctcacttgtgtgtcctgatgcccagcccaggggcgtcctctgggcgaatggcagctgtgtggtgccatctctgttgactgaggcatgatcaagtgtgcgtccttcctaggtctctgcctgccattcctgcatttttctaagtggactgtgacagtcagctcccttacattctgccgcagtaacaagcaatccccaggccccagggaccacacgaacagaggctcaccctccctcgcgttccgtgtgggtgatcgctgtggctgcatgtgctcctgtggcttccagtccaggggcccgggctgaggcagctgcccagccagtcagtctgttttcccagcagaaagagcaggacagccgccggggattctctcagcttctgcttgagatggggcgggaacgtgagcccaactgcccttggtggtgcgggtggggaccctcatcccgcactggctgctttgctggagtggcagtcagtcatgcagcccccacaccacccccagggagggcgaccctggcaccccagcctccacacatcagcccccatgcccccacaaaggaaggctgcccccaacacccccaacctctctaccagcccccatgccacccccagggcgggccgtcctccatgcccccagcctctgcacatcatcccccacgccacccccagggcggactgtccccaaygcccccagcctctgcacatcagtccccagcccctccacagcctggtccagtcctagacctgtgccttgaacattaatgcccagagccgggttcatgaccaggacagggcmgaayggggctggttctgtgttcacaaagtcacctccagacgcttcctgggacgggttcaggagacgccttgtgtgtctgtcacctcgttctggctcatgctcgacgggtaggtaatctggcctttgttttctgcagatagcaaaacgaccctttcttaggtgtgcggctcgatgagttgacccggatatgcggttgtgtgcagttgctctgaggcttttctgtgctgttgtccggtgttggcgaggctctgggcaggtcctgaggcttttctctgctgttgtccggtgttggcgaggctctgggcaggtctgggcaggtcctgaggcttttctctgctgttgtccagcattggcgaggctctgggcaggtcytgagscttttctctgctgttgtccggtgttggcgaggctctgggcaggtcctgagccattctgctttccactctgtggtctttcccttctgggagccctgggtttttggacatgttgagacaatggggcttgcgcaggtccagccgctgccgcgggggccctgtgttcaacgggggacactcagccctgcccaggccccgctgtagcctcagcccacccgagtggaagccacactggtcgcaccagatgccccgggctcctctgagtagtgaccacggcgggtctcattggcactgcctatccacccgtcacgtgtcattcagttagcaaacctgctagggagatgcctcctgtrccctgtgcctgccgggcgacagcagtgaccagggcgggagaagccttgccccataaactcacgcagcagaaggaacaagctcagcccatggcccctcagagccaggaagcgccggggaggagggcagggccaggcagggtcatggggtgtgccggggagtgccgggagggccggaaagatgaccctgaggggtcatttcagcaaagacggggtgtggggagcagaacgtctggtgcaggagcaccaagaccctgaggggcgcgtgcctgccatgttctagaaccttccagagatggtgggtgtggagctgagtgactgaggcgtgagcagacaagggtagagcccatcttgtggccacggggacacatggggcggccggtctgatgaggaggtaagaaggcctcacaggcagccgatgcccgccagaccatggaggcgaaagccggcctcgcagccgtgcccgtgcggctgtgacgaagggaccgtaggaggggctcttgctcagggcagggcgtgacccaagggtctgatctgaccgaactagctctagaagtttgtaaaaggggccgggcacggtggctcatgctgtaatcccagagctttgggaggctgaagcaggaggatcacttgagcccaggagtttgagacgagcctgggcaacatcgggagacttcaaaaaaacaaaaaattgatggtggggaaatgcgggaattttgggcgccggccggattcccagtggtggcgaggaggtggtatttttttaagtgtcagtgtggcattgtggttgcctcaataaaacagagtctttttttgtcttttttttttgagacagggtctcgctctcacccaggctggagtgcagtgacacagttgcagctcactgcagcctcgacctcctgggctcaagcaatcctcccgcctcagcctcccgagtagctgagtctacaggtgcccaccaccaaacccagctgatttttattgtttttaagagacggggtctccctgtgtggctcaggctggtctgaaactcctgggctcaagtgatcctcctgcctcagcctcccaaagctctgggaatacaggcgtgagccactgcgcccggccaagtgtttctcttagaatttcctgaaatgatagggtctctggaggggcaggtgctgggcttgagccctgggtaggaccctgcaggggagaggtggtcctgcagcccacagaggatggctctgtcctgttcctcatggtgcagatctccacaatggaagttcgaagcaagcaaaagccacgcaaaccacaggccgatctgtctgagccctaggatttggcccggttctgcttcagccaccagcaccgtctgctcctcctcagaatccttcctcccccgtggcccgcccgccgtgtccctcctcctccacggcccgcccaccgtgtccttccctcccccgtggcccacccaccatgtccttccctcccctgtggcccacccgccatgtccctgcctcccacccgacatgccccttgagctgcctgggccctgctgttgtccccactgcctgtgtgactctgcgcccccttccctaccctgccccaccctggttcagggagcgtccaggcccattctcatcctcagggccttccctggcccttgccactctgtgccgtgtcatgacctgaagctgcaggtgggcgcctcccccttccgtcatggctgtcccccttctgtgaggtgtcccasccgcctgattgccggagtcccagggtgctcggtgctgtcgtggagcctgggacattcactgtctgggattgattccagggttggagccacacctggtctggggcattcgctgtcctgggtcagagcccctcctggtctgggacattcgctgtctggggttggagccacacctggtctggggcatttgctgtccggggtcggagcctcacctggtgaagatacagaacatgctgctgccctaaccccgtgtggtgtgccccctgtccccgggtgtcgttcccatagccagcccttgtctcatctcgtctcatcctctagatgctgtgggccctgagggaaaggatcacagaggcgctgagccgggatggctacgtgtacaagtacgacctctccctccctgtggagcggctctacgacatcgtgactgacctgcgcgcccgcctcggcccgcacgccaagcacgtggtgggctatggccaccttggtgagcggcgccccggggccgcggccctgtgtgtgctgggtggtgggccccacggtcaccgtcacccygccaggcttcgaggcagggcagtttgaccatggtctctggcttagcatatctcccgtagacactggcaggaccacggtgtctgacagggaagggaaaatcctaatcgttgtcatgactcgttttgagtattttggaaaagactgccatcgtgcacttgtaatggcagagcgcatggctcagcttgtcagaacgttctgggatcttcagtggcatgcagggttggagggcatcagccttaaccccggagtccgggatgcgggtctcaggggctcctctcacagggcccggccccgaggcctttgcagtgcttagcccccagctgctctaccccttcagatgggaggatttcaaaaccacgttcagatcatcttttttctgcagaaaaatcatgctttaacgtgyaagctattaattcataggaagaaaatgtttcaatcctatcagttcttttttttgagacgcagtttcactcttgtcacccaggctggagtgcagtggcgcaatctcggctcactgcaacctccatcttctgggttcaagcaattctcctgccccagcctcccgagtctctgggattacaggcgtccaccaccaggcctggctaatttttgtatttttagtagagacagggttttgccatgttggccaggctggtcttgaactcctgacctctggtgatctgcccacttcggcctctcaaagtgctgggattacaggagtgagccaccgtgcccagctgttttcctgtcagttctttggagccttggagcgaggtgtctaaaaggccagcttatagggcaggggtgggggcagtgctgggggtgtggagcrtggctttggggcctgacagatattcactctggcttcttccctggcctggtggcactggagtcactgacctgaagcctccatccatctgccagtaaatgggattcaggtgccacctctgtggttacaggagggtctagggttgtgtacgtgacgacaataacacgtattacttacgaaggtcccgtgctgtcccaggcattattctaagcacttgatgtggagaaacttctctgcacaacagcttttaggactggtggtgttgcttcccttttacacacatgtaaacaggttcagagaatttaagtaacttgcccaaagttgcccagcctgtggaggggtacatctggaggatttgacataggatggatggtaatcttctgtgataggaaggcaggactcctgaatgggaagggggtaagggcatgatgagtgtgtcatcatccagagaagaggggtacgggagccccagtatttcagaatatgggaagggggtaagggcatgatgagtgtgtcatcatccagagaagaggggtacgggagccccaatatttcagaatatgggaaggggttaagggcatgatgagtgtgtcatcatccagagaagaggggtacgggatccccaatatttcagaatatgacctcaagccaggaggaggcttcctcctctccaggtaacttcagtctctcttggccacagataaagcagaccatcttggtgagaaatggaatgagccctctgttactttgtaaaagcaagaatgggccaggcgcagtggttcatgcctgtaatcccagcactttgggaggctgaggcgggtggatcacctgaggtcaggagttcgacaccagcccggccaacrtgatgaaacctcgcctctactaaaaatacaaaaaattaactgggcatggtggcaggcacctgtaatcccagctactcrggaggctgaagcaggagaatcacttgaacccaggaggcggaggttgcagtgagcagaggttgcaccattgcactccagcctgggtgacaagagtgaaactccatctcaaaaaaaaaaaaaaaagcaagaatgaatgttgaatttttaaaatgtgtttcctgcatctgtcatggtgaccgggtgcttgtctgcctgtaatcagtgtggtaagttacactgattgatccctctggagtcagatgagtctgtgtttctggggtaggcccaaggtggccatgatcctttctgtatcttgctggatgagtttgtttatgtttggtgtgggattttgacaggggtcttggtggatgattctgttccacgctgttcctttcttctgtccatgctggattttggtatcaaaatcataacatgaatattatgcagaacttgccagtggagctgtttgggcctggaggtttttttgagggagtattttaaaattatagctcagcttcttcaatagctttaggactttcaagctttcctttcttctagattggtattgctaattttttcccatattggcataaagttgttcgaatattcttttgttgtctttttatgtagcatttgtgggatgcccccacacccttttttttggtggggacagggtctcgctgtcacccaggctggagtgcagtggctcaccacagcctcgaccttctgggatcaagcaggcccgccacctsacacacaccagcaggcctggctaactaaaaaaaaatttttttgtaggcccggtgcagtggttcacgcctataatctcagtacttcaggaagccaaggctggaaggatcactggagtccagtagttctagaccagcctgggcaacacagtgacatctgatctataccgcmccccgccccacaatatrtgtgtgtgtgtgtgtgtgtgtgtgtgtgtgtgtgtgtgtgtgtgtgtgtagagccagactcatgtagagccagttgtgtggccggaccggtcttgaactccggggcctcaagcaaatgctccctccttggcctctcaaagccagagattacaggcgtgaggtactgtgcctggcattatttgctgcttgcattatcattccttctttgaccgatgagttatgcagaagtgtgtttcttaatttcyaaacgtggtggttttctagttattttaaaaattattgatttcttttttattgcattatacccaggaaacttcgtccttatcagatcagatttttgaaacttgatcagtggcagcttatgatcagccttcgtaactgtggagtgcttgaaaagaatgtgctctctgcagttgctggaatcagtgtttgtacagatccatcagatagaagtatacgtcrcgtgttcattctacatcctgctgacctgccactccctgagggaggtgttagaaatctgctgacaacagactaatctgttcctcctgtagctttgccagttctggagacgtgttcttaggggcataggacatgaggttcgtctctttgttttgggaaactgaatctcctaacgcgatggactcgctctttatctccagcattgcccgctgccttggtgtctgctttgtttattacacagtgatgctaactttcttttatttagtgtttgcctgatgtgttgtttttcctccggttagcttcagcttttccatccttagtgatttagatgtgtttcttgtggacgcccccggacaggtttcttgcgtacttgtttgccgtcttgaatgagagcgtttggctgctgagcacgtgctgtggcccactgtttggatttgtctacttcaccctgctctttgtctctcacttcttgtctattttttcctctgttttttgctcttctggtttatgttctttgtcatttagctttttgccgtttactaactgttggtggtcgccctggcaccacagtggacatttctagccctctgggtttgaggttaatcagagtcactatcttcctcccaaataatgtgtgatggtgaattctctgtgtccacttgtctgggccctggtaccctcgtttggtcaaactccagtttggatgtttctgtgaagatattttttatgtgtgattaacatttaaatcagtagacgttgagtacaggagatctcccaccacagtgtgggtggggccttacccaatcagtcgaaggacttcgccacagcgtgggtgggccttacccaatcagtcgaaggccttcgccacagcgtgggtgggccttacccaatcagtcgaaggccttcgccacagcgtgggtgggccttacccaatcagtcgaaggacttcgccacagcgtgggtgggccttacccaatcagtcgaaggcctttgctacagtgtgggtgggccttacccaatcagtcgaaggccttcgccacagcgtgrgtgggccttacccaatcagtcgaaggcctttgcyacagygtgggtgggccttacccaatcagtcgaaggctttttgccacagcgtgggtgggccttacgcaatcagttgaaggctttttgccacagcgtgggtgggccttacccagtcaaaggcctttgccacagcgtgggtgggccttacccaatcagtcaaaggcctttgacacagcgtgggtgggccttgcccaatcagtcgaagtccttcgccacagtgtgggtgggccttacccaatcagtcgaagtccttcgccacagtgtgggtgggccttacccaatcagtcgaaggacttcgacacagcgtgggtgggccttacccaatcagtcgaaggccacaagagcagaaatctaagatctcttaaggaagagaggattctgacccagatggagactcaagctgcagcaccagctcctgctgggatctccagcctgctgacctggacttcagattttagacttagctccctcagtcacatgagtcagttcattaaaatcagtgtctgtcatctccctgtgtctcagtgtgtctctccatctttctctctctgtttgtttctctaaatatgtataatctcactcttgctcgcactgtctgtacacacacatcctgctggttctgcctctctgggagccctgatggctgcacagtgcgaggacttcagggccccgtcactttggctgtcgtttaccccccagtttatggtggcccctgtatttgcgggctccacatctgcagattcaaccataaaaataacaatacaacaataaaaaataaacaaaagacgatgtagtataacagtgacagacacagcatttccgtcgtaccaggaatcgtaagtaatctagaggtgatttaaagtatacaggaggggccgggcacagtggctcacgtctgtaatcccagcaatacgggaggccaaagcgggtggatcaccggaggtcaggagttcaataccagcctggccaacrtggtgacaccccatctctactaaaaatacaaaaattagccaggcatggtggcgtgtgcctgtaatcccagctgcttgggaggctgaggcaggagaattgcttgaatctgggaggcggaggttgcagtgaggcgaggttgtgccacttcactccagcctgggcaaaagagcgaaactccgtctcaagaaaaaaaagtatacaggaggatgtgtgtagtttatatgcaaatcctatgccatttcctgtcagagactcgagcatctcaggattttgatatccgaggggtcctgtatccagtcccccagggacactgaggggcacctgcatgctgttcggtggtgtattctggttctgccttgttcagtcacacataaccctgtcaccatgtcaccatcctgattctgcgtagccagtttgcacacagcttctgcttgaatctcagcctccagaattttccctggcatggaaaaataggtgacggaacagctcagattttctttgtctggaaatgtactgatttagttgataaaaatgtcttttcctcagtggatttccgtggttctgggttgacagttgcttcccagcagcaggagggagtctctgttctctcttctgatgtctgctggtgcggagacagcctcagtgcagggcagttcccttcgggggaatggagggaacagagggaaataaataatttctttctttttcttttccttttttttttttttttttttgagatggagtcccgctctgtcacccaggctggagtgcagtggtgcgatcttggctcactgcaacgtccgcctcccgggttcaggcgattctcctgcctcagcctcccgagcagctgggattacaggcgtgtgccaccacacccggctaatttttgcatttttagtagagatggggtttcaccatattggccaggctggtctcgaactcctgacctcgtgatccacccgcctcagtctcccaaagtgctgagattgcaggtgtgagccrccgcgcccagcctgctttttcctttttgctgctttcagctcyttccattgtctttggggttctgcggtttcactctggtttggccgggagtcggccagatgagtgtttgtttacctgcctgttggccgggtgagtgtttacctgcctggcacttcttgggctttggggtcttgctggctttagaaattcctcagccaccagagcctcttcaaacaccgtttctccccttcctctgttctcytcttggaactcagtccaagcccccttgtttcttatcggctgctgccagggtcccgcctctcaggtttggatgctatttgcagtgtctccagcttggcgttctctgccgtgtgtgatcggccgtcagatctgtctgctaaggtccacaggccagccatgatgcatttcatctccggaagattggcgtggatatttaaaaattgcttggtcagattttttggttttatatttttgtctcttatttctttacacatgacacgtttgtgttctgtgtctggaaatgacagcgtctgaggtgtttgtgggtctgattctgaccttagccgtggtggtttgtcttcttgtgtgtgtgatttttggcatgagctcatattcgttagatttttatctgtaggaattatttgaggcctgcaggggaggtggtttgcttctgcagtgggtggggagggtgagggcctggggccccgcccggaacctctttaatctccacattctcagcctttgggacccgaggcagcgtgagttscgggtgcaggccgccgttgctcgggaatacagttgggtgttgctgaatgatggggatgcgtcctgagaaatgtgtcattaggtggtttcgttttgtgtgagcatcacggagggcactcacacccagatgggacagcctcttccacaccaaggctgtgtggtgtagccattgcccctaggtgacaaaccacagctgtcatccacttaatgccggaagcagttgtgacataatgctgagtatgtgcctgaacacaaaagctaatcctagaaaagggaccgtaaaagtatggtataaaaggtaaaaatgccacacctgcctggggtgcccatcacgagtgggtctcgcgggactggaggttgctctggcgaggcagtgggtgagcgtgaggggttgcgaaggcctaggagatgaccgtactctactctagactttataaatgctgcacactgaggccacactaaactgatattaacaagtaattgtgctacaacatggtgacatcgtcattaaggtgatggcagtttttcagctccattttaatgttatggggccagcatcatctctgtggtccggggttgggtgaaacgttgttatgaagcgtgactgtattcacatactttgtggacgccaggcacgtggctcacrcctgtaatctcagcgctttgggaagctgaggtgggaggactgcttgaggtcaggagttcaagaccagcctgggcaacatggtgagaccggccccccacccccgaccacccgccgtttctacaaaaaaaataatcagccaggcatggtggtacatgcctgcagtcccagctactcaggaggcagaggtgggaggactgactgagcacaggaggttgaagtgtgagccacgatcactctactgccctccggcctgggtgacagagggagaccctgtctcaaaaaaacaaaaccaaatgaacatattctgtggatgtggtttttcttctttcacaaccagtccttcctgggcaagtccccgggcaggggatgtgttcagccctctctggcctgagcacgcatccrtggggactgtgggaggggcggggactggggggcgacggggactgtgggaggggtccctgctgtactccctgcctggggtttgttctcgtaggggtggagaaatagttttctgtctaccctttctagttcccagctgggatggaccctgcagctacagacagattaacaggagaaataacagaggctcatgacgtgcatgtttcacgtctacttgggagtggccagggaatgagtgattctcaaagagctggctgtgaattcaggcccacgtggcgtcttcaacaaacagtcaaattttagggatgtcacatgacaggacatggactatgagtctccaggtggcatctcggaggaggcagggagctggcagaggacggcagggcctgaagctgcctcgacctttgtcggttctggtggagggaggggccttgcccttgtcagtcattcctgtgcygctctgaggcaggacctgagtygggggagctttccttggatctgccgcttctcagttgcctttgtgggaaaacagccctcaccccaacatggcacagtttggggtggtgcgtcctggtttgcctctggagctcctcctcggtgtgcagctctgcgttaaaagccgctgtccttgtctgggcagcccttgagctggtttctggctccctctcctgctggcccggaggtggggcggggtcctcacttcactctgaccctggctgtccccagcctcttctctgagccgtcgccttcttgacctctgaggtcagaagaggaggttgtgcgtggggcgggccagggccagggtgtgcttggagagctgctgccctgggggctcagtgtgggctaagtggaccagagaggaggcagctgggagccaggactttgtctgcagtgggcactggctgggcagctccaggggcgacacccatgggggtgggggcgtccagatagagctgccctgggcgccactgcggacccctccatccgaccaggtgctggggatacagactggaagacggtctggactcttccaggtcaggagggaggcagtggcaggccatgcggtaactcaggtggccgctctctgcctggggagatgggagccccgggctgagggagtaggaagaggggggagaacttggggagatgggagccccgggctgagggagtaggaagaggggggagaacttggggagatgggagccccgggctgagggagtaggaagaggggggagaacttggggagatgggagccccgggctgagggagtaggaagaggggggagaacttggggagatgggagccccgggctgagggattaggaagaggggggagaagttggggtagatgggagccccgggctgagggagtaggaagaggggggagaacttggggagagaagcagggcagaagccaaggtagcagcggccccagtaggtaggggtcggcacgtccagggcgagtggcatgagggtgaggctcagccgggggtctcggggttgctggggaggggatcttgggaggggctgttgggggaggagtggggtcctgggggctgccctgcccagcctgrcccatgtgcccttgtccctccaggagatggtaacctgcacctcaatgtgacggcggaggccttcagcccctcgctcctggctgccctggagccccacgtgtacgagtggacggccgggcagcagggcagcgtcagcgcggagcacggagtgggcttcaggaagagggacgtcctgggctacagcaagccaccgggggccctgcagctcatgcagcagctcaaggccctgctggaccccaagggcatcctcaacccctacaagacgctgcccagccaggcctgacggccactcctgctgctgccaaggcccactgggggtcggcgggtggctctcgggcgggggtgttgcggtggctctgagggatgagccggcagtgggcaggggaccaggcacctggttgaagggactgggagcccgcactggggaactgccggacgcaggccctcgggcaggagcatctggcagagtggggggcgtggcaggcaccctcctttgcagggcgaggtggggcctctgcagccatcctggacaggccggggtggcggcagctttgcccacgtggaagcggggtgggtctcacttgcgtggtggcccctggccccatcttgcctgctgcggcctggggagcaggcgctgggtggtggttctgcctgcttgctgctcgttccccgggcatgcgtgggcagcggggggcatgcgtgggcagcagggggcgtgggcagcgggggcacgggcaggaccacgtgggccgtgatcgtgggttgccgagaggacctgagcgctgcggctctgctgaatggagccgggtccctcaggccgtggacgccctcgggaggggggtgactgtggcttgtgtctggacaggaatgtgtcatttcccacatcttctagagggctgccagctgggaagacagttatcagggcaagctgtgctctgagtttcgggttctgctcctacaaagaacgtgcggtgctgcgggcgagggccccggcacggacaagggccactgcagagtgtgtttctgctcgtcagctgccctgggcagcggatgggctgggygatgcagctggatgcacatctcrttctgtcatgaatgtccagtaaaaatctgaattggttgcaaccttctctttgcttctgttactggaaaatcatctttcagagcccattgtgaagggcctgtgcatcccattcccacagcccctggaccactggggccatagtgtggccgggcctgacactactgtgactgtcactgtgcctcctgtccccatgcactgtctggtggcagctgagctcccaccggctgcacagggcaggcctggacatggaacgggcaactcataacccttggtggccctggaggccctcagcagctgggcctgaccgaggtgtatccacgggcccctcctgtccctgtgggtgtcgaggacctcggatcctgctcagagggggaaacatacctctgacccgctgccctgcagagcccgcctgcctagccagggcctctgtgtggacaggccacgtcctcctggtggaggtcctcgggggatgggtgggggccttggtccagcatgattttttttttttgagacaggatctcactctgtcacccaggctggagtgcaggggtatagtcacagctcagtgcagcctccacctcctgggctcaagtgatcctcccacctcagcctcctgagtagctgggagtacaggtgtgagccatcatgcccagataatttttttttttttttttgagacagagtcttgttctgtcacccaggctggagtgcagtggtgcgatcttggctcactgcaagttccgcctcccgggttcacgccattctccttcctcagcctcccgagtaactgggactacaggtgtccaccaccgtgcccggctaattttttgtatttttagtagagatggggtttcaccttcttagccaggatggtcttgatctcctgacctcatgatctgcccgcctcggcctcccaaagtgctgggatcacaggcatgagccaccgcacccggccatgcccagataatttttaaatttttttttttgtagagatgaggtgtccctgtgttgcccaggctggtcttgaactcctggcctccagcggcctcccacctcagcctcccaaagtgctgggattacaggcccgagcctctgcgtccagccgatccagcatgctttgaaggcacaaatcaggggcactttcatgctggcccagcagagccagtgggtcccgcccgatgcctgggctacttcctgctgtgcctgggggcacctggggctgtcctgcctcactggccaaggcccggctctgtccctgggctctggccactgttctgccatcccaggctgggtacccatgggcagcccgacagtatctgttgcacagagcagaccccaggccccatgggtgcctgacacgaagccccacagcgtgtgcccgcgtcccccgaggtcagccacccgtgtcccccgaggtcagccggcggctcctgcccttccctctgacctctggttgggggccggccatttttctgcttgttcctctagctctgctactgggcacatggtccgtgctgggtaggctgcaggccagggtgagttgctgacccgctgaccctggctgtgcacctgccctcctgccctgggtggctgctgctggcccaggggtgacttgggggctttcaagcttctgcccgtgctggcygcacgaccccacgtcccaccctgggtagggacttgtgattctcagagctggggtccgttgctttcctaaggacctccggccctggtcgtggtctaaatgctcactcctgttgttggagaggccagccgggtgacagggaaaagcccagagccccgggcttcccgtgaggatctgggctcagcatgggctgtggggctgcagaggcctggccttgcctgctgagggacacccgctggtagtgcctgcagagggggggaggaggaattcctccccctagtgccctctggaccctgggagagcaagacctctgcatccacactgccttccgctgggcctctggggactggggaagcggacacagtccaggactgttggaggaggaagaggctgyggctgctcttccctgggggtccggctccaggaggctgcggtgaccgttgggccggagcaggccagtgccgggcacgtcctgcccatgacagccctgctgccagccgtgggcacttgttcctggagctccgtggctgggtcctgccgtctccgctgctgccctgccctgccatgttcacctccagtttatccagcaatggggagaggggcttcttagatccccctcaggcttttcttttgtgcctttagatatgtgaaatacaacacagccaggcaaagcaggtgccggtgagacacctggctggcccgagctggcccgaagaactgcctgtctgccatgaggaaaacccacactgcgtggtggctgggaggccaggagttttcacaagccggaaacctgttagatttctctacctgacagcaggaaaatctgatgagacccgatcgcatccaggcaggccgtgtgctcgcagcccgcgggttaacacagactccgagtgactccgacgcaggagaacgcggcgaatctgcgtgaggcaggccaccagccttggtgccccggagacagctcccccaacggccatgtgacggcgttgagtgtccgtggtcaggtgtgtgtaagagacgcgcagagaattccacgccgtcccaacctcccagccggaggctctgacgaggcctgcagccacgcggaaagagcaatgaggagcacgtgtgtggggaggaaggcgggttctgaccccgttccttccgcagcggctccggcctggcgggttctgacggaattctgcagcggctccagccagggtcgtcggggcggggtgggtgctcaggggcggcctttgtgttcggattagaagctggtgattgtcacattaagacctctaagctgctgcaatctgagaagatgttacacaaccagggcccctgagctgaggccaaggagggggccaggagagtggcgggaggggccccaggcagggccagagctgcctgtgtacagcaggggagaggggagaaggggtgggcctggtggtctcagccccagggagagtggagtgcccgcccctcccctcccccaggacggctggcccctgggagagcccctgggggagccagtttcctgtaagcagaagggcaagtggttgggacccagaggtgtctgacagttgtggacttagagcccagaggaagggtttggggtttggggctcctgggacgccgcaggcccctgaggacgtccatcaggatcctggcagtgtggaggtgtagggtccagccctacggggcttagcgggtgttttccctgtgtgtggagatgagggattgtaataaataaagacacaagataaagagagaaagagaaagcagctgggctctggggaccactaccatcaagacgcggggaccggtagtggtcccagagggctaggcccactgatatttattgcatacaagacaagggggcagggtaaggagggtgaatcttctcagtgattgacaaggtgaagtaagtcatgtgattacaggatagggggcccttcccttttaggtagccgaagcagagacggaaggcagcaaacgtcagcattttcttctctgcacttataagaaagatcaaagactttaagactttcactatttgttttaccgctatctgctacgaacttcaaagaggaaccaggagtacaggaggagtatgaaatgcaacaaagagtaatattaaaagctaatgattaataatgtttataataatgattgataattgtccatgatcatctctatatctaatttgtattatgactaatcttattccaactattttctttattatactgaaacagtttgtgccttcagtctcttgcctcggcacctaggtactttcgcccacatggaggcagaggtgacaggcgtacagggcagtgtgtctggacccagatggcaggcacgttaacgaccagtgaccagggctctgcccacctggcccggcgcgttggccccccagcgatgtggcttcacgccggctgctttcctgagcgctcggggtttaggtcctgttctgctgcctctgagcacctgtgacctgaaaaggccctaccctcggcctgggtcccttggggtgccactgaccttctgggaccctgaagctgcctgtgtggtaggcgtgtccacccccacacccacccaaacgatgcagaggagtgaaaaatgattcctcgaggagctggtccagggccgggcgcggtggctcacacctggaatcccagcactttgagaggccgaggtgggaggattgcttgagcccaggagtttgagaagagcttgggcacacatggtgagactctgcctctacaaaaaattaaacatagccaggcgtggtggcatgcacctagagttccagctacaggaggctcttacaggggaggagggacaagcctgagctcaggaggtcgaggctgtggggagccccacgtgactacaccactgcactccagcctgggtgacagagcgagaccctctctggaaaaataaaaaggagctggtcagggaggccgagagcaaatagctgctagaatgtggcgctgcctgggacggggagggctgggggcccttggggtggaccaggagcctgagttgagggttaggggcaggtggaggggctgggaagctcggggctgtcttaggagagccctcctgacacctaggccctgggccgggttcctcctggtggaacatcacagacctgagccctcccactcacttttccttggaccccacaggcaaggagctggggcggctgtctgctcccaggctgaggccccgggacgggcccctcctcgctttgttagccggttagacccagggcgggcgcaagcccttggcagtgctccccagcactgccccttggacctcaggggtgtggggaggacagaccagggcaggacccaggaggccacaagggctggtgggggtcatggtcctggcagccccagtcaaaggctctgccctcctgcacccacccccagagggggatcctctcgagggagcatgggccctgtctccccacctgcccttctgggagatcaagagttgctgtgaagtttctagaacagtgcccggcctggcggacgggcacggaggtgcctcctgggtgtgcccgggtgcggcctgacagggctggggtcctgttgggttgtgggcaggtcctcagacggcctcctggctcctgcctcgcccctccccacaggccctgtgccagcggctgtgcaaacagaggccaggaagcgaggtgatgctccctttgtttctggcagagtgtgtggcacctggagctaccttccgggttccatggccctggggccctggggccctggggacagggagggaatgggatgcacagcggccaggggtgttcagcgtcaccggtggaaggggtgaaacctgttcttcctggtggtgagggtttgccccttgactccggaaagcagagaccgtggagcagggcccacttcaaagcacagtgctgggggctgtggcctcggccctctgtggacgtgggcggatgggtggccctggactggtgaaggactggccgggagttctgtagggcccccacctcctgccagcgcccagcccacagtcgaccactgcctgcccggggcaggagacttccttcctgcagccccggacccgggatctgagacctagaagctgactccatcctttgactgctctgttctgagctaggccacccctgcccctgccccgaggtggccctgggcttgcccgcccgcctgcagtgtcggctgaagagggtaacgtgcgtgcgccccggctgctcccggctgctcccggctgctccccggctgctccccgctgctcccggctgctccccggctgctccccggctgctccccgctgctcccggctgctctcggctgctcccggctgctccccagctgctccccaccggccttgggtctggtgggtgtggccctcctagtgggr

SEQ ID NO: 95525 - DNA, 19012 bp, Homo sapiens
  misc_feature (1)...(19012): n = A,T,C or G
ccctccctcctgggcaggcctcagctggcatacctacctgggtctctgtcctcaggcctgagccactggtgcctgtgtctcaagctgtagaggcatcttcccaggccagggagtatcctgggtccacttctcttctgggtcactcactctaagtgggactccttcatcgtagggaatgctggaaggacataagaagctctgagcctggagcagcccatcagagcttggtcctgtaagccagcttcccctttaatggctggtctgctcaaaaacccagcacgaggccgaggcgggaggatcacttgagctggggagttcaagaccagcctgggcaacataaggcaaccctatttctacaaaaagtttaaaaaattagccaggcgtggtggtgcatgcctgtggtcccaggtatttgggaggctgaggtgggaggatcccttgaacccaagaggttgaggctgcagtgagctgtgattgagccactgctctccatcctgggtgacagagcgagatcttgtctcaaaaacaaaacaaaacaaaacaaaccagcacaacacgcaagcccccgcccccccatccccacacctaccctgcttccagcacacccctcaccgccagtgccaggcctggggtccctgcactccctcacttccaggcccctgtgcctggtggctcttctaccaggaaggcccttcccctctgctccaggctgaccgcactacatccttcagaactctgctctggccccagtccccttccccctgaagcctagttagataaaacacaggggacagctttctcctggcccagggggccctggctatttgcaagcaggacagggctccttctaggcctggcattggcctggcccacagtgggtgctctgtgaatggcactggggagccgtatccagtgaaatcatatgggaaacaccatccttgagtgggcaccaagccaggctgaggcctaagggatggggaagggctgggaacagctcagtggtatggcaggggaggccagtgtggatgtggagtcggtggccagcagtgagcaaggctgctgcagctcaggacagcgtggccagcagtgtccaggccaggccagccatggccccgcatggaactgaacccaccgtgcagatgaaacaagggcttttcataccatccagagccttgggggaggcggccccagctggcccttggtctgtgggcttctctgtggcccctggctgggtattggaggaaggtatgaaaaagactggaggccgggcacggtggctcacgcctgtaatcccagcactttgggaggccaaggcgggcggatcacctgaggtcaggagttcgagaccagcctgaccaacatggagaaatcccgtctctactaaaaatacgaaattagccgggcatggtggcccatgcctgtaatcccagctactcgggaggctgaggcaggagaatagcttgaaccccggaggtggaggttgcggtgagccaagatcgcgccattgcactctagcctggtcaagaagagcaaaactccatctcaaaaaaaaaaaaaaaaaaaggctgggcacggtggctcatgcctgtaatcccagcactttgggaggccaaggcgggaggatcacgaggtctggagatcgagaccatcctggctaacatggtgaaaccccgtctctactaaaaacacacacacacacaaaaaatgagccgggcgtggtggcgggcgtctgtagtcccatctattcgggaggctgaggcaggagaatggcgtgaatccaggaggcggagcttgcagtgagccgagatggcaccactgcactccagcctgggcgacagagcgagactccgtctcaaaaaaaaaaaaaaagactggaggctgtgcctggctttgggcgtggagctaagatgtggtcctgtgtccttcctgtcctgagctctgaccacttcctccttcactccactttccggctggcctgatagtttcccaatccttcaggttttagtgctgtgtcacccctgggggtcccatgctgtccctgtacttttggaggccccatcttagctgtaattgtgttctcactgtgtaagcctggaccactctgggcagaggtggcaggaagaccggcccctctgtcccctgatgtatccccagcagtgggcaccaagtgaagaactggcaacagccacccagcccctgagcctcccagggctccccgtctgcactcctggcctctgagccttagggccttgctcccctgggcctcttgtgaagacaactgcctggccacaaggtggtccaggaggttgctgcccacctcagccttgccagcactcccacccatccgtaggctctgtcggtctgggcagggtcgctcctccccttctggtgccgcaagtgcctctggctgtacaaaccttgattttccaaatcttctattacagcccaacccacaccttgaggtgggatttggaatcaccctgacctacagggccaacagttcatgtcctgacacctgcctccaagagacatgtgcctcctctgctgcccagccctgcaggggtgataagggttcccatggactctggcctggggcgggaagcctgctctgctcaccggattccgcgagcctcccctccaactccaacgttcacctaaacgatgttcaaccaccacaaaccactggagcagaacaggccattcattaattcattcatgcagcaggtactccctgaacatttgctgttgcccagtcacggtgtgggctggggttcaacactcgtttgttcaatcaacaaacattgattgagtgcctactgtgtgctgcatttacctgaggtgatgggggcagaccactggcctaaacaatgccctgcctgggctgggcacggtggctcatgcctgtaatcccaacactttgggaggccgaggcgggcaaatcatggggtcaggagttcaagaccagcctggccaaccatcgctactaaaaatacaaaaaattagctgtgtgtggtggcgggcgcctgtaatcccagctactcaggaggctgaggcaggagaatcacttgaacccgggaggcggaggttacagtgagccgagattgcaccactgcactccagcctgggcgacagaatgagacacggtctcaaaacaaaaaacaaaacaaaacaaaaacagcaactccccgcctttgtggggttcgcttctcacaggggagtcaggtagccaagaatgcagaaaggcagcctggcacggaggatgggaaggtgctcaccgagtgggcgtggcctggggagctgaggcctgaccaaatgcgtccccagccacacgtttctctggggacaagcggtccaggagggaggaacaggaagtgcagagaccctgaggcaggcccgaaaagcaactccatgcaggtccagaagagtgcatgtgggccttgccccaggggtgaagccccctcccaaactcagtgagggcatgtgtgtggaggtgggggcagaacccaactgcaaggaaacacaactgcctgaggggtccacggggcagcatgagggagatgttagttttcattttgggtcctagatcactgtcagaggtgtgtgaaccagagcaactccatcttgaatgggagctgggtaaaataaggctggggcctactgagctgcatttctggatggttaaaggattccaagtcaggatgacacaggaggtcggcacaagatacaggtcacaaagaccttgctgataaaagaggttccgataaagaagccggccaaaacccaccaaaaccaagatggcaacgacagtgacctctggttgtccttgccgctacactcccaccagcaccatgacggtttacagatgccactgcaacgtcaggaagttcccctatatggtctacaaaggggagggatgaattatccactccttgtttagcatgtcatccaaaaaaacataacaatgggcaaccagcagccctcagggctgctctgtctgtagagaaaccattctttattcctttactttcctgataacttgcttttgctttactgtatgggcttgccctgaattctttcttgcgcaagatccaagaaccctctcttgaggtctggaacctctttcctgtaacagcatgatttgtttttctttttcggtttgtttgtttgttttttgagacagagcttcgcccttgttgcccaggctggagtgcaatggcgcgatcttggctcatggcaacctccgcctcccaggttcaagcgattctcctgcctcagcctctggagtagctgggattataagcatgcaacaccatgcttatatatttatatttatatttaatatttgtatctatttttagtagagacagggtttctccatgttagtcaggctggtctcaaaccccagacctcaggtgatccgcccgccttggcctcccaaagtgctgggattacagaagtgagccactgcgcccggtttttttttttttttttttttttgagacagagtttcgctctgtcacccaggctggagtgcagtggtgcgatcttggctcactgtaacctccgcctcccgggttcaagtgattctcgtgcctcatcctcccaagtagctgggactacaggtacacgccaccacacctggctgatttttgtatttttagtggagacggggtttcaccatgttgcccaagctggtcttgaactcctgggctcaagcgatcatcctgtctcggtatcccaaggtgttaggattacaggcatgagccactgcacctggccaccatttgaattcttttatgcagtcacatatattacttttagacttactatatagtttctaggagaaagttttgtgcccaactggcagaagctaccctttcatatttttcacaagcaaactattttatttttatttttattgagaagtctcactctgtctcccaggctggagtgcagcagcaggatctcggctcactgaaacctccgcctcctgagttcaaggcctcctgcctcagcctcccgagtagctgggactacaggcgcctgccaccacacccggctaatttttctatttttattagagacggggtttcaccatgttggccaggctggtctcgaattcctgaccccacttaggactcccaaagtgctgggattacaggcttgagccaccgcgccgaccacaagcaagatattttaaaacctgatagtaaaataacaatgtgggcgaggggctgcagagcgctctggtcaccaggcaatgggaagcaggaagggtgtgcgggagggagccccaagccgcgggatggcatcccggaacctggtctggttccagcctcccaacagctcagccgtagcccaggcctcttcaatgcactctggccggttgtctctgcaccaggaggtctccgtccaagtcttggttagcgcaaaggtggccatgccactctcaggttcaaagcccgtgctgggacagaacctagctttcccctgcggggcgtccctggggcctcttcctcccttagctcaatggtcgattcctctgcccacgccagctggcgcgacccagagggtcctgggatytctcggggcggggcgcggagtggacagggcgggcatgggcccggggcctggagaagagcaggaacggggacgggagctcgagggagcaggccagggccagacaccggagcgggtccaggggacggagagggacgggggacaggctggagagatggggctgggccctgtctcgagtctcggaccggacgcgggggggctggggggatgtagacagggcggggtcagagagaacccggacagagtctggggtgcgcagcgggggtgggcgggctccagggcagggcgcgggaccgggcgggatggggcggggnnnnnnnnnnnnnnnnnnnnnnnnnnnnnnnnnnnnnccgcccgcccggtctcgtgacgctggtcagtggcgcgggtcacgagtgccgacttgacagacggcagcggcgacatggcttcggagcaggacgtgcgcgcccggctgcagcgcgctggccaggagcacctcctgcgcttctgggccgagctggcgccggagccacgagccgcgctgctggcggagctggcgctgctggagcccgaggcgctgcgcgagcactgccggcgggcggcggaggcctgcgcgcgcccccacggcccgccgcccgacttggccgcgcgcctgcggcccctgcccccagagcgcktgggcagggccagccgcagcgaccccgagacacggcggcgctgggaggaggaaggtaagcggggtgggaggccctgggggccggcagggggtcgtgcccacgkagcgggtgggaaccgaggccgcgctcggggaactgtagttctcctcgctactttgagacgtgtctcgcctcacgcgttccggcccccgagtcctggcgccccagccccagagttggtttcccctaaagcggaagggtgggcgggtcccgggcgtcccttcacggcgcccgtacccccaggtttccgtcagatttctctgaacaaggtggccgtcctgctgctggctggggggcagggcactcgcctgggcgtgacctaccccaagggtatgtaccgtgtggggctgcccagccggaagaccctgtaccagctgcaggcggagcggattcggcgggtggagcagctggccggtgagcgccacgggacccgctgcaccgtcccctggtgtgtcctgcctgccctacctcggcccggaggtacccttccccacgcccccccacatccccgctccagacgcgagccccaaccccggcacagaccgggacattgcccagaaccggcccaaaatggggcctggccccagccccaactggacactggaccccgaaccccgatgccggctctggtccgagccccgyctgcctgcagggccaggcgtactcgcggccggctcaccgcgcctcccttgcaggtacgtcatgaccagcgagttcactctggggcccacggccgagttcttcagggagcacaacttcttccacctggaccccgccaacgtggtcatgtttgagcagcgcctgctgcctgctgtgacctttgatggcaaggttatcctggagcggaaagacaaagttgccatggccccaggtgtggcccgttcctgagacggggagggaccgcccagactagaactgggagcgtagctgggggtccacgcgcccgggttcgcggctgccccgaggctgtgtggtccygggttaggcgcctctttttctgggccttgatcgtcatttgtcacatggtacaycaactgggctgtctggttagtgaccagggctgccttaggcacaaggccggggcttcccccgcctccagcacgtcctagactcccagagcgatccctggcgggagccctcgcgatgcccattcccttctccgtctgcagacggcaacgggggcctctactgcgcgctggaggaccacaagatcctggaggacatggagcgccggggagtggagtttgtgcacgtgtactgtgtggacaacatcctggtgcggctggcggaccctgtcttcatcggcttctgtgtgttgcagggcgcagactgtggcgccaaggttagcgcccgactgcgcggcgccccgcacccgaggctggccccgcccctcgcggagccccgcccctccgcccagccctcggaacccatccctggtcttggctgcaggtggtggaaaaggcataccccgaggagcccgtgggcgtggtgtgccaggtggacggtgtcccccaggtggtggagtacagcgagatcagtcctgagaccgcacagctacgtgyctccgacgggagcctgctgtacaatgcaggcaacatctgcaaccacttcttcacccgaggcttccttaaggcggtcaccaggtgtgcggcagcaggtggctgcggattgccggccagagccgcctgcgttgaccagggacccgcggggtcccagtgagctgagtgccctgggccacagcggctgtggtcaggagtggctgtggtcaggcacggctgatgggtcggggtggagaatggatcctgagcttgcaaaggcagaggtgctggagatcaggcacaagccgtgctcagcaggcagctgctgtaaggctctgtgatcaagtctgccatctcctccttctggggacctgccctggtgcccagggtgctacctctgctctggggcttgccagtttgtttgcctgggcagggatgtggctgatggtgcctggcacttggcacagggatgcagggaggaggcctgtgcctgcttctccctggagatctggccctactctgccgcttctgtgccctgtagtgtccttctgccatcctgtcccacccagctgggtgtgctcagaagtggggacagagcccccagyggtgccatatctgatctgtttctttcctcccctctgctctcccgtgccccagggagtttgagcctttgctgaagccacacgtggctgtgaagaaggtcccgtatgtggatgaggaggggaatctggtaaagycgctaaaaccgaacgggataaagatggagaagtttgtgtttgatgtgttccggtttgctaagttagtagtagaactcatttattttccccttcttccttctctcagttttggtggtgggaactgaggcgcagctggtagggaagtagaggcttgagggagccaagggccccgcgggcaagtctcagggagaagaccagagggtgctcttggccctgagggtaagcagcccctgaggtggrggcatagggagtccttggggctgtggacttgggaggacagtagtgccacctcccggaccttccactgcccccacccatggttaggagaggtctcctggccaggttgccagggcggctcgcagggcctttggccctcactgcaggggtcccagggttgggccttcggctgctggaaatggctgctgggattgggccatccctggcgtctcaggagcaaaaacactcagtacctgcgggggctcctccctagacttgctgcccatgggaccagaccttcactctgtcactggaaacctggcccagctctcacctgcccggatcagggcctctgtgccgggacgtgggtgactagccctttccccaccaggaactttgctgccttggaagtgctgcgggaggaggaattttccccactgaagaacgcagagccagccgacagggacagtccccgcaccgctcgccaggccctgctcacccagcactaccggtgggctctgcgggccggggcccgcttcctggatgcccatggggcctggctcccagagctgcccaggtgagtgtggccctggggtagctacagccagaaggggagggctgtcaggacccaatcttcagctccagagccctgttggctctgcgacagccatgctggggaggggtcttccttcccggcaccaccgcaggtgcaggtagccttgtgcccagccagctccaggtcacacggtgacygtcggcacagcctcctggcccgacccttcaagttgtgctcagtgcactgagggaggcaggggctccccaactccctccccaacttatccacaaggttttggtttgtttacaaaggcatacttagatttggcttttatttatttatttttatttttatttacttttttgagatggagtctcgctctgtcgcccaggctgtagtgcagtggtgggatctcggctcgctgcaagctccaccctcccccggtttccrccattctcctgcctcagcctcctgagtagctgggactacaggcgcccgccaccacgcccggctcatttttttgtatttttttttttttttagtagagacagggtttcaccgtgttagccaggatggtctcaaactcctgacctgtgatctgcccgcctcggcctcgcaaagtgctgggattacaggcgtgagccacctcacccggctatttttttatttttatttttcttatttgtatacatttgtggggtgtgtgtgcaactttggtcagtcaggtcagggcttttaggggatccatcacccaaccaacgttgttcccatttattcacaggctttgaaactgagccccgggcatgaatttagaaagtagcaggacagtttgatttcagggctgggaaagaaaaggacgtttggcttccatctccctgattttctagggccacccctaaatctagctgcctaggctctgcgtgggaggcctgtgggggtgctttctaccccaaatcaggtcctgtcacttggcagtgggatgtgtgctcagggtttggggtgtccagaggaagatgagcttgctgagacaggagctgtggggagccaggtgtgtagagctcagtytcctatcgggactgggggtgctgggggagggctctgggcaggtgctgcaaggagatattgacaagtggactttccctagcttgcccccaaatggagaccctccggccatctgtgagatatcgcccttggtgtcttactctggagaggtgagagctgcccatccctatctggggcttttctggtgtcaggtttggaataccatctggggagaggtggctgctcgggtggagacggcacagctctacctcggttaaccaatggggtcggtggtttaaatttgcagaagactttccaagatatgggttggggtggggtgaggcatccagaggcctttgcaggtcctgggagggcatggggatgagacagcccaggtctgagcccagtgtggggccagtcaggccttggtgggggccttgcggagggaggacaccggcctctgctacctccctgacctcggctgcccttgcccctttctctggtcaggtcagacctgtgcgtgacaggagggtcccctgctggcctagggtcttgagtgtggtcttgggtggccttgcagtgtgtgtctgctcctggccctggaagcctttctgtccccacccctccctgactccaggcagacctgggatcgcacctggggactgtggctcttggtgtggccagaggggctgtgacccgccaaaaggtgggtacttggccattgtcccctgctcgtctccagggtttagaagtgtacctgcaaggccgggagttccagtccccgctcatcctggatgaagaccaggccagggagccgcagctgcaggagtcctgacccgcccagactgyccccagactcccccgagacctgccagccccggcatcctggaagtcccgactccccccagacctgccagccccggcgtcctggagctgggggctacagcccagcctgagctctgggtgggaaagcagcctgccccatgcttccagcctgcagaacamagaatgaaacatgctggtagactccacgagggcagggcctctcctgtcgcctctggacacaagtggcgacagcctgctgggggctctgtggctccattcctggctgtggggtctagtcaagaggcagagggacttgggacctgggagaatggggctgagaggaggcttcgggttggggcccaagggaggtgtggtgtcatctggggagaacaggagggcatgtccctttgggagcccgccttgtggatccaccacaccccaccgagcactagaagctgcataagctacacaggatgtgcttctgcagcctacagatgcagaaccagaatgagggggacaattccacccactcgagggctgccccctcttccttagcagacgaaccagtaatgggggcaaggctggggcatcccagcccacacaccctggatgcccagcaaggccacagaaagagcctgatgtccatgatccaggtggctctgagaagcttggcctggacacctgagcctgcggccggtactcctgccttctccccatctatccccaaggcctctgcctctcagcctcttccatggtcggtttaggctgctgagttttctgtgcttccccaagaaccagtgggatcaatgccggcggcctctgtgatggttgctgactaatccgggatttcatgagtcagaggcaccacccctcaccccagctgcctgctgcttctgacggatcttggtgctcaggctgcctggctctccgagtgaggacgcagcctccatatttggtgcactcaggcatggctgggacaagccagctgccccagggttcttcccctggtgattctcgcctgctttctcatctcaggggaggcagtggcacctccctctccctgctgacatgaagagagctatgatatgccactgctgccaactcatcctctgcccccacctcgaaacccacagtccccagtggagggccactactcatccccattggtttcccaggggaggggtgttgtctggaagggcaggttcagatgcagccttccagatttagaggcactgggaggacagtggctgagtggaggcgcccagacctgggcaggcagcaggctcaggcccacaccttgtgatttttgaaaccaaagcccagaagatgatgtttacttctctctccctggctctgcccttcttactgcaaaccatgctgtgccttagggcccttctcatagctgttcctcatggccatgactggaacagggatgcaacctctttctacacaagcacagttagttgggtgaagtctttttttttgtttgttttagacggagtttcactcttgttgcccaggctggagtgaagtggcgtgaccttggctcactgcaacctccaggccagcctcagcctccctagtagctgggactacaggcacccactaccacgcctggctaattctttgtatttttagtagagatggggtttgaccgtgttagccaggatggtctcgatctcctgacctcgtgatccacccacctcggcctcccaaagtgctgggattataggtgtgagccaccgcgccgggccggttgctggcatcttaatgttctgtaggtggaatatttccaataaacacaaggtgccgtaattgactgctactctggcaagtgcagtttttgggcagtgcacgggtgttgggaacaaggatcaggtgttcacagctgtgtcccagggctggagctcactgggggcccccttagggacaggagttcacacatgaaggccaagactacttggggtgccaaggaatccccccgcggtcccatcccactcttcaccagggtctcaggagggcctgagacaacctgcggtcaggaacctcggggcgctctccagggcaggcttctgcatgctcagctctgacagcctggagactcactctcctgcacctgcatccttgagatgccaaggtttccctgctaaccacgtgaggatgcttggggtactccagggactgacaagagtgagtggtgtcaacctaaagagaaactcaggctctccagaataaatgaatttaatcaagaataacacataattgcaatgcagagtatgcaagcctcagtgggtcacaggcatatggtgggggggtggggtggggattgaggaaagggggaattttttttttttgagactggatctcactctgttgcccaggctggagtgcagtggtgcaatcatggctcactgcagccttgacctcctggggcttaggtggtcttcccacctcagcctccagagtagctgggaccacaggtgcacaccaccacactggactcatttttttattttttgtagagacaggggtttcaccatgttgcccaggttggactcctgagctcaggggatctgcccaccttggcctccaaaagtgctgggattactacaggcatgagtcactgtgccccgcccacgggaaatttctttttttttttttttttgagacagagtcttgctctgttgcccaggctggagtgcagtggtgccatctcggctcactgcaacctccacctcctgggttcaaggaattctcctgcctaagcctcccgtgtagctgggactacaggtgcctgccaccaaccatgccctgctaatttttttgtgttttttgtagagacgggtgtctcaccatgttggccaggctagtcttgaactcctgacctcaagtgatccacctgcctcggcctcccaaagtcctgggattacagaagccaccgcgcctggccccaaggggaatcttttaaaaaagagaagttcccataaactgctttgaaaccataaagaccaaaggttagaagggtttgccgcaggcgctccgttgctaatgtttttgtgagggcttcttcagggcctcttgttagagtgtgacataaacgacttcatttgggtaccagcaagtgtcacagggggcagagaccagcagaaacctaaagatgacccctagaagagcaggaggccaggggaacagagttagacgagccangtgctaagcaggacgtcgctgccgggggagctctccagacacgcagaaatgccacagtcaggaccgtgggacgcagcggattcgcccaagggcaggagcagcctggccaggagagaatgaaggaggggccgggcgtgaggttcggctggggagaacccaggcagggagggcctcgggcggccacggacgccgctttgccattttgggcgtttctggggaggacaacgcgtgcaggaagcgcagtcatctcaagctgacctccaaggttaccgagttcgagggctgggagccgggtctgaaagccccgacccgcctatggcgcggggactgtgggtccagccggccgattggccgcctcgctcggcgccggtccaggcgcagcgctcgggccccggggaccgtgagatgcggcgcagccagcttagctcggggtagcagccaccccagcccgggtgccgcccggcctggtccgcgacttcgggagggtccggtccttcccccggcccccacgcctgggtgaggccctgggcttcttgccggtgaccacgcggccagggtgggcaccagcccaggacggcgcccaagggcagcccagctccatccccgcgccgcgggttccggaaccgaggcgcgggacgctgggactctctgccaacatggcggccccgcccgggcgcctccccgggtccctagtgtctgcgtctcccgtgagggcgtgggcaaagtcggtgcagccagacgacaggaggcgagagaagcccagctccaggcccatgaggcgaaccacgtgggagccccagacagcgaccacgccccaggcgaaccaaggcccgccccgttgctayagctacgctcskagcacacctgggcaggcgctgccggacgcatgcgcaatgaacctgagggcagggcggagtcgcagcagttgtctgacgcagtcgccgtaggacgcagccccgtacgctggagcgcagcggagacaggcgcgggcgcactggccgcatagagacgcagcgcacgcgcagtcgcgtatccgtgtgatgggcgggctgttgacggcgctgcgatggctgcctgcgagggcaggagaagcggagctctcggttcctctcagtcggacttcctgacgccgccagtgggcggggccccttgggccgtcgccaccactgtagtcatgtacccaccgccgccgccgccgcctcatcgggacttcatctcggtgacgctgagctttggcgagarctatgacaacagcaagagttggcggcggcgctcgtgctggagggtgagggtcgcgccgggctgactggggcccggggctgccgtgcccgccgccctcccagactgcggctccgagcgggacctgggcgggcggactcgactccccaggcgccgccctctccaccccttccccgcaaaaaggggcaaatgtgcgttcctggttggggcagccgtgggcggctcgcctgcagcggtctcagcggcccaaattctgcggggcggtggtgggaagagggctcagagccccagcaggttttctgggcttcgttcgcttttctgcaaggtcctggcccaggcgcctgcccctcttggagcggaaaccggaggttccccgtggtgtatgctcccctcggtacagtgagaaatgagcccctcttgattggctcctggtctgttcgtggtggtctcaggccgaagggcattgataaccacatgcggactgtgcatcgcctgggcggtgcctgggctacatctgtgggagtcgcaggagtctttctccactgttgatgaaatgtgacagaaatgtttctgcttttttcttatcctcgtctcatctgcaccactgtattaacgacatctgtagtattgtcccagcaatgttcctactccctgctgagagggaacttctccccattcaaaataaatagagctggccgggcacggtggctcatcccgcgttccacccactacactccagcctaggtgtaacagaatgagaccctgtttccaaaaaaaaaaagaaatagagctgaacactggatcttccagaagaattccttattgtcctcacagtttgtgacagttgagacgttccgtgtgatatattcagtaagaaatgtcattctctgtacctcccttagaaatggaagcaactgtcgagattgcagcggaatatgattctcttcctccttgcctttctgcttttctgtggactcctcttctacatcaacttggctgaccattggaaaggtatcagaaacacgtgtacttgaaaacgatatctgtgttgagggttgattgggcagaagcaatcttgcattctaccttaaacagctccaggaggcatatatggcaacgaattggcaagaaatcaagataaagagaaaggtagagctgtatgtaaccacctggctagaacacagatgttaatttgatgctgtctgactactttctaggtctctggtgtaagtactgatatgtccagcctcccttatagagtaagtcagctggtgggcttgaacactcagcctaaataaccacacaaatttcgtagcactcattagcgtgtgtttggaaaagaccaggcagagttctggtgaggatgtggagaatctcttctcacttggtctaagatgcttctctttggagcaaagctaaagggctcctgcccacctgccacatgctgaacgtccctgaatggaaaataggaaggcaaaagatgtggggttctgtgttatggacaaggacacaaactgccaagtgttttgaaaaagatttcattcccttgggacattgttgaattcatttcagtgactatcaggtatcataatgttgatttgtaatggatagtgcctgccaagtgtttttataaagcagtttaaatctcttgtaggccttgtggcatatttgaaataaaatagcttctgttattcagctctggctttcaggctagaggaagagcagaagatgaggccagaaattgctgggttaaaaccagcaaatccacccgtcttaccagctcctcagaaggcggacaccgaccctgagaacttacctgagatttcgtcacaggtactttgagcaaatggtgtggggttataactggggttcaatccagaggcatttcaaaccactgaagattgagaagaattattttcctttaccatttattaccacgtgtttacctctctctcgttttggactggtcggataatacttggggaaagagaggcgtagtctttgcttcattctttttgaagaccagccatggccagttccggttttacttctgactgtgcagtgttgaataagacagacctgtttcctctcaagaggccacagctggtaggagaggctggtgagaagccaggcacagatgggcagaggcagatggcacatggtgtacatcctatgtggaaaagagcagggcgctggtgaagaacagtggctggtcctgagggttcaggggaggccgtggcactgagggcaagatctgagggctgagaagctgctggcaccgggcaaggtggggagaggcagacttgagcctgagtgaaactgcctgaggcaaggaggaccttggcatatgcgggaaggtgaaattcccagggctgggagagggagcaggggttggctcagtccagctgtggtcctgcaggtcctggaggcagcatggagggtccagttgatgtgtgcgggaagattttggcgtggactggaggtctgagatgtttactgtgaaactgctctggctgggtggagacacagtggagggcaggaggccaggagagctgcctggccgtgggaaaagctgagtggggggaggagtgctccgcaggagtgggccttgggagaaggagggtgagtccccgggtggaggggccagcaaaggctgtgcaggctctggcttggggacactgaggagctccgttttggatctgcccactgtgagatgtctgggaggcgccatggagaccttggtgggcaggtggtgccaggatcagagtctgccaggggagacaggttttaggagtccctaggtataggtggtttgtgtcctctggaaacgttggaagaaggggccaggcctagtcctgggcaccaccaggctgagaagattggggtcagggaggagggcagggggagtggagactggggatgggtcaggaggcagctggagaaccaggaaaacgtcctgtcagtgaaggtttggttcaggaagaacagccaaatccccgacaccgttgagaacaccagggtggtgctgactctggtgtggctgctcggaacccttagaaggcccttagggtgttagttactgttgttggtacatctgtgattgtgtctagcaggtgtgggagtgccttgggagcttcacctgtggccagagtcctcagcgccaggtggacttccctgcagggctgtgacagggacagacagcgctttctaacagtggccttgggagtggtaacctgccgaggaacagctcctgggctggggagctggaggcaggctgctgcccactggctaaggatctcagcaagaggggcattggggcattggcccccatgagcttgggccaccctcagactgccgtgggggtgttttgatttt

SEQ ID NO: 95526 - DNA, 113033 bp, Homo sapiens
  misc_feature (1)...(113033): n = A,T,C or G
ccaattcacccctccttaggcaacctggtggtcccctgttcccaggaggtcaccatatttatgccaaacttagtgtggacacccaatcggcatagcgcactacagcccagaactcctggactcaagcaatcctcctgcctcagcctcccgagtagctgggagtacaggcgtgcaacaccacacctggcaacataatgctcctttactcctgtgtaattctgggtgtatttccaaagaacatggccacaatatcacttatcgaaaatagaaaatttaatattgaaacaatattattttctcatccatagcctatattcaacttttgttaattttcccaataatgctcttaccgattttttttcccctggtctaagatccagtctaggacaatgtatcacatttatttgccttgtctttctaatggagtacatgtttatttttcttgcctttaatgtgtgtaatttaatactcttttaaaacctattccaaattataatcactttaatggcatttaaaaaatattagaaatataaaattaggccgggtgccgtggctctcacctgtaatctcaacactttgagaggctgaagtgggcggattgcttaagcccaggagttcaagactagcctggacaatatggggcaaccccatctctacaaaaagaaaaaagaaaaatttgccagacatggtggcctgtgcctgtagtctcaactactcaggaggctgaggtgggaggatcacctgagacctggagttcaaggctgcagtgagccatgatcacgccactgcactccagtctgggcaacaaagtgagacaagaaagaaaagagagagagagagaaaagagaaagaaagagagagaaagaaagaagaaagaaagggagagagaagagagagagagagaaagaaaaagaaaagaaagaaggaaagaaagaaagaaaaagaaaagaaagaaggaaagaaagaaaaagaaaagaaggagggaaggaaggaaggagggaagaaaggaaggaaggtaggttacataaaattttttattgaaatgcaggtcagacactgacactgggaatgaaaatttgctgagtaggaaaactccataagggaaaacagatcaaagannnnnnnnnnnnnnnnnnnnnnnnnnnnnnnnctttcctatgttttggggccacacgtttttctccctctcattgttcttatgctactgatgaggcctctgtgcttctcaaactatttttggtaaaggatgagttgtgtttttttgtttgtttgttttgttttgttttgtttttgagacagattctcgctctgtcgcccaggctggagtgcagtggcgcaatctcacctcactgcaagctccgcctcccgggttccacgccattctcctgcctcagcctcccgagtagttgggactacaggcgcccgccaccacgcccggctaattttttgtatttttagtagagacggggtttcaccatgttagccaggatggtctccatctcctgacctcatgatccccccgcctcagtctcccaaagtgctgggattacaagtgtgagccaccgcggccggactttttttttttttttttaattattagtgctctttcctgcctatcaaggattgatcctttcataaaaattcaataaaaataaattattagaaaaataggccgggtgtggtggctcacacctgttatcctagcactttgggaggctgaggggggtggattgcctgagctcaggagctcaagaccagcctgggcaacatggtgaaaccccatctctactaaaatacgaaaaaatcagcctggcatggtggtgtgagcctgtagtcccagctactcaggaggccgaggtttaattgcgagaacccaggaggtggaggttgcagtgagccaagatcatgccactgcgctccagtctgggcgacaaagtgaaactctgtctcaaaaacaaacaaacaaaaactactagaggccaggcgtggtggctcacgcctgtaatcccagcactttgggaggccgaggcaggtggatcacctgaggtcaaggagtttgagaccagcctgaccaacatggagaaaccccatctctactgaaaatnnnnnnnnnnnnnnnnnnnnnnnnnnnnnnnnnnnnnnnnnnnnnnnnnnnnnnnnnnnnnnnnnnnnnnnnnnnnnnnnaatcgcttgaatccaggaggcagaggttgcagtgagccaagatcgtgccattgcactccagcctgggcaataaaagcgaaactctgtctaaaaaaataaaaataaaacattactagaacaatgaaataaaaatagatgcgtaatgattttgttcattattagattcaacagatagacttactttctcaaattgctgcaagtttctaagtgcctaggctgaatttctgtacttattgcacagcactggtctaaggatcagactctgagaagtattagtctatattagagcatgtaccatgtttagagatgagtgcctgcagggtgacagccttctcatggtcccttcatattctccagtatgcagggggctttgcatccagcacactctgtctgtgcatttaaatgggaaccaaacagtacactatgagcagaagcatagccttgtgaaaataactcaggccctaacgtcaggcaatgtaactttagagactctactgctccccagctctgtggctactggcaagtcatttaactcctctgggtctcagctttctcatctgtgaaatgtggataagagcatgcagctcggattgggaggaatagtgacacatactggtaaagcattcagcacaacaatggctattactactattgccatttcaactacaaacatagtcaaatactaaaaatctcagaaacaatctacaatctatattcctttggcaagcttatactgtaaagggctagaacataaatatattcagttttgtaggtcctaagatctgtgttgcaactactccattctaccgttgtagcgtgaaagcaaccatatgcaatatgcagaggattataggtggctgtgttctaagaaaactatttatgtgtaatcttggcactttggcagccaaagtgggcagattacttgaggccaggagttcaagaccaaccctggcaacaaggcaagatcttgtctttagaaaaaaaaaaattattcaggcatggtggcactcgcctgtagtcccagctacttagctactcaggaggccgacatgggacgactgcttcagctcaggagttcaaggctgctgtgagctatgattgcaccactgcactccagcctgggtgacagagcaagactgtgtctaaaaaaacaaaacaaaacaaaaaaaacaaaaaccaaccccacaaaactttatttatggacactgacacaggaaacttacaacattttcaaatgtcataaaatattattcttttgattttttttcattcatttaaaaatgtaaaaaccatttttaggtggcaggccatagaaaaactggcagcaaattgtgccgattcttagtaaaaagaattttaaaaagaaaaagaaaaacaggcagcaggccagatttgatcctctgcccttagtttgccaactcctgctctaaaccctttctacctcagttcagttaaaaatacctattgcatatgataaccctgagtgtacagagtaggaaagaaggtagaagaagttgaatctgccatgtgttaaggatttttgttttgttttgtttttaaacttcgttctgcaataatttcaggcttagaaacaaaaagttgaaaaaaagagtaaaaataattccttcattgattttccaaatgttaacattttaccacatttgcttttctttctcacgttcttttcatgcctggaataccatttctctccctctctctctctctctttctctctctctccatttttttttgtgaactgtttgagaatcagttgcaaagatgatgcccttttgtttcctaaaaaacaaggatgttcttttatataaccattaccaaaattaccattaccgttacccaaatcaatacactaatacaaaactattatttaatatttagaccgtgtaccattatcaaaatcagaaagttaacattgatgcggccgggcacagtggctcatgcctgtaatcccagcactttgggaggccgaggtgggcaaatcacttgaggtcaagagctccagaccagcctggctaacatggtgataccccatctctactaaaaatacaaaaattagccaagcctagtggtgggtgcctgtaatcccagctactttggaggctgaggtgggagaatcacttgaacctgggaggcggaggttgcagtgagccgagattgtgccactgcactccagcctgggtgacagagtgagactctgtccccccacccccccaaaaaggaaattaacattgatgcatggtactaatctaacctacaagtctaattctgatttcatcaactgtcccactaacatcctgtatataccaagcttcttatcgtcatcatctctggtaatttccccaattatccagtgaatttgatattattagccctgctttaccaacaaagaaactaagctcagagaggttaagtaatttgcccacagttacacagacagtaagtggcagagctggaattccaactcaagtgtacttcctccagagcccttgttctttaatactgaactagaattgcagagcttggaaaggacttcacagtgcaaggacacggaattggtactacaggcatgaaaagaagccaggcacggtggctcatgtctgtaattccagcattttgggagttccaggcaggtagattgcttgatcccagaacttcaagacctgcctgggaaacgtggtgagaccctgtctctacaaaaaatacaaaaattagccgggtgtggtggcgcacgcctgtagtcccagccacttggtaggctgagacgggagaattgcttgagcccaggaggccaaagctgcagtaagnnnnnnnnnnnnnnnnnnnnnnnnnnnnnnnnnnnnnnnnnnnnnnnnnnnnnnnncactccagcctgggtgacagagtgaggaccctgtctcaaaaaacacaaaaacaaaacaaaaaaacaaccccccaaaccaaaaaacaaaaacctaagaaaagccagtaactgatactttctcaatctctcaatgaaatgtcctttctgatactttctcaatctctcaaggacatgtccggtaggaaaggagaaaggagtgaacaaatagaattttggctactttgttatacaatgtaaaaaggctttttggaacaccaaggcataaactaaggttatttaaaaaaagaaaatttttttttgatacggaatttcgctcttattgcccaggctggagcgcaatggctcgatctcggtttactgcaacctccacctcccgggttcaagcgattctcctgtctcagcctcctcagtagctgggattacaggcgcctgccaccacgcccggctaatttttgtatttttagtagagacggggtttcatcatactggtcaggctggtctggaactcctgacctcaggcgatccgcccgcctcggcctcccaaagtgctgggattacaggcgtgagcaggattttcattctaacaagttccaggtgagttgatacagtggctccagggaccgaccacattttgctaacccccggcttagagttattcaaagagcccgtatatgagacgcggattccatctagggcgtttaggtttaatgattaacaatttccctcttctgctctctcaaggcagccagggaacagggagaccatgattcatgtccaatccccgaggcgcgttatcaagctgctgaaagcaggccctccggactgcagttccaaagggtcccttcccagggaagacgcctgcaaaacccagatagtactatcctggagtcacgcggcggcgcgcagcctcctagccgcccccacccgcccggctcggccacagcggggcggggcgcggggctgagcaggcgcgagggctggctgctgggccgacgaggggcggtgccaggccgtgggtccttagtcaagtgacgcgaagcggccggcctgggcgccgactgcagagccgggaggctggtggtcatgccggggttcctggttcgcatcctccctctgytgctggttctgctgcttctgggccctacgcgcggcttgcgcgtaagtctgcgggacccgggtacggggaggcattgctaggggacaggctggcggggaaccgggctggggtcgcagccacccgcggtcccgcagggcggggagcctgagccccgaagtgccccccagcaggctcgcggccggcggaacgcaggcagtggaccggccttccccgtcgggggcgggccgggcggggcgcgcgtccttccaggcagctcggtcgcttgtgcgttccgctccggccgccctttgcgcttggatccacttccccatctgtaacgaggtgttgagacgaggtgcgtgtaaacatttcctaagttggctttccgggaggggattccaagttgcgcgggttagagggtgcctccggctctggtttggggcgccctcgctttcccagttggtgctctgcggagcgctccggaaggagaaaaatggggtcaggagaggcccttgcagtgggaacattgggttatttcccctctgggtgctctccctcttcgtgcatcttgttcctttctcaccactccccgtcgcctgccctttggcttgggtttttctttgtatttgtgggaccgttttccttcggcgtttgggggtccaggttgagggggggaataggcaggctgccgggggatgccatcgttgatcggggcagggctggcgaggcgaataggtgaggtgcggggcgtgcacagttggtgggagaggaaggacagcttcactcgctgcgtccgagctgaggcgactggctgaggggctccaaagcgctgcctggggaggtttgcatcacacctgcggaaaggagagtgggtagttgcaagctgctcctctgcacgttccgcggaccaactttggttcctccagggtgtaggtgggctgagcctgcagtatgctttaagtaagagctggtagcatttgacaccgttgacttgtaagttacaccctttaataacgctttcaataacgtgcctagggcagagaaaagtggtacatttatctacaaccaagattgaacatcttaagtatttggaaaacagctgctgaaaatgttttcattttgggaaaaagtcagcacagattatttgctgctccctcttcaccccgtctgtggttcccctaccccagtatgtagacagagttttcttgtccagaaggcccgtaggaccttaggagtcagagctagccagctgtgagaaccactggggaaggtggaactggggcacagttcaggagaacagtggcagggtaaggggctaggggaaaggcagatcttaaccagtatctgggagtgggggtagggagagagagaaggatttatgaaccaggaacaggtggacagggtcaatctgtctgatgtgagctcatcagtcttgtgcagcgtcattgggtcagggtggatgccctgtggctgccatacctgaggcccacacagggaggctggcatcaccccaggaattctcatttcaggtgcctaggtgtccctcttgggcttctgtgcccacagctaaagaaagataccagcagtctagctttccattatctccttgtttacatttctttagggttcacgccattctcctgcctcagcctcccgagtagctgggactacaggcgcccgccatcacacccgactaatttttttctttttttgtatttttagtagagacggggtttcaccatgttagccaggatggtctcgatctcctgacctcgtgacccagcggttctcaaattttaactaaattttagctgtcctagaaattaagagaatattcctttttttttttttttttttttttttgagacagagtctcgctcttttgcccaggctggagtgcagtggcacgatcttggctcactacaacttccacctcccaggttcaagtgattctcctgcctcagcctcccgagtagctgggattacatgcatccaccaccatgcctggctaatttttgaatttttagtagagacagggttttaccatgttggccaggctggtcttgaactcctgacctcaggtaatctgcctgcctcggcctcccaaagtgctggaattataggcgtcagccactgtgcccagccctagagaatattttaaactatttgttaagaaatactacatcattacacgttaataaacaatatatatatttgaaaaacaatagtatttctccccaaattttagggtgaagagttgcactgttttacatttctgcaaatctctttcaatgtctcttaatagaagacagtcaaattttcatgtttatttctgcattaaatctgttgccatatcacatgtcacatagcctctggaagactccaccctcaggacagagtgagaatggaaaaggcagtaatggcttggaattataataaaaatagttttgactaattggacccctgaagggctctctccagaccacactttgaataccgctgatttggaatgtttttataaaacaagtacatgcttactgtagagaaactttaaacgtatagaacatgtggtaagaaaatgaaaactgcccatcatgtcacaatgctgtgagtttctttttgaataataaagtatagctagcaactgactggtatttgagtagcttggattcaaggtgggttgggcagatgtaagtggcctttgagttttgaatgggtacaaggacactctaatatcccacaaagctgatgctggttcctggttgcaggcggagttgacctggaaacctctccttggccactgtcctttctaaggaactcatttccagagtccaccagcacagaactggtgggggagcctactaggagcagagaaaatggccatcttcaggcagctgtccctaggcgcgaaggccaccctggctgctgtcactgtcttcgtgtccatgatcgcctcccgctcgtatctggcrgagagccttgagctcagggcctggcgttggctgcttcgcttgcagcttgccctgtttgtcaactcgctcttgctcattggctccctctacatttggcgcagcacagtgagcaacctctgccactccccagctgcagagtcaacctgttttcagctttggaaggtggtggttctggcatttctggccctggcccattccagtttctttaccatgttctttttagtggccgaagagccctatctcttttccttggcggcctactcctgcctgggtgcttacatcatcatgctcttcttcctcttcatcctcagcggcatggagcaggcctaccagctcttggcctggcgcagtggtagggtcgtgggcagccttgagaagacaaggaagctcgtgctcaggcctgccctggcagtgggagtgactgctgtgctcagcgtggcygggattctgaatgccgcgcagcccccggctgtgaaaactgtggaggtgcccatycatcagctgcctgcctcaatgaacaacctcaagatcgtgctcctctcagacattcacttgggccccacagtgggcaggaccaagatggaaatgtttgtgaggatggtgaatgtgctggaaccagacatcacggtgattgtgggtgacctctccgactcagaagcctcggtcctgcggacggctgtcgctcctctgggccagcttcattcacatctcggtgcctacttcgtcacaggcaatcatgagtactacacgtcagatgtcagcaactggtttgcacttctggaatccctgcatgtccagcctcttcataatgagaacgtgaagatttcccgccacacgggcccaacgtggtggtggtggcagtggcagtgggagtgaggatgaggactggatctgcttggctggggtggacgatattgaagcagacatcctgcactactctggccatggcatggatcttgacaaggccctggagggctgcagcccagaccacacaatcatcttgctagctcaccagcccctggctgccaagagagctctccaggctcggccagatattaacctgatcctttctgggcacacacatgctgggcagatcttccccttgaacgtagcagcctatctcctgaatcccttctttgctggtctctaccaggtggcccaggctacattcgtgtatgtcagcccaggcacagcctactaygggatacccatgaggctgggtagcagggccgagatcacagagctcatcctgcagcggtctccctgaactggccctgccctgtgcacctctgccctgcccttgtcctcgaccctccatcctgcttcagagtggtttgcctgcttttcccctccagccttgcccactcatccttgcctacacacccttggtcacaagcctgactcaaacagtgacttatggtgggcctgcctggcatgttcaggctggtttaactatttccttggccagttgctttttttgatgcacttgtgagatcactaaggtcacatatattagcactcccctctattttccagatgatgtggaatggggaccttctcctgcagagctcccagggatgaacctcccctcggggttgctagaaaggcatacctctagaaggtggggcggggaggagcaggagcatttttctcctggtgttttaaaattgtctttaggacttaagtggtttccagaatcattgatccagagcctttctggggaaggggtagtgttgccaggtaatttgggagaacaggcaagatggaagggccctctggctgctagagaagaatattttcttttcctctgattctatcaggatcacctctattgagggcatcagcaaaatctactggaatgcaaagctcctcctgttccaggccttgagggatgctatttaactgtctgtgctcctgggcctttgggggcaaggtcaggggagaagaacggtgggcgccatggtcggtgatggtgagaacatggctgcttaggaattcagagggctttgcctcccttgtctcattttatacaacccttcggggagctcactggggacaggctgcttttccctatttggagataaggaaaccaaggcaaagagagatagggcacaggcagtatgacaagatatgtaggagatttggggctagaaaccaggtcttgtacctcccagtaaaagcggtgcttttgcccttttgccagaagcaatagatcctttgatcctgagatggagataagcacccgtgttagaaaaggcctcactgagaagacagggctgggctggtttcctgctgggtgatttaggcttgtgatggaaagtcttcctccaatggggagtgaagacactcgctctgactggagaggctaaccctgctgctcactcatagggcagcgttgggtgggtgactttccctcactcagccttggtttccatcaaccctaaaatggggataattatcgtatctacctcaagattgttttgtcaggagggatccatcaagccttgtgcatgagttccacatggcacagcgtgcacagtaaacactcaatgttaatttttcaacgttccagtggagcttgctaaggaactctgttgggcacaggtgcccagaggattcatggagcagccagtcctggggaatgtgagtgggtagcgagctgcctgctgctggggcaggtgatgtgtcaaagcagcaactgctaggggtttgccttcctcccctcatgtgcattctggcaggcaaagggggtttcttcctttcctccttgtcctcctggtgtatagtggggttctgggggatctggagaccaccctttttgttcccaggcagccackgtattgacagtgggccataccatgcagtttaaaatgtatctttgagttgaaattttggtggtttccttattcttttttctctcttcactgtccttccaaactcacttttcttgtgtcccgaccgcattttgtgaatcatccttactccctttaagttctcgctttggatttcaccaggtgggctagatggtgccatttcacttccactgtttgatgcggctggtaatgtttgactcacctgttacgtgttatttcactggtttcttgattttacatctttctcatcagtgacctgggcttgatgaaattagctttcattaagtcctattttttttttaattttgcatccttacctcttttctttctcttgaatgccatcattgtgtggtcttatgtacccttcatccactctgaagtccttgcttgactgattgctttctattagcagaaagaaaacaggtccatcctatgtatctgagaaacaacatcaacaccctctcgtatgtggtttgtattccctgacgcggcggacatttttgcagcagaaatttctccatcactgtccagattctggccctggtgggcaggtctccatgacacctttagtccctytgttcaacattcttaaaccatggacctttttgtttgtttgtggccgggggaggtggtgagaaacgttacttgaagcttgatcattctttcaatttcatttgtttctttatttttaatctgttagatgcaaattgaaatgcaatgctttttgaaaatcagcaatagtgtctgtagtatatgatgctgtcacaaaatctcaataaattgatcctgctgccattccttccaaatacccatccatgcttttcttcccctcgtgttttgtttggtttgttttaaacttttcgtacatgtacctctctcccagctttaacaagcatgacgagaccactctgccatcctttctcagctacccctgccccacctgtactctttattttttggctggagtatattaaggtaaatcatagaaaacataatgttaccccaaaattacttcagtatgaatcctttttcaaaaagcatagctatagtgtcattatcatatccaatgaaattaacagtgattcttgaatatcatctaatagctagttaggagatttggggctagtagccagatttttgacctctttaaagaagtgttctttccactctctgagtattaagtagctgtatctgtcacaaatgagtacagaattcaaatgcagttaactgtgtgaagagttagtgtttagtttttcctgattatctcaactatattttttattgtggcaaaaaaattactatcttaaccattttttttgttctttttgttgttgttgatcttaaccatttttaagtgaatagttcaacagtgttaggtatattcacattgttgtgaaattgatctaattgatctgtagaactttttcatcttgcaaatctatatacccattgagcaacaaggctccatttcccccttcctccagcccctggtgaccacaattctactttctgtttctatgaatttgactgctttagatacctcgtataagtgaaatcatgcagtttttgtctttttgtggcgggcttatttcagttagtataatgaccttaaggttgtggcacgtgactggatttctgtcctttttaaggctggactacagtaatactcttgtattttcatgccacattttgtttatccatgttgagcatgttttcatgggcttgttggccacctgtataccttctttggagaaatgtctattcaagtcctttgcctatctttaaatcaggttatttaatttattgttgtggagatgtaggagttctttatatattctggacattaaccccttatcagatacgtaatttgcagatattttcttcagttctgtacattgccttttcactgattgtgacctttgatgcacagagttttaaagtttaatgcaggcccatttctctatttttgcttttattttggcatcatatccaagaaatcattgccaagttcaatatcaygtagcttttttccccatgttttcttctaggagtgttatagttttgggtcttacgtttaggtctttaacccatattgaattaatttttgtgtatggtataagataagggtccaacttcattctcttgcctgtgaatatccagttttcccagcactgttttctgaagaaattgtccttttctaacatcaagagatcttggcatctttgttgaaaatcatttgaccatatacacaagagtttgtttcttggtgttctatcctctcattgctctatgtctgtctttatgtcattaccatgctattctgattaccacagctttgcaatatgttttgaaatcaggaggtatgagtctttcaactttgctcttctttttcaagactttagtctatttggtgtctgttgagattccatatgaattttaggataaatttttctatttctgcaagaaatgctattgggatttttatagggattgtgttgaatctgtgaatcactttgggtagtatgaacatcttaacaatatgaaccttccactccatgaacataggatgttttttccatttgtttgtgtcttctttaatttctttttaacagtgttttgtagttttcagtgtagtctttcaccttagttaggcctatttctaagtattttattctttttgatgcttttatatatggaattttttgaaattccatttaggattgttcatttttagkgtatagagaagcaactgattttggtatgttgctttttgtatcctgcaactttgctgaattcatttattagttctaacagtttgtgtgtgtgtgtgtgtgtgtgtgtgtgtgtgtgtgtgtagtctttagggtttcctacatctragattatatcatctgtgaatcgatcattttacttctcctttctaatttgaatgccttttatttctttcttgcctagttgctctgactaggacttccaaaactatgttgagtagaagtggcaaaaacagacatcttgcctttttcctgatcttagaggaaaagcttgcagtctttcactattgaatatgatgttagctatgggctcttcacatgtgggctttatgatgtggaggtagttttcttctattttgcatttgttgagttgttggtttttttaatcatgaaagggtgttgaatgcttgtcatgctttctctgcctcaatttagattatcatgtggtttttgcccttcaatctgttaatttggtgtattatattgattgatttttatatgttaaaccattcttgcatcttaggaataaatcccacttgatcatagtatataacccttttaatgtactgttgaattcagtttgctagtattttgttgaggatttttgcatcaatattcaccaggaatattattgttctgtagttttcttgtagtgtatttgtctggctttggtattaggataatattggtctcatagaataaatttagaaatgttcctcctcttcaacttttgtaatagtttcaggaggattggtattaattcttctttaaatgtttggtagaattctccagtgaagccatctggttctaggtttttctttgagtgtgtgtgtgtgtgtgtgtgtgtgtgtgtgtgtgtgtgtgtgcgcgcgcatgctgacacatggtcttgctctgtccccggggctggagtgcagaggcatgatcttgggtcactgcaacctccacctcccaggttcaagcgattctccttcctcagcctcccaagtagccaggaccacaggcacgcgccaccacacccggctaatttttgtatttttagtagagacggggtttcaccatgttggccaggctggtctcaaactcttgacctcaagtgatctggccgcttccccctcccaaagtgctgggattacaggcgggagccaccgtaccyggcctctttgaggtttttgatgactgattcaatctttttaatagctattggtctgtatagattttctgtttcttcatgattcggtcttggtgggctgggtgtgtctagaaatttatccatatcttctaggttatccaatttgttggcatacagttgttcatgctattctcttacaattctttatttctgtgtcatcagttataatgtcccctcttcatttctgatttatttatatcttcttttttttaaatctagttaagtttctcaattttgttgatttttttttcaaaaaccaactgtttttttttcctactatctttctattctcttttgtttatttctactctaatattttatttccttttgctagctttgggtttatttttttcttcttatggaattgtctttttatagttattttgtttgaaacaggatctaaaaataggtctatattttgcctgtggtgtatttcttcagtctccttaagtctataacatccccttttccttattttttatcatttatttgttcaagttatctgggtcatatgtcttaaaattttatacattttagattttggtgtcatttaacatgttcatattttctgtgagctcatagagctaaagctctctaaaggttagagctagaggctggttggattcaggttcaactttttcgctttttgggtaggaagaattcattgcttcactgatattaagattgacctgttggtccaggtgttgtcagcttgatccctccgctagaaaattccgcattatctttccatttaatgtttcagcagtcattggtgattgttgcctaatgtcattatttcactaaagattgcagaatagtgatttgtaaaattctaccctttttttcctgcatttactggctatggatcctttacaaagaaatctcctcattaattatgtggttactctgaaaaagcctataacaaaggcaagacagataccagattctttcacttgattccttagtttatagcataatgatctgataccacagcaacctccaagaatgaccaataagcttttcttctgggtgggtgaaatattgttaggaatttagatatttagatattttatatatctgatgttttttagttcatcaaagtgttacatcttttaatactcaaaatagcccatctttggccagttgggaccttttcatttttcattttttactttttagagtcttagtcttgctctgttgttcaggctggagtgcagtggtgtgactgtaactcactgcactctcaatttcctgggcttaagcgatacactcactttggcctccagatagctaggactacaggcatgcaccaccaccaccactcctggctctttttttttttttttggtagagacagagtctctctttgttgcccaggctggtctcaaactcctggcctcaagcagtcctcagcctcccaaaatgctgggattacaggtgtgaacctgtaatcagcctcccaaaatgctggcattacaggtgtgaaccactgcacttgagctggttggagccctgtcatcttgtcattttgatgagaccctaatagttttgtttttttttttaatctagccctgttttgtacatcttatgccacagacttggattaactaatttcttgaagaagcagctttggttacttttagtgggaaatgtttgcagatcacaatttaggcgctatatgggttagattgctacccgctgatatcatttccaaactgtgtctttgggtattgctaggaaatgcaatacttttttagagagaaaaaaaatcataagtgtatactagtatttacaattcaaataagagattatggattttattgttttttaatggactatattttttagaatagttgtagccttatagcaaaattgagtggaargtacagagattttcctgtatctcctgattatggggttcttaattttgtttgattttatgtttgtttctctctctctcgctttttttttttttttttttgaaacagactcttgctctgtcactctgattggactgcagtggcaccatcactactcactgcagcctgaaccattctgggctcaagcaatcctcccacctcagcctcccaagtagttgggaccacaggcatgtgccaccatacccagctaacttttgtttattttttatagggatgggatctcattttgttgtccaggctggaacttctggggtcaagccatccacccgcctcagcctcccaaagtgctgggattacaggcatgagccactgcacccagcctgtttctcttttacactgaaaaatttggttcttagtaacctaatgtagttacttacttcttttatcctactacatatataatagaaccaaaatagtaacgtcaatgtggttattaagatgaagtctactgaatgcagtttgcttttgtttttttccctgaatgcagtttaagctgtatttttatccttaggccaaatatggtcaatgtagtgtggaaagttagatctgtatgtttttaattttaaagaaattacatattttttaatttaatttttatttttttaaactgcacatttaccttttctctgagatgagggggcacatttaaatctgtgtatgtccagagtccgtgaggattgggaatcagtctaaagctgtgctcgcttctcctcttccattgcgatttgccttctttatccagtcttttggaatgctgaacaaaaatgtttttggcacaaggcaggcgtgaaaacataaagttaataaaaatygaatgcataagctagagcagattatccacagattcttccatctccatatagattatcaccattgcctgcacctgttttccttctccagcctatctgatggaatggtgcttccatgacatgtggtatttggaaggctcttasctctgatgtaatcagggtttgacccatagtcacctgaaatagttcttctgtttctctttgttctatgaactgaagggtctcagaagcccgtgttatgcaaatacccttccatccccttccctctccccttgcctctatccatgttccctcagcctcagggtgcttgcaggctaagaggattgggtctctggcatcctggagctgaacagctcgtgtcaggaattccccaggcccttgagtctctggggtgagttgtaggggtgtgtagggtgctggggattaagatctgctgagtaggtgcttaccagagttatactgaaggacctgaagacagatcatcttcacataatcagcatgacccataatctgtgatgtcactgagcttcttttatttctgtagtcaaggaatgtgcacaagtaatgcaaatataattacttttagtcctgaggattagggaacttgggggatgttcacattacctgatgatgtcaatattgtgttatgtttaattttttttaaaaaagatgcttatttattactgaaataatctaaactgaataaataactttttaaaaaattacattggccagtattaggttcctgatacgtatttggtgttttgtttgtactgctgggttttttctctccagtattggatgcgttaacggggagccttgagaagttatgaattttggtttgttcggaattgctttttataagttttctgtgacctcatgcactaaatactgatgctaccacactcctgcaagtatgaaataaaagtatgtctcttcagtattgcattcctgcgccaattcatttagaagggtagaatttgcacacaggtcaaatcttgcattatttgcatttggggggaatacactctgaaggcagttttctctctctctgtctcctttttcctcctttcttcctcctattcccacttttttttttttttttttttgagacagagtttcagtcttgttgcccaggctggagtgcagtggcgcgatcttggctcactgcaacctctgcctcccaggttcaagggattcttctgcctcagcctccaagtagctgggattacaggcatgtgccaccacacccagctaatttttgtatttttagtatagatgaggttttgccatgttggtcaggctggtctcgaactcctgacctcaggtgatccacctgcctcggcctcccaaagtgctgggattacaggcgtgagccactgtacctggcctattcccactttttttgatcgccttctgtcagtagttccacagctcagaggaagctcaaaggaagctgggtcttttttttaggtccgtaacttttgagaggggtcatcttgggtccatgaagtggactgtccctgtttactttggctgtgacagtcaacaatgatgaactgtcttttaagtgatactgcttctgcagctgtccatcttgatcccctctctgtggcttttctaggtttttgtttcagagacatgtcccctgctctcctggttcaaataacatggtgatgttcatctctcagaccatgacagtccatgaatgcacagacagtccaggtctygtgtgatacagcagggcagtggacacagccccgggcaagagggagaatatactgctgtcctgcccactcacgaactgttttcaatcctttttatcagtaggatttgaaaagattagaacattaatcgcaaaccaaatatcagaggctgtgttgttctgtcccagtggtaatcccatacctacatggtagctgcttttggagctactactcggttaattaagtggccaccatcatgtactgtgatctgttttttctggcagaggctcacgggcaatttgaatgaacatgatggaaatgatctttaagtctttgtggagggggcactaatagctacaattcccagaggattgtggtcttgcttcagatttatcttgagtgggagtggggagtgggcagttccagagcttccacttgatccatgatggctcctactcattatgagggttctgcaggccattatgtaaaaccatcccactttgaactcatagccagggaaataaccgtgtgatggatcctctgatttgttggactctctgtgaaaaggactggggccaaggctcccattatccctggcctccctaagagtgataagggagagtgatggcatttcaggttccctggtgctaccatgtcagttcagactgtatccagtagtcctcagaaggtggtggccttggggtgccccttttcttaggacacagttaccctgagtcttgttgggaaggattggaggaatatttactgtgtggacttggggtggtaatgcaggatccttcctcaaggggatccatccaaccttccatcwaattttgttgactgtatgttagagaactggctcaaagctgggaattggatgaaggaatctcaattttccatgcagttgttgacatcagccttttgctcacaagtttttaaacatgtcaagcagtactcttgctgattgcctggccaactcaccccacagaaacgtgtggcttatgagccactgcataaggtcactcctggtccacaggtcagcacaccctggttgccactgtgaccttgctggttgttgtggtaattgtgccttcctgcttctgatggttaagcggtcccatgctggttatgccagaacctcatcatccccagcgacactagggcgccccttgcctgcagaggatggccccactgggggggcttcccaagtatgccagggccctcctcaccagtgccttccttcctgaagggagagttctctgggctctcctggggaatagagccaggtagtggggtctctggtcaccctttttacattcccacctcttgagccattccatacctttctcaggatgccaaggcagtcctggcatcctcacctcatttcctgtagaccagcgtcatgtctaggttccaaggatcctcccaacagcatagggactgggctcttaccaatagaatataggtcatgggagaatacaccctaccagtaacttccccatatccggcctgggattttccccctcaagatccattcccagtgacccccatagttaggtcttacttttctggcctgagatgtgagtctctttaaacattgccacagaagcctctgatattcataggatgccctgagtggatggctcacctgagcccatcaaaccgtcactgtcttcaaagcttccaaatctgttaataaaagccagctaacctcacactcctttcaatgaccagtgacccccacctctgccccgctccaggggtggagccagtgcagataccgactgctccccctctctccatgcctcctcccggtcccacagagttgagggccttggtatttgtctttgaggcgttaccaccccacttagcaccagctataaggttcttgctatttgacattcatgagacaacaaggtgcagactcacatcctgatgatctgctgttgaggccactcctggtatcaaggtcgtactttgggtccctctagaagcagaacattgggtgcaagtggtttgagaagtgatccaagagcataggagcaagggacaggtggaaagaagggacagcctgggtcagaatgcatattgtagttatcactctgggaaccgggacatgattcttctgagacctcctgaaaagtgcacaaagtgtctccagaattatttgcctaaaaaacaagagaatgcagttctccaccctctttrtccctcattggctgaaggttgccctcaggggcatggactgcctggtgctcctggacttctgggctgaacccrttcccccagtgttggggcagaaaggcaaaaagacatgagatctgagtgtgagttgagacaatcagcacaaagcatactgagcttgcacaagaccattcacagagctacagctgatgtaggcatgtttttaaaaacttttaaagaccaggcgcggtggctcacgtctgtaatcccagcactttgggaagccgaggcggcggattacctgaggtcaggagctccaaaccagcctggccaacgtggtgaaaccccgtctctactaaaaatacaaaaattagccgggtgtgggggcaggaggctgaggcaggagaattgcttgaactggggaggcggaggttgcagtgagctgagactgtgccattgcactccagcctgggccacaagagtgaaactccatctcaaaaaacaaacaaacaaacaaaaaaaaacagttttcaggctgggcacagtggctcacgccagtaatcccagaactttgcgatcgtgaggtgggaggattgcttgaggccagcagttggagaccagcctgggcaacatagtgagatcctatctctacagaaaatttgaaaattattaactgagcatggtggcrcacccctgtggtcccatctacttgggaamagaggtrggaggatcgcttgagcccaggaggtcaaggctgcagtgagccatgatcatgctgctgcactccagccagagcaactgagcaagaaagaccctgactcaaaaacaaaaaactctctcctctgccttctcttttcaccctatatccctcccaaagtgctgggatatccatcggagatcatttcacaatggcaagggctacatactctccagagctgcgtaacatttgatcatgtatgtgtatttgtatatatacaaacatgcatgtacaatacacatacaatataaaccatrattcattttatcagtctgcatttttatttgtgtcaacattttgctaggaaaatttttcagagagggttgaaagattataccattaacatattactatcagtccattcctccatctatcaattcatcttattttttgaatgtatttcaaaataagttgcagatatcaatgccctcctcttgctaaaataaatacttcagtaggcatatcattaactagcagtcagtgtttgttagtagcccctttttcttccaaggtaaaatttacatacaatgaaatgcacatatcttaaacgtaccatttgatgagttttaacaaatgcctacacctgcataatccaaaacccttatctagctatggaatattaattaccattaccccagaaagttccctcacgtcccttcccaggcaatacctacctctactctcccagagttaactattctgattttttcttccaccatagattagatttgcctttcccaggacttcatataaataggttcatgcagtatgaacccaattgtgtaaggcttctttctctcaacatttttgagatttatytacattattacaaataccagtagtttgttcttttttattgctgagtagtagtctrtcatatacatatgccatagtttgctgaagsaggagaatcgcttgaacccaggagttcaagactgccatgagatatgattgagccattgcactccagcctgggtgacggagcaagaccctgtatccaaaaaatcttaaaaaattataatagtaaataaaaagtaataaaaataaaagaattaggatccaaaccaggttcacactgacctaatgaatatcgtatcatttcatattacgaatattgtaccataccttattacacatatcatatcacatataatgatctaatgcaatcattaggccattattcctctgaagttctttcatttccaaataatactccctttctttcttttaataccattgatttgttggaacaactgaatcattggacttttaaaatgtcccacattttggatttggcttattgcttccttatggtattattagattcgggttcaattgtgattttgattcaataatgaggactactttctagatgagactgtacttcgtgttaaatcataacatgagagacataatgtctggctattcgacttttattgaggctgaaattgagcagatggagcacaaaaaatatgcccaatccttcacacaatttccatcagtgtttctaatggttttagcatctattgatgattatagcttaaatccatttcactaagtgttggggaaaaggtgttttcagatgcttttattccttctgcatttattgttattttgagacagggtccctctctgtcacccaggctggactgcagtggccctatcacatctcaccatcgccttgacctcctgggctcgagcaatcttcctgcctcagcctcctgagtagctaagactaccagtgcctgccaccayaccrgctaattttgtttgtttatttattttaaacaagaagtttaaacaacaagcttcttgacttgaaggaaaaactatctaggattcctttttttttttagactaatttatccctacttaaagacaaattgccctacatttaacaactatgtacaacaaagttataaaattgtccttggttttacaatgataaatgaaaaacattaacattctacaattgaataaagtatgcaaggatttttatgttttttttttgttaaaacagcaaaataacttactgaaatataaagataagagctgaatgagcatgccactaatgaagaaaagggagtatttttacagaatcggtatttttccccatctcatctccacttgatatcaatcaaaacgtaccattggctgtttagttaaaaaaaaaaaaagtaatatacttgtgcacatttaccagttactttatgtacaataaaggaatggggaagggggaaatgaaagaatagagaaaactatactgtagtagtcaggatgtggtggaaccaaattgcagttttctaattgagaatgtgatcttggtctgtaaagaacagagttctggagtgaagtgggaggttccctttttagtagacaccccctgactgctgttggaacatatcggttgtatcttcatcctccatttccaactgagcaggtgtgtctctttcattgattggttgcctgtcaaattggaatctgatctgtctcattgaccatccctatcgttcacaacaggctttcattagtttactaagtggtgtatgcctcttaatcctaaactgcaccacagaaccctcctgccctgccaccttcaaattaatatgatctttgttctcagtctcgattccttccttgggcttttcatctgccacggcaagcgcctaagtctcagctgccgcttcacaaaagaggtaccaagactgcaccgaatgagcacgcaagcagcaacaggagtgggagaagaaggaggcggcagcagtgggtgagggagacactaattttaatttttttttttatagagacagggtctcgccatgttccccagactggtcttgaactcctgggctctagcaattctcctgccttggcctcccaaattgctgggattacaggcatgagccattgtgtccgggcccttctgtatttaattaactgggatccagtggagaattttccattgtcaatgttttgataaccctgaaatacagtttttatgtgaaggggaagtaaactgcttgactctttctctgtatttatcacttttcatagtaatgagttggtactctagcagtctccaaaagtgaccaatgaattttttctccctgtaaattacgatgaactgataggtgttaatatacacgtagtcatattttttaaattgatatatctcttaagtctctcacatgctcgctctctctgtctctcattttgacactcagatttctccccaagaacagtgggagcctcttcaggttcgcgcctgtgcctcacatctaactggccaccatcctggaatgtcctccttctgcctcctgcccacctcattgtcaccaccgtgggccatagccacatctcttctgccttttttgcccattcaggaaaaagccaaacatttgaaaacacatatctggtcctatcattctttcatttcagttgctctccatggctctcagcataaaatccgggcccttgaatctggacttcagggctcattcgatctggccctggcctcctcctctgcctcagcagctgccatgtttcaactatattgaggctctgtggctcctggcctgtagtcctgccctccctcccccaggcctcacacgcagttttctccatctgtgtcaccttcccccatggctaacttcgctttatcctaggccttggctcaggccagtggttctcaaccttggctgcacattacatcatctaggcagctttaagaaattccaatgtctgggttcctcccaagaccaattaaaacatgaatgtctgggggtgaggtcaactttgctttttttttttttttttgagacagagtctcgcactgtcgcccaggctggagtgcagtggcacaatctcggctcactgcaagctccgcctcccaggttcacgccattctcctgcctcagcctcctgtgtagctgggactacaggcacctaccaccacgcccggctaattttttttttgtatttttagtagagatgggatttcactgtgttagctaggatggtctcgatctcccgacctcgtgatccacctgccttggcctcccaaagaactttgctatttttaaaagcttgcgtagatgattttgctgtgcagccaagattgagaaacacagtttggggtgtttcttcctttgagaaacttgcccttgcccctcccctcaaccctgccatgcctgggttccctgccatttatttctgctgcagcattctgctctaacccttactttaccgcctcgacctcactgtgttaacccttgggtttcttctaggctagatggaagctccatatgggttgtggccacatctgtgtggttcttgtctgtgattactcagcacgtaagaggtgcttggtaatactatatttgtaaatggatggtagggagatatttagactagactgaggtcattggagggtagagacagtgtcccaccatgtatgggacaaaggccagattccattgtctcccaccatcattttttcccagccttatctcctgctcctctgaactttttcacttagacaggtggatttcaaacagctctacccttttccgaattctgccagtagttgcttggcctcctttctacctgtctaatgaatgttcccacctcatgggccacctttgaacttaggaaacttgtgaggaacacttatttgacacttagccatgtatatactatgagaatgttttcaagagcatccattgagacacctggtgtaagaaataatttttctatttttgtgagtttaggggacttttcctttgaacagaaattaaaaccttatttactagaagaataaagtgatgttaaattgacacttgcccttttaaaaatgattcttagttgtttgtgtttatttagctttattgagatgtaattcacttacagtgaagctctccatttgcccctatgaattcttctctgagttgtttaacttccgctcgccagttggatttcaggcatgtgtgatctaggactcatgctgccacagttgcttccaaatacagcttcaagggcaacccccaaagccaccatggactatgatgctactgtgactagagctagtattgtgacctttgaaagcctaaagatgcacaaggaatctgacccataatggaaagcactagttagttggcttcttaaaaccctggttctcttggctcctgtggcctgttgctgccttatccaccagagggcagtgttccactcggcttaacagtcgaacccccacccccaccacccgttgaggtcttgcctttcaaaatcctaacattttagctcctgaagtgaccccaaaacagtgtttcttaaaatcgtgcttggtagaaataaatcttacattgcaaccaaatatacatgcgtacatatacaactccacatatgtatatataacaaaagttttataaagtaatactttactatgtgtaatatttctttctttctttctttctttctttctttctttctttctttctttctttctttctttctttctttctttcttccttccttccttccttccttccttccttccttccttcyttccttccttccttccttctttctcgttctttcttttgacggagtctcgctctgtcacctggctggagtacagtggcatgatctcggctcaccgcaacctccacctctccggttccagggatgctcctgccccaatctcccgagtagctattttttttttaatttttggtagagacggggtttcaccatgttggccaggatgctttcgatctcctgacctcgtgatccacctgcctcagcctcccaaartgcagggattacaggcgtgagccaccgcacccagcctctattttctttcttgccttttttttttttttttgagacaatgtcttgctctgtcacccaggctgcagtgcagtggcatgaacacggttcactgcactctcaaycttctgggctcaagcagtcctcccacctcagcctcccaagtagctgggagcataggcgtgtgccaccaagcctgcttaatttttgtttgtttgtttgtttgtttttttgtagagacgaggcctcgctgaattgcctaggctggtcttgaactccttagctcaagtgatcctccaaccttggcctctcaaagtgctagcattataggcataagcaacggtgcctgctattctttgatttttatttttatttattttattatttttttgagacagagtctcgctctgtcgccyaggctggagtgcagtggtgtgatctcagctcactgcaacctccgcttcccgggttcaagcgattctcgtgtctcagcctcccaagtagctgggattayagacgtgcaccaccatgcccggctaatttttgtatttttggtagagatggggtttcaccatgttggccaggctggtcttgaactcctgacctcaggtgatccacctgccttggcctcccaaagttctgggattacaggtgtgagccatcatgcctggacaattctttcatttttaaaagatgcttattgccaccaaaaatgagtttattattcacaaatcaggtcatggcccacaattttacaaatattgccttaaatgccttaaagttcttttagtctaataccctggatagttatggatgaagagaggtasggttagagatgggacttatccaggtcactatgggattcagagcaatatctaggatggggcgtcaggctctggagttttaatccattgctttttgccctgtattttacacttagaattttgttaatgggtcttggttatcccagtgacattgttgttgaggtgcatccagtgctcaggcaggtcacagcaacaatggcgtgtgtgcgtgcatgcgtgtgtgtgtgtgatgttccccagccccatgaacagcacagtggaatatcatctcagccactgattgtcagctcagtgctggcctctagaagctaagccttatggaatcctgcatgtggatcctcttagatgatttctcttacctgagtacccctggtggacctggcttagcaatggtttgtatgatagctcagaaaacaagcattaagtccatcagcacattatacaaattcaataggcagagagtcacttgctactctcaaaggatcggcttctgaaatgcagaaggtggaagttctcatgtgaccccatccttgctctgtagaatgccacccagaggatgtttgaaattgactatagccgggactccttcctcaaggatggccagccatttygctacayctcaggaagcattcactactcccrtgtgccccgcttctactggaaggaccggctgctgaagatgaagatggctgggctgaacgccatccagaygtaagtaggagggcatgtggctctcacctaggcctgaacacccactctggagagaagatacaactgtatttctcagggtggctattttattgctcagaaatgggaaatggtccagtgtgatgttctgggaggggcttgtcatgagccggactggccctttttcaaataattaactacttcttccaatcttcaattttaatcatcagaaatcattaaataaatagcttaaaaaggaaaaggatgggggaagcaaacagaagtaacaatgattgagcacttaccagatacagggcactttatactaatgattccatttcctcgagataggtattattgttsctgtttatagctggtgaaactgaaatttgcccaaggccatatctttggtcagaggttcagctagtatttgaagggaagggaaggcatgcaggcagctgtagcacaggtatggctgtagtcatacaaaaagctaggttaacaggagaaaagcataacagatatgtaagttttatctgacatgagagtcttcagaaaagaagacccaaggaaaactttttacacttagattccatgaaaggttctgacctaatggtggtggactgaagtgggaaaccctcaaggcctgcctcaacagattcttcttggcctttctgggtggcattccttccttctgggtatggagcaggacccctctgcaatgagggtctagaagggagaagggagaggtgacctttctaggttttctggcttgctttgggagagaggggttctaatttctatgacccacactgggggaagatgaattctggtttgacttgcttcaggggagaaggaggggtgggcaacagaagagcaggagaaggccagagaaagaagatttgcttctaagrccttccgatctcctttagttcaaagtacttagcatgccaaggtgccatactttggggtattgttttctgagccccaataacagaataagccttgtgcttaggtagatttctgaaacccagtttggctttgtggttctgctgcggtaattgtataacttcagggtgtagaattatcccaatagctatctctctgcatctcttttgctattgcaaagtaactaactaacaggcaagaaagttggtgtggctggctgctctggctcttgcagtgctgatgtggattgctgataacttctcaaagatgaagagtgagaaaacccagaggcagattccgaagatagatacttagggagaatgcgctcattattctggttctaaggccactggcagagtgaacccaagttcacctgtttataattccgacagtgagttctggaagaccaagactgttccagggaaccctgaaatcatgggatcacacacacgcaaaatgacacaacccagggtcttcaaagagagctttgtgatggtaatggatggctccatatttaactttgtatcccatgctgtctgtaggtagacagaggagctggtagaaggttttgtcattttacctcctgccacatgattcctgacaaaatcttttgtcagaggatctagggcttggagtttttcctacacgtactaaaaattatttcttcaaaaaataaatatgtctcttactacttttcagcaaaatattcttatttttcctaagcctcacatggacatatataatttttatttttatttattaaaacaattttttagagctggggtcttgctctgtcacctggctggaatgtagtggctcaatcatagttcactgaaaccttaaagtgggctcaggtgatcctcccacctcagcctcctgagtagttgggattacaggcactgctaccacaccagctaatttttttgttttgctttgtttttagagatgaggtctcactatgtttcccatggtggtcttcaactcctggactcaagcgatcctactgctttggcctcccagagtgcagggattacagaagagagctactgtgcccagctataatttttatgtaataggaattagtgctgatataactctggagttttctgttgttgttgttgattttaagaagtgtccccatgaagtctgactagcttggggagctgctgtaaaaattcataacaaggcccctcccaagaggctgccaagcgggaaggtctatgtgtcctgtggtttatggttctacaccatatctttctctatagacagtttagaaatttatgtaggatactggatttttgagctctttccccttccacagagcacctcaattcaattatttatgcaaaatataattacaaaaagctaaaaacctgacttacaaacaagtatataatggacatatgtcagaaatttatttaactggataaagaaaatgtggtacatatacaccatggaatactacaaaaatcacaaaaaagaatgagatcatgtcctttacagcaaactggatgcagctggaggctattatcctgagcaaacacagggacagaaaaccaaataccacatgttctcacttataagtggtagctaaacatcgagtacatatggacacaaagaagggaacaacagacaatggggcctacttgagggtggagggtgggaggagggtgagttcccctatcgtgtactaggcagattatctgggtgactaaataatctgtacaccaaacccccatgacacgcaatttacctgtataacaaacctgcacatgtacccctgaacctaaaataaaagtttttaaaaatttatttaacttattactgaggaaactagctagatggtaaagctaattcaaaggagaatttgaggaagggaggtttacggtcagtcaagaaagtcatgttcaaataaagttatctttagagataaaactggttagtatcataaagggcaatgaatgaaaaagcaacctttagagttgtcttctctgtatgacaatcatttgtttctctctcaggcmataatctacaaattaatctgtaacttcaaagttcttcccttaatcaatagtaaatagtaagtcaaacaaaatatctcccctggagaatgaaggaagcctcagtgggcccattggacagtcctccattataacatggaaaggaaatgcagtcacccttttgccttatatccaaattctggataatttttcttttcttttctttctttattttgacacagggtctcactctgtcatccagtttggagtgcagtggcacaatcacagctcactgcagcttcaacctccctagcttaagcaaacctccacctcaagcctccagggtaactgggaccacaggcatacaccctggctaatttttttgtgttttttgtagagacggggtttcaccatgttttccaggctggtgtcaaactcctgggctcaagccatccgcccaccgtgacttcccagagtgctgggattagaggcctgagccactgtgcccagccttggataatttttctttcaaagcgccttctccctcttatccatgtgttagcaatagtcctaatgaggccctttccccacgcttctttcttcttgactctgccaagtatccaggaaggggctgtgtgtgtcttggcaggyatgtgccctggaactttcatgagccctggccaggacagtaccagttttctgaggaccatgatgtggaatattttcttyggctggctcatgagctgggactgctggttatcctgaggcccgggccctacatctgtgcagagtgggaaatggtgagtgtggctagactgggctctacctggtgtgtgtgagctggcaggcagcagctctggrgcaaagggaattaaagcagacctgcattccagagagcatggggcctgggactgtacccagmacaggtgtcttttaccttgacaaggtgcccaggcagagaaacaggccagggtcagggcatgggctctcctcttggtggtcactcacatacctcagcttgctcatctgtaagaagcagttaatggtgtcttctctatctacgtcacagggtatttgtgaaattaaattgaaaaatctttatgaaaagggctttggtccttaaaacattgcattcatgcagagtgatcttaattgtcctacattccaatttctaatttctctgcaagttataaaccaaaaagcccagctcaaataccccttgtcccttgaagcttttattcttttccataactactaatagtaatttctatctcctctgagcacccttcacggaacagacattataatggcttgttttccctgaactagggaggattacctgcttggctgctagagaaagagtctattcttctcmgctcctccgacccaggtaggttgttacagatgtcttgagaagatttataaaagcttcagcctaggtgcggtggctcacgcctgtaatcctgacactttgggaggctgaggcgggtggattacctgaggttgggagttcgagaccaggctggccaaaatggcaaaacctcgcccctactaaaaatacaaaaaattagctgggcatggtggtgggcgcctgtaatcccagctactcaggaggctgaggcagraggattgcttgaaccctggaggcggaagttgcagtgaaccgagatcgtatcaatgcactatagcctgggtgacaaagcgtgactctgtctcaaaacaaacaaacaaacaaaaaagcttcaacaatttatatcaaaagggggaggtattttgaaggctggggtacctctgcacaaatacttttgaaagtttagtgaaagtctgagtgtttatcactgaccagtgcatagcaacaaactaaacctctaggaaattaggctttgaactacgtaaccagatcttactgataaactggtaattctttgaattggtattgaaccctgtttgcggttgaccaactgacttcagtgctttctcttcctatttacttagcatattccacagccaatgatagcacctcrctaatcaaaatgacaagtcaggcatggtgactcacacttgtaatctcagcactttgggaggccaaagtggagggattgcttgagcccaggagtttgataccagcctaggtaacatagcgagaccctatctctataaaaaatttaaaaattagccaggtgtgctggcacatgcctgtagtccgggaggctgaggtgggaggattgcttgagcctgggaggttgagactgcagtgagccatgattgtaccactgcactccatcctgggcaacagagagggactttgtctcaaaaaaagaaataaggtcgggcgtagtggctcatgcctgtaatcccagcactttgggaggccgaggtgggtggatcacctgaggtcaggagttcgagaccagcctgaccaacatgaggaaaccctgtccctactaaaaaatacaaaattagctgggtgtggtggtgcatgcctgtaatcccagctactcgggaggctgaggcaggagaattgcttgaagctgggaggcagaggttgcagtgagcccagattgcgccattgcattcctgcctgggcaacaagagcgaaactctgtctcaaaaaaaaaaaaaaaaaagaaataaaaacaaaatgacagtttctgggatggtgtcattggattgcttggtagctgcaatgccttctatattctggccacttttatagagcaatgtgtaaatgatagtttttttctttgtcttactccagtaccttcatgttttgcacgcttagcatattattggtgttttcactgtggtaactcatttaatctttatgccaactttatgtggcatgtacatttattattcctatttgacaatataaatatataatttattagaacttcattttatacggaaaaaaagccttcctgtgactgagaagaggatacactgttcagtcactcttttcttcattcagcaaacattgcttggatatgttctatgctccaggctttgtgtcctatggcaaggatggtcttagtctgttttctgttgcttgtaacagaatacctgaaactgagtaatttataaagaaaagcatttatttcctacagttatggaggccaagaagttcaaggtggaggggctatatctggtgagggccttcttgctggtggggactctgcagagtcctgagggggcacagggcatcacatggtgagggggctgagtgtcctagctcagatctctctccctcttcttataaagccaccagtcccattcccatgatgacccatgaatccattaacctattaatctattaatccatgagtggattgatctacttatgagggctgagccctcatgactcaacacctcttaaaggccccacctctcaatactaccacattggggattcgatttcaacatgagtttcagagggacaaacattccaaccatagcagatggatacaggcacactgrtcctcgtcccctgaggagctcagctgaggagacaactacatgcaggacaacttttatgagacttttacttcagaaggtacttgtcgagtcctgtatatcctgatctctgctgccagccctggtgtaataaggctgcactggtgtctctttgtactaaatcataattttttttttttttttttttgagacagagtttcactcttgttgcccaggctggagtgcaatggtgcgatcttggctcaccgcaacctccgcccccccgggttcaagcaattctcctgcctcagcctcccaagtagctgggattacaggcatgcgccaccaagcctggctaattttgcatttttagtagagatggggtttctccatgttggtcaggctggtctcgaactcccgacatctggtgatctgcctgcctcagcctcccaaagtgctgggattacaggcgtgagccaccgcacccagccagaaaactcagaatgtttttaaaaagtttacgaatttgtgttgggccacattcaaagccatcctgggctgcatgtggcttacaggctggggttggacaagcttgtgttaaacttttcytgttttccagattacctggcagctgtggacaagtggttgggagtccttctgcccaagatgaagcctctcctctatcagaatggagggccagttataacagtgcaggtaaccctggagttgagcatggatggattgggggaggggttcccatccatctacattacataaatgatagaagtgatgcagacatgagcctcataggtctgtttctttaagaggtaatgccacagatagtgcttttagttcaattgcatttgggaaggcattgccatttttgaatgcctgctatgtggcaggctttgtgctgggtgccttgtaaatgctattcaattcttccaaccaccttcttttttcagtgaggaagtttgaaaaggttaagtgacttggctaaggtcacccagccagcaggtggcagaattaggatagcaccctaattctgtggatcccagagtttgtctctctgtttctcctgcaatattgttttctggcagcaggcatgcagcgtggactgaaacactttggtatcggcactgccttgacagtcagataaccctggaatggaaaaggatatggtcaattggggctggctgttatgtttcctctcttacttcctgccccattctccttcttctatgtgttcttggctctgcaaggactaatatactgtggggtacattgaactttaacagtttttggtgttggtaaaattacttaggtgaaacataaaaccatgttcattggacattgaccaaggatgccatggatgctcctttttttttttttttttttttttttgagagagagtctcattccgttgcccaggctggagtgcagtggggcaatctcggcttactgcaacctctgccttctgagttcaggcaattctcccacctcagcctcccatgtagctgggattasaggcgcatgccaccatgcctggctaatttttgtatttttagtagagacggggtttcgccatgttggccaggctggtctcaaactcctgacctcaggtgatctgcccgccttggccttccaaagtgctgggattacaggcgtgagccacygtgcccrgctatgaccaaggatgctcttatggaaaagagtaaaggttttttkttttttttttttaggagacagagtctcgctctgtcgcccaggctggaatgcagtggcacaatctcggctcactgcaacctctgcctcccaggttcaggcgaccctcctgtgtcagcctcccaagtagctggcattacaggcgtgcaccacgatgcctggctatgtttttgtatttttagtagagacagggtttcaccatgttgaccaggctggtctcaaactcctgacctcaggtgattcacccacctcagcctcccaaagtgctgggattacaggcgtgagccaccgtgcccagctatgaccarggatgcttttatggaaaagagtaaagttatgtaaaagtggctgcatcctggacatcccagggatgcaaagtggcactccctaggggagtgtgggccaggcttccttcttatgaacagtactatgggcagcttgtggggatggatcatagtagggtgggagcatgggcactgccttgcctttcaggtgtcggtggacagaggtgctgagagggctgcactggccagggtgtccgttctgaggctttgtggtgggaggagatgtcttcttgagagaggccaggttgctgctcacagagggatgtgtgagtcaccccacgtgcccctagtttttaccatcttgtgtctgtactggttaagctaataggaaccacattttcctacatgaagatatcaagtctgaaacttgggtgygtctttgctctgcatggctgtgtcttcttcctttcttctggcctcaggtgcaaaccctcttttgatgccctctttttttcagtctctgcctctccttgaatcactttcaatttctgctcacaacttttctgccccttttggttttggaaatgccacaaaaagtataatcaagtattaattctgcaaaggagaatgaagttgactgtgtggagatatttcttcttgtgtccatccctagcaacctcagatgactttaacttgaccctgggtcctgccaggtgactctgtccccctcctcctcctcctctccccttcccatctccacatgcttgaatcccactaatcatttttgccccttgtttacaaaataaacaagtatagacataagaaagcagaaaaaacataattgttactcaaacctcaggagccatagcaaagctcttcacattttgggagtttccttgaatattttttatgccttttttttctgctttcttacagagtaagttcattctgagtgacctattttctgtgtggctttttttgcttcattctttgtcatgagcactttttcatatcgttcaaaattctttcatcatctttcatggttgtcctacttaccttctgacgcacagttcctatacgtgttccttctgtctggaagccatcccagttgacatattggcttccgtaggactttcagaaccgtcactgtcgcctccttttgtgaagcacatgtgggagcagtttcatccctgacacactgtgtctctagtctcctggccttccacgcctctgcctggtagccatgagggcacatcatgcatttgtgcacatcacatacccaccgaacggctctggaatggaatagaagctgattgctttgataagaaggaaccgggggatttgtagacagtaattcttttcgttgttgttattgtttttgttttttgagacagagtctctctctgtcaccaggctgagtgcagtgatgagatctcggctcactgcaacctccacctyctgggttcaagtgatcctcctgcctcagcctcctgaatagctgggactacaggtgcgggcaaccacgccagctaattttgtgtatttttagtggagatgaggtttcaccatgttggtcaggatggtctcaatctcttgacctcatgatccgcccacctcagcttcccaaagtgctgggatgaaagccatgagccactgtgccaggcctgtaaacagtatttctgtgtgtgaagatttctgtaaaagggccaaggctgatggctcaatgcccgtaatcccagcactttgggaggccgaggcaggaggatctcttgagcccaggagttcaagaccagcctgggcaacatagtgaaactccatctctacaaaaaatttaaaaattagctgagtatgctgccatgcacccgtgttcccagccattcagggggcagaggcaggaggatcacttgagcctgggaggttggggctgyggtgagccgtgatcacaccactcactgcactccagcctgggcaaaaaagtgagactctgtctcaaaaaaaataaagatttctgtaaaagctgatttctgtctctgtcttaattcatgttgaagggtagaaaatggtggctttcctcaattcttgatgctggttttctctctcagtgctcagagtttgagatggccagggaggagctacgtgtttgcagccagggtaaaaatgagtcagaccagaaggcttaaatccctgtctgagaacatttagggccctcaacactgttgtgttacagatacaggaarccaggtctgtgcttttattcatcgtcatgattcagtcagatatgcagatgtttctcttttggggggattagctgagccagtgccacctatgatggtttgcatatgtggatgtttatctcagtttctacctgaaaaagctaaagccattgataatatccaaggtgaaaataattaggagtggacgaccttccacccacaacttaacttcatccaattaacagggcattcatcatgaggtaataagcctatttatgactgtttggaagatcaacatctttaaaagtctctggtgcttaaggagcttacagaatggagrcagttactctaaaacaaagacctgcaaattatggctgccacctacatttttttgtaagtaaaagtatattggaatcgccacacygtttatatatcatctgtggcygcttttgtactatagtggcagagttgagtagttgagatggagacctctatggctgcaacacctaaaatatttactctctggtggttttttgtttgtttgtttgtttgtttgttttctctgtcacccaggctggaatccagtggcgcaatctctgctcatggcaacctctgcctcccgggttcaagcaattctcgcacctgagcctctcaaatagctgggattacaggcacctgccatcatgcctggctaattttttttgtatttttagtagagatggggtttcaccatgttggccaggctggtttcaaactcctgacctcaagtgatccacccgcctcagcctcccaaagtactaggattacaggcgtgagccaccacgcccagcctggtgttttattcaaaaagtttgttgactcctgctctagaaacatcggtgttcctctgaacctagccatgactttttctatgggtttttcaagccttttcatttgtgtgtctcacctacccccagccttcacccacctttttttttcctaattggtcgtaacatagaacttgagtagagtcttagctgctaacattttgagcacttactagatgccagatctgtgcaaggttctagtcaygtattgactcagttaatcctcatgataacccatcgagttaggtacactttacaggtggagtcccatgggtaggaagtggcagagctcagatttacatgtagacagttgggcccctgccagccgtgcctgtgactagaactctaagctgcctcgcaattgtgcttttctcgctctctcaaaacctaaccaaattatgtgtacgcattttttacaagcctgtttattttrgagtatatgatacaatgatgataatggataaataagacctggaaaagcaagatgataagaaaaccaaggttgggttkgggcatgggggtgagctcaagagaacatgaggtacagaggctgtgagaccatttagttgctggagctaacttttaagatctttagctctgaatttcttgacagccagatgataaaaaggagacacagtcatgtaagtagcacttataaaggaggagaaaagaactttgccagtatttacaaagcttttcttagcatttatctaaattattgcaaaaggaactttcatggaactcatcaatgggagttttctactcttgtaagcagcaaatacttcctcttccaggatggtttcatgaccagtgaagtctctgtcctgggcatgcgtgctacagtctgttttacttcttgaaccccaratctgaaagtattgccagagggatcctctctgagagaaggatcattcatgaaaccttgtgggaggcaggactgtgcagataatgacggcagcatttaattcatttttgtcactcaccattcttctcccactctccaactctgcacgtggatgaaattgagctgttggtgatgtcaaatatgtaggaatatcctctacccattcccttcccaagttcagagccttttcttctagagctacctcgggctgtccctccaaggaaccttccctaacaatctctcccaggcactcaggctaagcacctcttttctgggactcacagtttcttgtgcttacgtttaaagatcatgtattcccaggatcacaaatatttttgtattatgtgcatgttaaaatgttatggttgggtattttttaattttttataaatgaaatatagcatacatacgtaaatgcgcagtatgatgaatcactatggtgtgaacacccacataaacaccaaccaaggtcaggagacagcacgtggccagtgccctagaagcttcccaggtgtccttgttgatcatacaccatttcgtcccactgtcctgacgcttatgaccatcagttttctgcttttctttatacttttaccacctatgtgtgtactcagactttatagtttggttttgattgttttgaattttctctaaaggggattgtactgtatgtatttttcagtgtcatgcttctttcacttcacattatattcctgattctttggtgtattgggtagagctgaagttcatttgttttattgcttcagagcaatgtttcttaacctgattttttcatcattgcccccaaggatcccttttaaactttttttctaattgccttctcctctccaccatgaaattttattacctgagatattgtatattggtttatttgctctgtgtgtgtgtgtgtgtgtgtatgttttatataaataaggaataattttttttatccccaaagcatcaatttttacccccttggggatgctacccacctcactgggaatgcatgcttcagagcagggaccccaccctcagcactattgccatgttgcacctgataattcttcattgtggggcttccctgtgcactgtgggatgtctggcagcatccctgggcctctacccactggatgccatgagcatgtctgccgaggtatgacaacctcaaacatttccagacatagccacatgtcccctgtggggctaaagagctcctggttgagaaccaccgatgttattgagcacaaactgaacaccggtgtgtgtgtgacagcaggtcaaataaacatgctgtgtctgtccctggcattcacccttcttcttattgccatggagattttgcatagtatattaagggaaaacacaattacaattggtgcatataatatgccagttttgagggaagaaaacactgctgtatattatttgcgtatatttggggagtgtgtgggtctgtgtaaatctagacggctgtatactaaaatgcttgcagtgattatctctgggcaatggaattaatggatacttttcctgttttcttttcatttttctagcatttctaccatgggaaggtattatttatgtgatgtttaaagtatctactttctattctagggaagaataccactacaatctgaacaccagtttggtgttttttgtttttcttatttctcagtggtgggagagggttaataggaggtaaacttttatggtgaattgttggtgttttttcttttagtcagttttgaggtctgagtgaaggaaatttttccggcagtcattaagccttgtcatcttagcagatgctcagatattttcccacacaaaagcttgcattagggtggctacattaggatctcctcatttttccctgctcttttttcactcacaggttgaaaatgaatatggcagctactttgcctgtgattttgactacctgyrcttcctgcagaagcgctttygccaccatctgggggatkatgtggytctgtttaccactgatggagcacataaaacattcctgaaatgtggggccctgcagggcctctacaccacggtggactttggaacaggttggtgtttgtagtaacagaaattgcagcttaaaatcagctttttactcagtcagttgctctgggcagctgttgttrtaagtgtcatgggcagattgagatttttcatgttttcatttttcaaggaacaggtagaatagaatacttgcacccctcagtaacagagggttatctgtaggccaagagcttccagggtagctgcattttcagcactggtggagctagcctggaaaatggagtactgctatctcaggggctaggctggcccacccaagatgaagaagcaggtaggcatctccagctgtgagaagctctaccttgaggcagtcaccttttaggctgtgtctggggcgcgcttctctgctctttctgccctccctgtcctcccacctyggcaggacactcggggttatgccttggctgtagccaaccttgaggtcagccactggctgggaacttaccttatgctttgttgtctttctgcataacttagaacactgaactgtcagggctggaggtggtttggcagatgctacaaaggctatgccagattccttacacagtgctgtgtaaactgtggagatgctgcaagtgaargttacagatgggtgggcaatgtggttaggatgcttctggccataagtaatattaagagagacttcatttaggagagtggctttcataaaggatatgacagctgtattcgtccattcttgcactgccctaaataaataccagagactgggtaatttacaaagaaaagaggtttaatggactcacaggctgtataggaagcctggtggcaacagcttctggggaggccttaggaaacttaaaatcatggcagaaggcaaagggaaagcaggcacgtcttacatggacagagcgggaggaagagataggaagggaagtgctacatacttttaaacaaccagatctcataactcattcactcactatcaggagaatagcactgaggggatggtgctaacccattcacaagcactttgcccccacgatccagtcgcctgccaccaggccctacctccaacactggggattatagttcgacatgagatttggtggggacacagatctaacacagatccaaaccatatcaacagctaaatgtctgactggactttttttgtgtgtgtggctatgaaagacattattgagaaattgcaatctttgaataaagtctgtagattagataagagtactgtatcagtataatttcctgatttttagaagtatattgtgtttatttaaagaatgcctttgttctgagagaatgaacactgatgtatttagggataaagggccatcacatctgcaatttattctcaggtggctcagaaaaatgtatatttttatagagaaactgatagtgtatatctagtaaaatgctaacaattgggaaatctaggtgaagggaataggagagtttttttgtactattcttacaacattctgtaagtttgaaatcactgcagaataaaaagttacaggctaggcatggtggyaagtgcctgtagtcctagctactagggaggatgaggtgggaagatcacttgagcccacgagttcaaggctgcggtgagctgtgattgtgccactgcaccccaagctgggcaacagagcaagaccctgtctcaaaaaaaaaaaaagatacacacacacaaaaaagaccagttccttgagtagcataaagaccctgatgttctcccctctgaggtaaaaggcacttcatgtgcattgcacagccaatgtttgcctctcttaagagggatgtacagaagactraaatgaggaaattagcctggtgttgcctttttttttttttttnnnnnnnnnnnnnnnnnnnnnnnnnnnnnnnnnnnnnnnnnnnnnnnnnnnnnnnnnnnnnnnnnnnnnnnnnnnnnnnnnnnnnnnnnnnnnnnnnnnnnnnnnnnnnnnnnnnnnnnnnnnnnnnnnnnnnnnnnnnnnnnnnnnnnnnnnnnnnnnnnnnnnnnnnnnnnnnnnnnnnnnnnnnnnnnnnnnnnnnnnnnnnnnnnnnnnnnnnnnnnnnnnnnnnnnnnnnnnnnnnnnnnnnnnnnnnnnnnnnnnnnnnnnnnnnnnnnnnnnnnnnnnnnnnnnnnnnnnnnnnnnnnnnnnnnnnnnnnnnnnnnnnnnnnnnnnnnnnnnnnnnnnnnnnnnnnnnnnnnnnnnnnnnnnnnnnnnnnnnnnnnnnnnnnnnnnnnnnnnnnnnnnnnnnnnnnnnnnnnnnnnnnnnnnnnnnnnnnnnnnnnnnnnnnnnnnnnnnnnnnnnnnnnnnnnnnnnnnnnnnnnnnnnnnnnnnnnnnnnnnnnnnnnnnnnnnnnnnnnnnnnnnnnnnnnnnnnnnnnnnnnnnnnnnnnnnnnnnnnnnnnnnnnnnnnnnnnnnnnnnnnnnnnnnnnnnnnnnnnnnnnnnnnnnnnnnnnnnnnnnnnnnnnnnnnnnnnnnnnnnnnnnnnnnnnnnnnnnnnnnnnnnnnnnnnnnnnnnnnnnnnnnnnnnnnnnnnnnnnnnnnnnnnnnnnnnnnnnnnnnnnnnnnnnnnnnnnnnnnnnnnnnnnnnnnnnagggcatcaccagaggttgcagtgaggccagaagattgcgccaagacacatccagcctgggcaacagagcgaaactccatctcaaaaaaaaaaaaaaaaagaaaagaaaaccatgacaaaaaccacaattacttttgcaccaacctaatacaaagcgctgcagaggaagtgacatgccggtttcctcctgctttggccaggcttctcatcacagcgatgaaaaagcacggcatttttctgttgggaggaacaaattgaaggtgattatgattgtgttttaagcataatttgtatgtgaggtgacarcgtgactgtcactgctaggggttggagaatagacaaccacaaggccagggtgcctggggcagatgggccctccagtctgaggcttttgccagcttcattgctttgtgtgggagaggggcattgcccgatgggtctcatgagaacagtgtttaaagagctgaatgccacctaatgcttaatagtgagaaagacagccaatgagattctgctctttctcaatcagcatattctgtcctgaaagctggccttacagagaagccaaaggcccatctcagagcaagtggttatcagagggtcttggctggggccacgtccaccctgggatacctgctgtgggaactgggttgtgaagtgtggggcyagggcattctctgctcgggttggtgtggacactgctcatgcttcctctttccccagtgtttggcagcccattccttctctgtggagaaattcttttttgttttagaggaggaagggaaaatagaagacacgagaggcaagacaagacacccctaatgggacatttcatgaggaaaacttgagagcaagtggtttggaatggctgatgtacaaattagaatccagagtatattccattattcaggggtaaacacaattagagcccccacatccctttgatttcttaattaactggcaaatatttgtggtagtatcatgtgtatggtgttattgaggctgtaagtatcttcaaaccaggctcatcctgtggggtgcatccaggtcaaccagatgttcttgtgaagagataagcccacaagatatgtgtccaggccctggggaaacacagataaagaagacaggcctgtgaagggaactcttgtgcagacaggaaaggccacggggacctcctcagagaggaagcaatgttctctggtccacacacatcttcaaatgggtccaatcagaagctagcttggaagtattccaggcccatggggtgtgggaagggaaaggggcctgtcttagtcagtgtgggctgctataacaaaatatcttagactgggtaatttataaacaaaagaaatttattgctcacagttctagaggtggtgaagtccaaaattaagatgccagcagattcagtgtctggcaagggcttgctctctgcttcaaaaatggtgccgtgccttcttgctgtgccctcacatggtcaggaagctccgttgagcctctttttatttatttattattattattttttttaataaaaaaaatatttttgagatggagtgtcactctgttgcccaggctggagtgcagtggcacgatctcggctcactgcaacctccacctcccgggttcaagcaattctcctgcctcagcctcctgagtagctgggattacaagtgtgtgccaccatgcctggctaatttttgtatttttagtagagatggggtttcaccatgttggccaggtggtctccaccatgccaggctggagtctgtttttataggggcactaatcccattcatgaaggtggagcccttatgacttaatcacttccagtggcctcacctgttaatactatcatcttgggtgttaagttccaacatgagaattttggggggatactaacattctgaccgtagcagggcttcaggcccgagtcccatgaagggctcttgttatttaacttcttgtcatttccacgactgacctaccttctccctcttacaattttcaggcagcaacatcacagatgctttcctaagccagaggaagtgtgagcccaaaggayccttggtaagaatckagggtgaggtgtgtgtttgcagctgttaagagagaaaagttacatgctgctgaaactgggcagtaggcccttgatgtttttggctctggagtcagcagctaatgggattgtggagtcatagccattctggacatgtgaatgacagcagaaacaatgtttctatttgaaattgagctcctgcactggggtggaacagactggggaccaacatgaatggcctgttacacatcaggttctgtsctcctgcatcctggtctcatctggtcctcagggcaactctcataagtggtcttattgtctccatttttattgaggctcagggaacctatgtcacttgccagggtcatatagccagtgtgtggctaagccgggatggttggcaagctgcaggtgggtgtcaacaatctatcaatccttctctctccgttcttcccgtctttggctgaagytgctattcttgttgtcactcagcccagtttaaggggttaatatcctgcgccttctctgcactaggtcagactgccccacctgtgtacaagcctgatttataaaacagccttttctgagtctagtctctgcttagtgagcagtgcagaccctgcattcatagactttgggtggagctatttcctggaacctaaaacaagaagtccccacaagaaggtccagacttcttttttgttctctagaccaaggcttggcagggcaatgcccaagaaaaacatgaagtgtttgaggcctgctttgcagaatactgggacaagccttcctcgttataaatcaacctgagatctgaaaatctggattcatacaaaggttgaatttggagctgttatttatttatttatttttaaatggagtctcactatgttgccagactgtagtacagtggcgcgatctcagctcactgcattctccacctcccgggttcaagcgattctcctgcctcaggctcctgatagctgggactacaggggcgcaccacgatgcccagctaatgtttgtatttttagttgagatggggtttcaccatgttggccaggagggtctcaatctctagaccttgtgatccgcccacctcggcctcccaaagtactgagattacaggcatgagccactgcgcccggcctggagctgttattctataaaaatattttgctacccagtttctttgcccaacaagactttcctactgtgtttaaacaggggatcagctatctaaattttaatataggcaccacttttcaggaatacttgcattgtataagatgagatctactttaggttagaacctgaggactgaacataggcattgctggtattggaagtgctcactggggggcgkctctgggttaagcagtgcatgtcagcatgtcaaccccctttacacctgtcatagatggggcattgcagggaagccctrgcrttggaaggtcataagtctatcctaagggctacgttctttttttgttttagatcarttctgaattckatactggctggctagatcactggggccaacctyactccacaatcaagaccgaagcagtggcttcctccctctatgatatacttgcccgtggggcgagtgtgaacttgtgagtgttcattgcctgaggggagggtgccctcagtagccatgggctcacagtgaagtaccgtgttcttttgtttccttgtaggtacatgtttataggtgggaccaattttgcctattggaatggtaagagcactttaatatctgtagaaacttatgctagaatgtttctgttgattaatttgrggaggggtgtgcccacagacaattttattttcctttttttgtttatcctctcctaaattttcttttttttttctttttctttttyttttttttttgtagacagtctcactctgtcacccaggctggagtgcagtggtacaatctcaactcactgcagcctccacctcccaggttcaagggatcctcctgcctcagcctccaagtagctgggattatgggattacaggcatgcaccaccatgcctggctaagtttttgcatttttagtagagacggggtttcaccatgttggccaggctggtcttgaactcttgacctcaagtgatcctcccactttggcctcccaaaatgctaggattacaggcgtgagccaccatgcctggccctaaattttctaacatataaggattacctatgtaattttaaaaaataatatttcttacttttttttttttttttttttttttgagacgcagtctcgctctgtcgcccaggctggagtgcagaggtgcaaatcttggctcactgcaagctctgcctcccgggttcacatcattctcccaccgcagcctccagagtagctgggactacaggcacccgccaccacacccagctaatttttgtttttgtatttttagtagagacggggtttcaccgtgttagccagggtggtctcgatctcctgacctcgtgatccacctgccttggcctcccaaagttctgggattacaggcgtgagccactgcgcctggacaaaataatttttaagggaaataaatgtgagcatttagaagccttactgttttaaaccagggtagttgggcaggcttcagtcacagtctataactgtagcttatttgttcaaatattctactgtggtctctttcttttaacgttttgttttgttgaggtataattcacaaaccataaaattgacaatttttaagtatatgatgcagtggtatttactgtattcacaaagttgtgtaaccattaccattatctaattcagaaacattttatcaccccaaaaagaaactccatacccattagcattcattccacactctccctcctctcagcccctggaaataatatactttctgtccctgtgggtttgccaattctgaacatttcgtataartgaaccacatatatacacctgtatgacttctttcatttagcccaatgtgttcaacgctcwtccacgttgttgcacgtactagtgcttcattcctttttattgctgmatagtattcccttgtgtggatgtacagtattttatttatmcattcattggttgatggacatttgggttatttgcacattttggttatagtgttgctttgaacatygatgtacaaggatttgtttgaattcctgtttcagttcctttgggtgtataccaagaagtggaacggctgtgtcatatggtaactctatgtttagagtttcaggaactgccatagtgtttcccaaaaaggccacaccactttacatttctgtatttttttgtgtaggaaaaattatgacaaaatttttctgtaacgtctttgatttttgttggttttttgcaaagacagatgatgctgtactggcttttcgctaagcttcatttcccacctgtctctttatttgcatttttctctctgaatcatggaggatgcccagctgttgagttttgaaggcttagtttgggcctaaatctctcaggatctgaaattggatactgtcagctcttaatgaagtttctcctttgaactgctatcttttttgcaggctgagatgggctaggagaagacatcgcttacaagcattatcaattttaatactattagtagagccaagaaatgaagatattgcaaaactcaaatgtcactgcatataagataatagtgtgcctggggcgtgtctgggtgggtgaggggagggagagcatcaggatgaatagctaatgcatgcagggcttaatacctaggtgaccaggctgggtgcggtggctcacgcctgtaatcccggcactttgggaggctgaggtgcgtggatcacgaggtcaggagtttgagaccagcctggccaacgtggtgaaaccttgtctctactaaagatacaaaaaattagctggttgtggtggcgctcacctgtaatcccagctactcgggagactgaggcaggagaatcacttgaacccaggtggtggaggttgcagtgagctgagatcgtgccattgcactccagcctgggtgacagggtgagactttgtctcaaaaataaaataaaataaatacctaagtgaccagttgataggtgtggcaaaccaccatggcacacgtttacctatgtaacaaacctacacgtcctgcacatatatcccggaacttaaattaaattaaaaaaaaggaaaagataatagtgtgccaaggttggtcactgatattttagataatccctctgtgttcatcttatgagaaacagttgagacctggtgggtgcctttttcacttagtagatggggattccccctagctgccattgatgggatcgggaccaatcatccgatccaggaaaaaaggcatcgtttttggaactttatggttcatgacacaattttttaaaaatcttactgttatacttaaaataacacattcatcttaaaaaaaaattggacattatagaaactgtcagaacataaatgttgtccttaatcctctctcctgcccctccctctgccataatccatagaattcccctttcttcctctgttgccttatttagcctgcatattagcctcatcttaattagagattatcagcaccacttttcagataagaatagctgaatacaaaaaaaagtccacacgttttctgttcagctggcaaggggtgaagcttggactggaactcaggtggtggtgagccagagtcactgcgctttggatcaccctttgcaccctggagcccctgagccagcccccacacccaccccactgtgttctgccaagcctccctgaagctgctttttgccctgtctctttgaggaagtgagagaaggccagtctgtacttagcagctgttcttcaggccagcttcctagaggagagcagggagagaaaggcatcaggagtggggagttcactgcccatcccacccacaggaacatgcacctgcctgtgcaggtgtgtgtctccttcctccacacctgtgtgtgtccacagctgtgtgatggctgcctacagggtccaggcgctcctgtacttctcacacaatgtggaatgttgatgaatgcaaagtctcaccatttctttcaccttcccacctcacaccctcttaagtggccagaggaggcttgaatctgcaccatttctctgcgatgctgccctttggtggtctaaaaacacccaaagtaagattctgccagtagaactagaacaaatacttagtcttccaatccatccttaaacccactggacagcttcccagcctgggctccctcggcctgtaaagtgtgcttctagaggtcacactttcccaactcaacctggcaaccccctccatgctgggctctggctaaggactcaagggcaagtgaggcacagtctctgcccctgaggtgcaagcagtgtagcatggagagagacataacaaataagaaacacagcacagcatgggtgactaccacattagaagcagacgagggccacaaagaaggtgagttccttgcagcaacggatgtgggtttttttttttctttgtgtctcacaggaagggatgtgttttaacctatgaatcccttaaggcaggcagacctgttggctgtgagttgtctctgattaataagaaatgggggaaatggtatgactagatcagttcagttggttgagtggtccagatctttcaaagtttagattctgtgcagagaactaatgaaaaagtctttggagctgacctgcttgatctgatcctcagccttgctcatctgtcacctccacaaccagtaggtcacccaaggtggctccatcattggtgagctgcatccaaggaatttattactaatcctaggtaaactatcatgttttgtgcctcattgatgtacaaattaggttggacaaaagactattcctaaaataacttcattctcacacacttgcattgcaatatgctctctgaagtagaggaggaaggcacaaagccttgctggtctatggatggcagcatcagcgtcacctggacacctgttagaaatgcagtttcaggccccactccagacctgctgaattagaatctctgggatggggcttaggaatctgttttaacaagctctccatgtgacacttaagcatgggtaagtttttgaagtaccacccaatgttgcagacaacctcatacctgtgaacatcatccctgacaaggtcgggatcctctggtctagaccccgccccttgcacagtgactgcaggggcatttgtttttctagtccttttgtatactcagtgttggcattatccattggtctttgttgtaggtcaagttcccagggaaacagactctgagattacctggtagaaagcttattgattgtgctctctggagcaatgcctgtaggatagagagggagaagtggggctatgatgcagcttcacaagtggcctcatccaatcttagagggagctctgcagctgggttggctgttcgaggcacattggtcagttgttggatgtgggctatccctgagggttgtaaccttgggtgaggcagctcagcacaggccagcacccagagacggacacatctgagaaatgtcagcagacaacagccctagccgctgggagaatgagtgagtgccctggttctaaagggggatccaagaggtgcaccacagccccatcgacagtctttgtagatgcaacaaaggccctcggattatgtttgaacctctgtggctgatgtgggtctgctgtcatctcccgctgtgtttggtttaataagccctgggttttctgctgatccatggcctagtcatctgtgtcttcaccactgagcttttctcagccacagcttgaggacgtgaaaaagttcagagttgacaggattaacagtcagagatgggggtcatatcataagccctgccattactgcttgtgaggtgttagcagatttttgtggggagcttcagattccctgcttgtccagtgggggtgatacctgctagaatcacagctgtgagcttctgtagagagtggatggaaagagtccttggtaaactctaaggtgcctggtaastgctacctgtagaaagaaattccttcctctaaacgttgcatcctgagggtcacgtctgtgtctcccaacaastggttttaatgtgtcttctagttttctctctctacagtgctgagctcatggatcccaaagaacttgtcccagagctgcaccatcagtaataactagtggcacatttttgtcttctaggggccaactcaccctatgcagcacagcccaccagctacgactatgatgccccactgagtgaggctggggacctcactgagaagtattttgctctgcgaaacatcatccagaaggtgggtgctttgtatgagctgtggtgggctgatcttggacagagcctcttttgaactcactgtggctctgtggacaacttcctgcctggagccctcctgtttaaaaggatggatgaagggaggcatcagctagacttgggtttgcatcttgtacccacgtggttaagagtgagtctatgagcagatgcttataggagagtaggagatataagacatktatttaaaaactgcaatatataatacagtgttaaatgctacttacarattcacttcttatatggtgagaattcacccggggaaatttctgtctccattttcttctccttccaggccagattatctttccaaaagttcaggtgagaggtagggtgatgggagagaatgcacagatcctcttgagactatagcccckattaaggcagcatggatatatgggagcccctatccttgagacacagctaatgtacttcaatatcaaaagaggtaaagctaagctctggtttctttatttaatgcatcatctgaaaaaagtaagtttccagtaaccaaagtgtrtaagaattatttctcactagaaaataactccgtccttatttgcaagagagaagaagataaactattttcctttttatgtgtggcccaatatacagactatgtgatttcagaatgaggaacaccagattttgaacctggacactatttcttcaaccttaagccarttgtgtaaattccctttatataaaagtagaggtagccgtacttrcctcacagacttgtacagtttaaaaataaatggcactcaataaatgtttgttttcttctttcatagtcaaataaatgaacaataattatttatttacctaaaaaaaaaaaagagtgagtctatgagcaaatcagtctactgattgttaatttgtaaaactgggattacagcatctggttgtgctgtaaagcttgaaaagaacgtatgtaagccatccaggacagttcctgacacatatatgtctaataagtggtagccgttaactattatttatcttaaatgtaagaaaatgtgtgtctacttaaatagctgatgtacataggaaaaaaatcttcagatactgtgaagcatggtgcagatgtcagctgtcagtgaagcttcatttttctatttggagcaagtgattgctgtttctggactgcatctgaactgcttagtcctgctagcgttgtacccttttgaggcacctaatgcacctaggtggggtttcctgtctctgctgtgggttaaaagaaaaaacccacagtttttatgctcagtcacctgagttttgaagttaaaaaaacaaaggttttctgcctataaatggtatggttttttttgttttaagtatgatgtcgttttaattttaagcatgtgttaaaatgaatattacaaattttttaaatataaaaaatacaatctagacttaccacacttataatttgtccatttcatctaaattttcaaatgtattgttaaaatgttgcttatgttattcctttattatgggtttaatctccacagaatttatagtaatgtctcccaagctctcccttgtatgtttgttctgttttgaagctttctgttcctatctttattatttccttcctttatttgaagcttagctttttaatgcagcctttcttcttttctaatataaatatttaaggttataaatttccttsaagtactgctgtggctttatctygtaagttttgatgtgcaatctatttcttactgtttgcttctraacatatctattttgatttctcttcaccattgatatgtgttttttaaattactggaaataagtactttcctgtttttttgatttctagtctttttgcattctggttagagaatatagtctgtgataccaatcccttgaaagctgctgagcctagtcttagagcctgacatacaccaatattaatggtcaatgtgcgcataaaaagaaagtatattttacagttgttgactatattctacatacatgttcatcagattaagtttattaatggtgccattgatatctttgatctgcttcctaattttttgtcagttcagtctactatttagtgagagttgtcctcatgtatttccctttgtagctctgccagttctgaggttatgttrttaggtgggcaaattgagaattacatccttcagtacttaatagtaaagggattatataaccctctatttctaataaggctttttgcctggaagcctttttttttttttttttttctttttttggtctgttattcattaacaccatttacctgcatacttttgcttggtatttatttttctgaggtatctttcccaatgctgtaatttcatcctttttatatcctttgttctctttacatgtgtcccttataaacaggatataatcgaatttttaaaatatctagtttgaaatttcttgtcttttaactgatatatttatacattctcattcattgtacttcttgatatacrtagatgaatttcaattatcttattttataatttctattcgtttacctttttggctctttctttccctttattgctttcttttagattgaggttttttgttttgttttgttttttcctcttatttctttcccccctcttctactttggaagttattcactgcattctaatttttttagtggttaccatttaagtgtgacatctatacccccagaaaagaacaactcgtagtacacagctcagtgaatttaggcaacgggagcgcagccctgtgacaaacacatagctccccggaagcccctctaatgtccctctctagtcattgacacacatacccattcctgagctcacagctgtcctcacctctatcaccagagattcattttgctcrtttttaggcagcaagttcctacaatatacactcctgtgtctggctgtcttgtaatagtttaaaattaatcaatrtctttactttctccatattgcatccctctttaacttactgtaactccaattacagccctcttgatttgtatgttattattgtcatgtattttaattctctgggtttagttttcatgtattttagttctctccttaaaaaataaaacccatggggcattactacaatggcttcagatagtatttcacttgacccacatagttcatttattggcaaatgatttaacaaacattcatcaagtactctgcatgcgccaggttgcagttttaggtgcttggtggctgtaggctttcctgaaaaggtggagctcaaacaaaaattttaaggtggtgagagagccatgtggcatatctccrcctggacaagagcattccaggcagaatgcagccagtgagaacttgggaaggtatatggcatttttaaagactagcaaggaggccagtgtggctggagcccagtaaatgaaggggtaagaagtaggagaggctgtgcgcggtggctcacgcctgtaatccaagcrctttgggaggccgaggygggyggatcacgaggtcaggagatcgagaccatcctggctaacacagtgaaaccccgtctctactaaaaagacaaaaaattagccgggcatagtggcgggcgcctgtagtcccagctactycggaggctgaggcagaagaatggmgtgaacccgggaggtggagcttgcagtgagccgagatcacgccactgcactccagcctgggcgacagagcgagactcggaaaaaaaaaaaaaaaaaaaaaaaaaaggaggagatgaggggtcagggatatagatggggaacagatcacatggagcattacaggccattataagactttggcttttactctgaatgtaatgggaatccattgaggagttgagcagagccgttgttaaagcattctattaaagcagattccagctgctgtgttgagattagaccctgggaggtgcggcaagggtagagtaggaagaccagttagaaagtttttgcagccatctcagtgagaggtgattgtggcttatgaaggtagtaggaactaggcagtttcagaatatattatgaaactagtgctaatataattttcagatggggagtatgaaagagaggagagtcgggtgactctaaagtgttttaaatggcaacttgaaggacagagttaccatttatgtggggggaagatcaggagttcagttttggctgtgcaaagttagacttgtgctagtatatgtcctagtggagatgtagagtaggcagtggatatatgaatgcacagcttgagacaaaggtctggtacctttgtcccaggaccacacttttctttatnnnnnnnnnnnnnnnnnnnnnnnnnnnnnnnnnnnnnnnnnnnnnnnnnnnnnnnnnnnnnnnnnnnnnnnnnntttattgcttcttctgcctgagtatattctttagaatttcatttagtaagcaagttatattaattcttctttgtctgaaaatttttttttcaccctcattttcaaaatgcagtttttcttttctttctttctttttttttttttttgaagacagggtctcactctgttgtccagaatgagtgcagtggtgagatcttggctcactgcaacctctgcctcccagcttcaagcgattctcctgcctcagcctcccaagcagctgggattacaggcgtgcatcaccacacctggctaatttttgtatttttagtagagatggggtttcaccatgttgaccaggctggtcttgaacttctgacctcagatgatccatctgcctcagcctccygaagtgctgggattacaggtgtgagccaccatgcccggcctcaaattgtagtttttctaractgatagttttctctcagcatactgactttgggcttttattgttgctgctgagaagtcagtttactgtactctgtcactctcttgaagataatctrtctttcctcttggacagcttctgagattttctctttatatttgacgctgtatagtttctctgtgatgaatctaagtgtgactttcttttcgtttatccygcttggtagttttggaacttgtggcttggtatcttttttcactagtcctaaaaagtttatgccattatgtcttcaaatatttgtttctattagataatttgttagaccttctgattctagccttcacagctcgtaatctctttttctctgtgcagcattctgattgccttgaaatatgttcttcaattgttgctttctctttagtagctataaattctaagattaaaacctttccattgaattattaaattatatttttcattctataagttcacattagcagttcgaattttactcagccatttttaaattctcttgctttttccttatgtatacatgttcttcttttatttctttaaacatactagagatacttctgttatatatctytatttgatcatttcagtatgcagagtctttctttgtctcattctgccttytgttgtttctgtgacctcttgttcatgatgtcttgtttctgcgtgtgtgttgtgattttgactgagctgaatttcttggaactttttgttgttgttgttgttgtcattgttcttagagacagggtttcactctgtcgcccaggctgagtgcagtggtgcagtcctggctcactgcagcctcaacctcccgggctcaagtgattctcctgccacagcctcctgaggagctgggactacaggcatgtgccaccatgcctagctaatttattttttattttttttttgtagagccagggtctcactatgttgcctaggctggtattgaactcctgggctcactcatggaacttttatctttaggaattatttgagatttggggtgaatgtgggttcttccagagagaattagcatttgcttctggcaggtaccagggaacattacgccttaaattaaaatcttaaattgagggattttttttgtactacagaagcagtgtgaattttagctacaaaatatatcagagggctgactgtgcatatgaattttcaaaggagatttattttctccctacctattgccatgtaacaaagtacccctaaacctagtagctcaacataacaaatatttattatatcacagtttctgagggtaaaggatctaggaacagcttagatagatgttatgtctaagctactcctagggctatttttttatttctrtcagtttatgcagtcttaaaaatcagcattttcaaaataccattccatatttgtatgtatgacctccatcatttcttttgaaaaatcacctgtcactggttttcctttgatggtataggtctttttttctctagtgcttttaagatttccttttcatctttgatttttaggaattttcctatggtatgcctatgcatagttttctttatatacatcttgtttgagggtgtttgaacttcctaaatctatggcattatttcttttgtggattttagaacattcttggctgttatctcatccaatgttatgtttacttcgttctcccaccttgcctttcagaacaccagtgatatgtgtgttagacgttttttcctgtgttctgtgtatctcctaagcgcttccattgtttctatcctttcccccgaacatattttagtttagattttattctgacctatcttctagtttattaatcctcttttcaactgtctgagtgaaacccatattatagactcaatttcaatgattgcatttgtcagttctagagcttccattagattttaaaaattgtttccagttctctgctgaaattcctcatcttgttttgttgtatgtttattggcataattttaagctttcttcagattattccaataccatgatgtcttatgggtctgtttcaatggcttttttttccttttttttttttttttttgagacagagtcttgctctgttgcccaggctggagtgcagtggtgtgatctcagctcaccacaacctccacctcctgggtttaagtgattctcctgcctcagcctcctgagtagctgggattacagctgtgcaccaccacacctggctaattttcatatttttagtagagatggggattcaccatgttggtcaggctggtcttgaactcctgacctcatgatctgcccacttcggcctcccaaagtgctgggcttagaggtatgagccactacgcccggccctggcttttttttctattcgtttttgatcagatagtgttgtctcctatatgttgggttttttctcatctagaggtcaataaaacaaaaaagaaagagataatttgggttatatatgttttttcttccaaaagagatttacttttacttctaccaggcagttagagtagacagagatcatcttcatgcaatcagggattaagctaatttgaaagtgggcttctgtcttcttgagggttggtccgctyctggttcactttcttaggggtctcaactgagagcttgaagtatttaccagggttctttctccattctgatctctgaagtccaatttttatcttctcagccctagaagactcccagaagttgtgttcggcttctagcctctcagttggcccttgtgaattgacaaataccttgatgggaaaactagtaacaaatatcagacttgcatcatgacattttccatttttttggaattgtaaccacttaattcctttctgctttggtagctttctgatgctttcaaaaagatattttaaaacatcttgtacaattgttctagatgttttccacagcaagatttgtcaacaaaaacctagtttcagagatttacttactccctaagagattctccagaatttgctatacacaaaggtgttaaccttcagagcacagggcaaacctttcacaaattatttttctgagatctgtcgatcatccacttaatcattatacaaacattcaacaccagtcttacaatttccgtgttaaatgctagaggtgagtgataagtctaccatggtcctgtgttggaggggctcacagaagagataaatttgaatttttctctttaagcatccctcttactccagagtttctccaaatagaatgaaatcatctttaagcaagttttaaagatatggcagatatgcaatttgttacctctctcaccaatctgagccttttttttttttttttttttttttgaagagtcgcccagtattgtgtgagaggtagagtcacagattggagaagctttggagagagacagaacaaaacttgagtgttgactccagtactcagtgggcaaggtaccctccttccacatctgtgcaatacggttagcatgtcttctcagagaataatacatagcagttatttttattactgtttttcttcacttatgtcattgtaaaatttcaaactagagttaaatattcccctggaaacttgtgcccacttatgctcaaagcctctgttgacagtgccctttagtagctgcagtaatcaccattgctcaattgctcccaagaaaatcaaggaggaagtattattctgccattctattagtttttatgtggtgtccagacccaaagggtatcctgttacagagagtgtgacatgagcactgtagttttttctaggtaagagttactgttccatgtttagtttgggtgtcttctatcagccaggactactgatttacttgatttgattataatgcctgtggacttgtttcttttatagactattgcttcatttcacaatccacttcaggtttatttattttctaaacagatttgttgaggtataattcacatacatttctcccattcaaagtacaccattcaatgttttttgttatattattaattttttaggccaggtgtggtggctcatacctgtaatcccagcactttgggaggccgaggcaggcagatcatctaaggtcaggagttcgagaccagcctggccaaaatggtgaaatcccatctccactaaaaatacaaaaattaggctggcatggtggcgcacacctgtaattccagctactcgggagactggggcaggagaatcgcttgaatatgggagtcagaggttgcagtgacctgagatcacaccactgcactccagcrtgggtgacagagcaagactctgtctcaaaaaaaaaaaraattaattgtggtaaaatatatataaaacaaaatttgccattttaaccatatttaaatgtaaattcagtgccattagttatattcacaatgttatacagccatcaccattatctattttcaaaactttttcttccttccagacagaaactctgtaaccatgaagcaatagctccccagtcaccctctcctcagcttctagtagctcctagtctactttctgtctctgtgaatttgcctattctagatatttcatataagtggcatcataaaatattggtccttttgtatctggcttatttcacttagcacaatgttttcaasgtttgtgttgtaacgtgtcagaatttcatttctttttatggcttaatattccattgyatgcgtatatgatattttaattacctattcattttgttcatctggtgatgaccatttcagttgtttccatcttttggctatttgaataatgctgcattgaacatcagagtacaaatatcaatatggataagtctctgcttgtcattcctctagggacatacctagaagtggagttgctggtaggcttatttttagaattattttctttctgaaatagtgaactttcctaatgtggaaaaaatcaaatcaagttttaaaacacatatttacataagctttattgcataaaatatcactttacttttggcctcattataacagcacatttttattctctcatacttctagctacttcttcctgccatcccctatccctgaaactccacacacttttcttgaccttcccttgctcttctgatcgatggctgggataatcttacaccatcaccctcaatccttctgtatgcagctgtttaagaggccctgctctatgaaccactgctgggaccattctgactgtcacactctggaaccagagccaggcagaagaattttaaacttcagtattgactggccaggaagggatcttacttccaatctgatttggatctttcatgatctctagttctctttttgccctttgtcattccttcttctcactgtatggtataaaccatcacccttacactttatcctaatgtacaggtgacactgtctcctacttcaccaagaaaataaatgctattgaatacaccaagttaaggagcttgaattataggtaatggtgcctttgaagtagtttaaagaagaaaatgatataatcggctatgcatttcaaaatggctattggatgaggcaacaaaaaggaatgtgtagttagaatgaatcaagaaatcattacaaattccaagtgtcttagtcagtttgagctacaataacaaagtaccatagactgggtggtacttatggttctgagggtgaaaatgccggcatggttaggttctggcgagggtcctcttccacattgcagagcactgacttctaattgtatccttaattacaaaaagggggctaaagagctctctgggatctcatttaaggcactaaccccatctcaaagtccttaccacataataccatcaccttaagaattagaatttcaacatatgagttttgggaggacacaaatgttcagtccataacaaaaagattaaatgattaatcacaaatatcaccttttttttttgagacagtgtcttgttctgttgcccagggtggagtgcagtggtgcaatcatagctcactgcagcttcaaacccctggactcaagcggtcctcctgcctcagcctcctgagcagttagaactacaggtgtgcgccaccacacctgtctaatttttaatttttttgtagcgatggagtctccctatgttgcccrggctgctctcgaactcctgacctcaagcaatcctcccaccttggcctcccagagtgctggcattacaggcatgggcaactgcgcccagcctacaacatttttttaaaaacatcatttggttttattaactgcttgaaacttctaccattcttcattccttaccttttgtttatttttttaataagcaatatgactttatttagtgactttggaaacaaaacctcccaaataatgcctgaacccaaagttacctaaaaatggctaaaaatattttaaaataatagatttgaacatcatttgtagtttctgcctcataacatgaatgctttcagctggacagtagattacaaaccatctctgatcatgttaaggcagattagatgatcagtcagtcctggagctggcaggtgggaggctctgcctgtcttgtcactgcttgttatgctggccctctatgactgaagctgacacagagccctggcccttgttgacatcactgatacacacccactgcccatcaaccaactgcttcctcagggtcaccttattgtctccaccagagatggccaatatgttggctgtgatggacctgcccgcatgctacatgacatcattgaacttgtgcagcaatttgggagaccatatatttcccaaggcatcatcacaggtccagatgaacacacgaccatcccaggagcagctggcaatggtgctggtgggcaggctgatggagggggcccaggccacatctcaaacccagtcactgtgcttccagcttctgctctccttccactggccatccttgaagaggttgtcacagccacctgatggaaacttcttgatgtaattgggtttctgcctgaacagctggtctatgaggcttccaggtacaacagcaggggcctagctgatggcattgcagccaatggtgtaagcgttgttgatctttttcacttcccattggccttcccctgtataagtcagcaggaagatggccccatctgagctcctacaggccaggatcaggccgtagtcaygggggacctagcatacagagttcacggaggagtcatatcctgaggggtcgtgggtcttctcccaggtgccgttttcctctttccagataatgactttccaatcataggagcacaatgccaggatattgccatatgtggggtgagcccaggccacttgccacataggactctcatgacttctgaggttggcaatgaggatctgccctctgttgtgcactttgaagattttgacggatttttctgatgagcaggttgccaggcgggtgccatagtagtccatctgggcatcatgaatcatatccttatggsaggtatccacagtgttaattactgacaccatgataccagcgtgactgctctagggacgtggcagctcctggtggtgcctccccattccttaccacctttttttttttttttttttgagacagtctcgctctgtcacccaggctggagtgcagtggcacgatattggctcactgcaacctctgcctcccaggttcaagcgattctcctgcctcagcctcctgagtgactgggattacaggtgcacgccaccacacctagctaattttgtattttagtagagacggggtttcaccatgttgaccaggctggtctcgaactcttgacctcaagtgatccacctgcctgggcctcccaaagtgttgggattacaggcgtgagccaccccgcctagcctcttatcaccttttttagcaacaatgtttgcctcttcagatggccacaatgtttgtaatcttttcctctagagagaatagaaatctttctttttagcctggctgattgaaatttgtttagtattgatagtttagaaaaacaaaagcttcacattttattactgataatattatataaatgtttaagattgtaatcaaaattggggaactatctctccagtttgttcatatatgagctrtaatttttggaagaaattttcacagacaggttctggccccatacatttcaaaccttgcttctccacaacccatgtacttccggggctgggtgcctttaggcataattgtattgcactatgatgctaagtgagtcagcacattgggtgaagggatgatccattattcataacttacctactcacggaagtaaccaggaatcatatcagtatatcctactgtacccatgtaaagtaaatccctactttaactgatttttacttgggtccccaaaatgcctatagcaacctgtaaaacctcccaaaggaagaggacatttgacacagggaagctggaacagaaagagacaaggatcttagcttgttatggtcaaattatattacttttgcaagttttacaaaaacatatgacactatgaacatgctggtgggattcctcccttggggcacttctggatgcagctgccatggtagcctaggaatgagatgacggcaggggcatcagggagtggagaggaagaaatcaatttgaaaaacatttagggctgggcacagtggctcttgcctgtaaccccagcactttgggaggccaaggtgggaggttcacttgaggccaggaaatcaaggccagcttgggcaacatagtgagactgtctccacaagaaaatttaaaaatttaaattaggaaagaaaagtgttcaggaggtaaaattgataggatttggtgattgactgaacacagatgtgagaaagaatgaggagttgttgatttttccaggttaaaaccttagttagataactaggtgggtactgggatcggcacctgagatagaggattgcagaggaggccctggcagggacaggggaagcaagttcaattctgggcttattcagctcaatatttccaggaacatccaggtagacagatttctccataagcaccaacacttaatagtaagacactccagggagaagtcggaaaggttggcgcagattctggggcgatcagtgcaaatggaagccgaagtccagggagaggttgagactgcacatggggagctgactgaggagggcaatgggccaagcaaaagacaaacccaggggatcccaagctttaacaactgggcagagtaagagaacccacaaaggagacagagtctttagaaattgccaggctcagtggctcacgtgtgtaatcccagcactttgggaggccgaggtgggtggatcacctgaggtcaggagttcgagaccagcctggccaacatggtgatactccatctctactaaaaattaaaaaattaggtgggcatgatggcgtatgcctgtagtcccagctannnnnnnnnnnnnnnnnnnnnnnnnnnnnnnnnnnnnnnnnnnnnnnnnnnnnnnnnnnnnnnnnnnnnnnnnnnnnnnnnnnnnnnnnnnnnnnnnnnnnnnnnnnnnnnnnnnnnnnnnnnnnnnnnnnnnnnnnnnnnnnnnnnnnnnnnnnnnnnnnnnnnnnnnnnnnnnnnnnnnnnnnnnnnnnnnnnnnnnnnnnnnnnnnnnnnnnnnnnnnnnnnnnnnnnnnnnnnnnnnnnnnnnnnnnnnnnnnnnnnnnnnnnnnnnnnnnnnnnnnnnnnnnnnnnnnnnnnnnnnnnnnnnnnnnnnnnnnnnnnnnnnnnnnnnnnnnnnnnntagtggagattatatatatatatatatatatatatatatatatatattttttttttttttttttttttttttttttgagacagagccttgctctgtcacccaggcaacttccacctccctggttcaagtgattctcttgcctcagcctcccgagtagctgggattacaagcgcacaccaatgcacgtggctaatttttgtatttttagtagagacggagtttcgccatgttggccaggctggtctcaaactcctgacctcaagtgatccacccgccttggcctcccaaagtgctgggattacaggtgtaagccaccgcacccagccagtgggctctttcttatgagactttgtagacattccattagctgatttgttaaatgatcttcaaaatatttgcttgcatcaagtaaaggaaattggatggtagatatcccctgtatatagctctacctgcctccttccttcatcaaagactcaaaaagcggaatatgtctcctctgtaatccatttcaagaacacattaggtggtgatgggcaatatatttcactgacatggactcctggggataatctcccagcaggctgcataagcctgtgctcagtggtgaaggcccccaggcrgttgtcttcatatgaatcttcaaggcatggcaaagctcatgacatttgcattttaaaaggtatttgctttggtgtgggtaaaactcarccaaacatggttaacactttgacctcgaggatgaaccataaaaatayagggcagcgacctcctcttccctactgattcctgagaggggcagtggtgagtttatttttgtatgctgtcaaatcaacttaagacccattttaagagttttgtttctgttctttatagggattccatcaacgtaagagttccgctgatgttttggaaatgggtcactgtagaaattaatcaagtggtagtgaggaccttgataattggagtggattctgggattcccaaaggtagtaactgggctgagtggtgaagaggggatgggagaacagccacagtgattttttctgtacttcaaaagcttaatgaagtttgaaatttgatccaggatttgtctacactggctgattgatcatcctgcactgtttatgactggaatgacattggcttgatacgcagacacagctgtctcttgctgatgtatagtgctggtgaaaaccagtgttttatgtctgatggttacagatgagaaaggcaatattacttagcaactgttaaatagtcttttaaagtgtcacctgctctcttgtagtactggtctcttcgtttcctgtagagttggcttttctagtccctctcccagagtgatttctctaaaacactgatgtgatcgcttctcagtcttttggctaagatcaagtgtagtatctaaaacactgatgtggtcaggataccttccatgacttggcccctatatttttccagcctcatctttcaattctcccttcttagatgtgacttcctggccttaagttggagctatatacaattccatgaatgaaacagcactgttcatacctcctggtctctgcaccctctgcctttattcacctggaaatgaagacacacctcagttaccttatctgcagagtcttctttgacccacttgtcagccaagttagtcacattttgttttctatcacttatgttgtagaaatcttttaaacattacttttcttttttttttttttttcttaacttttaggttcatgggtacatgtgcaagattgttgtgtaggttaactgtgtgtcacaggggtttggtatacagattattttgtcacccaggtaataagcatagtacctgataggtcattctttgatcctctgcctcctcctacctaccaccctcaagtaggccctgatgtctgttcccctctttgtgtccatgtgttctcatcatttagctcccacttataagtgagaatgtgcagtatttggttttctgttcctgcattagtttgcttaggataatggcctccagctccatccatgttgctgcaaaggacatgatcttgtttcttttttatggctgcatagtattccatggtgtatatatgccacattttctttatccagtctaccattgattgtcatttaggttgattccgtgtctttactagtgaaaatactactttttgtggtgtattaatataactgatttatacacatttctcactctctggaataggtttataagtctagtaccaagcataggacctgacacagagtactttcttaataagagtttgttggatgaatgtatgaaaacattagaggtcttggtgaaggaaaagctggtcaccattgaatctagtggattccacagggaaaagagcagcttcccgtgttgaatgtgtccggttaagtatgagaagcaacatttctgattgctctgaaaagtatgattaaagcacaaattattatggaaaaataatggtttagaagtatagcattttggtatatttgttcattkcttttctgaaacattaattagctaaggtaaagatgaggattttgctatatgataatcaaactagtatcaatgaaaatcatcaatattaaaatgaaaagttagaaaattgtagtaaatgggatagacagatgaaagcttaatatctgtattataatgagctaatatcactgatcagaatatcaagatctacatagaaaattgggtaaatgaygaccaggcgcagtggctcacgcctgtaatcccagcacttaggccgaggcgggcggatcacctgaggtcaggagtttgagaccagcctgaccaacatggagaaaacccgtttctactaaaaatacaaaaaattagccaggcgtggtggtgcatgcctgtaatcccagctactcgggaggctgaggcaggagaatcgctggaacctgggaggtggaggttgcagtgagccgagattgtgccattgcactccagcctgggcaacaagagcgaaactccgtatcaaaaaaaaaaaaaaaawttttgggtaaatgacataagcaagtatggatacttgatgaaaatgtgagtatacactattttaagagtcttatactcatatcctttgacctagtcaccccacactcagagtgttacttttaaaaaataaaaatttaaaaggataatgctatagacatgaagtttgagactccatctcaaaaaaacaaaacgagaaaaaagaggcgacatagggtaatatgctaattgatggaactaataaataaagatataaggatattattttaaaggtacaaagataactaggagagaagctgaaaatggtgatataaccataatagcaagaaaggaagataaactttctttatcttctgggctgtactctcatgtgttaaagaaatcaatgataagaaaaagcagtacacatatattacttagagaccagaagaagcaaaaataggaacaattaaataatcttaaaatgtgctgggcgtggtagctcacacctgtaattccagcactttggtaggccaaggtgggaggatcgcttgagttcaggagttcgagaccaggctaggcaacatagtgagaccccatttctacaaaaataaaaataaaaattagcaggtcatggtggtgcatgcctatagtcccagctactcaggaggctgagacaggaggatcactggaactcaggaggttgaggctgcagtgagccgtgattgtgccactgtacttcagcctgggcaacagcctatctcaaaacaaaataataaaaaatgataatttttaaatggcttcctctgaaagaactaagagaaaagtgaggcaggggactgttgcttttcactataacagtcttttgtcctcctctttttatttattttattttatattttattttttgagatagaatctcactctgtcacccaggctggagtgcagtggtgcaatctcagctcactgcaacctccgcctctcaggttcaagcgattttcatgtctcagcctcccaagtagctgagactacaggcatgtgccaccatgcctggctaattttgtatttttagtagagatggggtttcaccatgttggccaggctggtcttgaactcctgacctcaagtgatctgcctgcctcggcctcccaaagtgctgggaatataggcgtgagccgggtgtcacttttctggctggaaacctctgtggyctgtggcgcctttgcccgagttttgctcgggcccactgggttcgttctgcccactcggcctggcaggctgcactcggttcatgcttcctgcctggatcccatacctgccaagggcaagtcaggcataaagcggcaaggggtgtgtgagcaagcgtggggttgagccactgtgcacggtcagacacgctggctgctgctgctgcagggtgagcagctccaggttgcccgcacaggcgccagccctctgcaaggctgcagctggaccaggtgcactgcagacagcttctctggctggcatcagggtatgcaatagtgcccagaagcttggagatgccaggaaccacagggccccaaagagagagtcacagccccagctcgggtagctcccaggtctgggctccccaaaggaccatagctcttctctccttttcccccacaacgtggtgagcaaggggcatgtttcagccctatttgtgttacagctcttttagcctcaccattcagcggatcttgagttcttgtcctacatccaggaagaatgaggtatacagacaagtggagggtgagcaagatgaagagtagctttattgagcgatagaacagctcagaggaggcccacagtggatagcttgtctccatagccagggtgtcccagcgagtgttcagctctcagcagagagggtagtgcctctctgtgggtagattgtcccatcctccctccatcctctcagcagagaggatagtttctctctgcagctgattgtctccccttgtctctccatcttctggtcttgctgagccagcagttgttatgggcttcagtggggaggaggtgctgcttggaccatggcggccattggcaggcccagggaaaagcaccacaagttacccctctggtccatgagactagtggcccraaccccaggcttcgggccctccccagcttgaaggtggggcttcaccagggactcgcccccttccacccaggagcctgtctaccttctgccaccattcatggcgcccgggctgtttgtgccaagggacgcctacaggccagtgctgagctgccctcagcaccccctcggcctccctcctgtgctcatcggtgcccaaagtccagagggggctgaggtggcagggggctggcatgtcagtgctaccctgaacgtttgcacacccagccagcgtgcgacagcacgtgggctcagccccatccttgctccgaggtcggagtggcgctgggagaagagagaggctaggcagcgggagcagacacctcttagccttttgggggagggggaccttcctggatccccaagagtgcagagatgtttccgtctgcagctgcagcttggtagctgcagccacgcccagctcctgcttggctccatggatcgtggcactgccccgggcacagctctacctcggggcccttctctgtccgcccctccgtgcccaaccacgctgctcccccaccagcgggtgactcggcccagtcccatcgtggcgggcttcagggactgaccacctccttcctgctgcaccctttccacagcagcagcaaggcaagagcagtgacgcggggccagggtcaacagcggcagaggctccgggcctgggagtgggtcctgcctggccccgtgaggctggggacggcacagtcagctgcctcggggacatggggcacaggggtcctctccgccgccactactggccctgcagctgctcccaccgccacggcccacgacctccttccgccacagccagcgtgatggcagcagctgctcccaccgccacggcccacgacctccttccgccacagccagcgtgatggcagcagctgctcccaccgccacggcccacgacctccttccgccacagccagcgtgatggcagcagctgctccgggctacaaagaggcgatgctgccagcattgtgacttttagaaagggaaaccaaaaaaaaaagaaggaaagaaagaaatrgaaggatcttgagaactcacagtacactctacttgaaaagccggatggctacagacatttctaagacgtgggactttctcccagatcttcttactccataattgtatacatacatgcacatatatgtgtgtgcatgtgtatatgtccagatataatatttaacatttaataaggatttattttgaaaaatagtttcagactttcaaaaaagttacaagaataaaagtagtttaaaaaaagaggatttgtggccaggcgcgctggctcacgcctgtaatccgagcactttgggaggctgaggcaggcggatcacctgagatcaggagttcgagaccagcctgaccaacatggagaaaccccatctctactaaaaatacaaaattagccaggtgtggtggtgcatgcttgtagtcccagctactcgggaggctgaagcaggagaatcacttgaacccgggaggcagaggttgcggtgagctgagatcgtgccattgcactccagcctgggcaacaagaccragacttcgtctcaaaaaaaaaaaaaagaggatttgtatattctccacccggacttatctgtgtcaacattttactctacatgcttcatcactcgtgcatagacttgtttcttctctctctctgtctgtgtgtgtgttttctaaatcattggaggattgcatacatcacggcctttacctttaaatacttcgttatatgtttcataacaatatggagaagtattctctcttgtaaccacagtaaatttaacattgatacagaactttagcaataagattaatatttttcctatgataggctgtctcccttcagagtctgtcacgtacctgtttccttttttcctcccactcccctagccttctgctgtttaccctcattctctctacttgtttttgctcttttgttttgaggtctttcggtttataattatttggatattcctgaagcttaaaacacagacatacacttagaggtaaaaaatttaccagatcctgctttggaagaagtctctagttcctttgattttccaaaaaagcagtggcactgttgagtctttgaccttgctttcaaataataaattttatgaatatgtttctgaaggtttaccaactttttttcttttctctctttttctactctggtttatagtttgaaaaagtaccagaaggtcctatccctccatctacaccaaagtttgcatatggaaaggtcactttggaaaaggtaagaaaaaaaaataacagaaactttgaaagtgagagatgggagtgagaaagtggaatttagtascagtgagtgaaagtgctgtgctggaggaattggttcgttatttttctgcgaatttgttttctgcaagcctaatggggtaaatgatgtttctgggaaaatggggagagagaggtgagaagatactcatgcctgttgacaggatgagcagatgagacatgggtgggagtagtaggcattcttggatcatttgggtcatcttggttcctttatcagtggtttaaacagtgtcaagtgcctttgtggaaataacatgccacctcattgttatggctgccaaggctctttgtcgtatttaccttttttaggagttccccaaaatcacaggcattttgatagayctctgccctaaattatatacttacctccatctcaaagtcatgtcctaatttttatggtctgtggtttatacgttaaatggggacactgggggaaaagctagaaatcaatcataaataggagttaagggcaatgtattctaggaaaagcgaaaaagaagagaggttttacttaatagtcagaggagtgacatagccaaagtcaatttgttttgaccatctgtgtcttcaggttttccccttttataatccctaactcctacatgtattaactcacaagaaaaaaaaaaaagaaccgttacctatttcttaagaatctcgatatcctaaaatagtatcgtaagtttttatcttcaagcaaaatgccaaacatgattatgtaatttttccatccaagaagccctttgacatggttggttggttgagttcttataacattttccacctagtgtcagatacctgtgctacattctacaaagaatgtggtctttctgtctgataaggatctttctttagattaatcagacttcagtcactcttgtaaagggagcaccttctacttgttcattgctacagctacttaaggaaaactttggtttgtttgtttcagagccatgacaaatctatttttatgcaacagaaaatagctccaaatgttcaaaacaacaacattgctaaaaccaagctagcttattaccaaaagcacattctgtttaccgtgaaggaaaattgtgtgagcagaaatgactttttatttttaaataaatatatacagttgaagatagcaaatcakcatataactgaattaagtttatgtagaacacagttatatagaaaataagtttttaccgtgagttgaatttcttagtgttcaggtgggaaaacacccatatgagtagctggcttgatgaaattgtaaatgagatttttttccttgatgctgcacatcagcaaggtaaccatgggaagtgtttatgaaattcctaactgggctgggcatggtggctcacgcctgtaatcccagtactttgggaggccgaggcgggaggatcacctgaggtcaggagttcaagaccagcctggccaacatggtgaaaccccgtctctactaaaaatacaaaaattagccaggcatggtgacacatgcctgctcaggaggttgaggcaggagaatcacttgaacctgggaggaggaggttacagtgagccaagattacrccactgcactccagcctaccagcctgggtgacagagtgagactctctcaaaaaaaaaaaaaaaaaaaaaaaaaaaaaaaaaaatcctaaccagtattatagtcatggaaaatcctggggtttggagccaaatctaactacaaatcctggctctgtcattactcaagtggacttctgtgagtctccacaacacagggacagtagtacctgcctcacagggtagctgtgagtattcaatgagctagtgcatgtaaaacgctgtatctcatctggagtgtgtagacaggcaatgactggtagctgttattattattgttgttattgcatcagaataagtatcctgggttgcaagaatacacaatcctttgyattgaatataataaatacttaccaggcatttactatgttctgggcattggggctgagaatggaacatatcttatccttaaggagctgacagtctggtgaggaagacaaagatgagcaactgaaaagtgatacaggcatggaagatatgccacacacaagttcagaggagggtgaagtaactaggaagtattaaatattaaggtgatataataatagcatgtctaatcttagttgaatgtaaytggcctctggttactacttttacttcttagttgttttactcrggggtgttcagagagggtttataaggaggcagcatctgagccttcgttttcattcattttaagaatcttttataggtctctgagsaggttggacttccgaataggtatgtttgaaacctttttaagactactatcattcatagttttcatcaggagttagggagtagatggagaggactgaaggagactgggaagcaatactgagtggaatttgaatgatttaggtttatttaggggtttggtcaaacccactgatgtctttgataattagggaatgactctgtaacctgatgaccagtgaggggtgcagtgtgtgaatgctgcttttgtttcttttcagttaaagacagtgggagcagctctggacattctgtgtccctctgggcccatcaaaagcctttatcccttgacatttatccmggtgaaacaggtaggccytcaaaggtaatgcctcgccttttttctacttgcaaaagtgtgctttctgcactgccttgcagtgcccattctgaattcaggggccaaaatggtaagcaaatgcatcagatcccaggtaaatgaaccatgaatttccaggctctctttagcttgaagtgctgcgtgktgggctgatcatgcctatattttttgccccacttcttctcactcatacaggaggtagcccaacctgcttcaacataattctgtacaagttataaattgagttcactgaccaatctaattaatctttattactaggcatcagtggaagatcactgttttaatactcaaaacagacagtttaattatttgttcttagttcaatggcataaggactgtgttttttggtagactaggttctttgagattctttttcctgcttttgaagagaacagagcacatctttttttttttttttcagtgtttgtatatgtgtatgtgtttgatctccagacactgcctcatctttatttttttaaagtttttcccagcattttgttttggaaaattttaaatccaaaaaaagttgcaagaatagtacaataaacacccatatgctttttacctagattcaccaattgttaacagtgttttaattgcctttttctctactgtgtatgtagtcaactgcttttctttttctaaccatttgagttaycagcaccatgtcactccacagcatacatcttttaagaaaaagaacattatcctgcagaaccacaatacaatgatcacacatgagaaatttaatattgatgcaatcctattatctaatataaattctatagtcaagtgtccctggtcattgcaataacgtcctttacagcttaatcttttctcaatccagtttccaatccataatcacacattaattatattctccttagtcttcttccgtctgaaactgttcctaagtctctctctcatgacatggacatttttgaaaaggtcggggtgtttgtagactttgcctcactaattagattcagtaagacattttggacatgaacacaacaaaggtgatatgtccttctcagggaatgatagcaggatgcccgtgagaccagcttgtcccttaactgcaatgttaagcttcatcacttaggatctcagccccatgttttgaaatggaaggttatccacgtcctcctttctgattttctgtggcaaccaccttctggaaggagtctgaacagtaaggcaaaataataacagcatatctaatcttagtttagtgaagtttgctgtcagttcctgtttttacacctgtgattttattccaacaattctattttgcaataaaatgaataattaagtccccccaccacacacacattcactgtttcatgaacgttgtatagggtactctgcagtcctagcacccacatctataaatggaacttacctgcacttagcagagctgttgagcacttcagacaatgatcccagagcacgtgtagcctggggagggagttccaggttactatatgaacacgtgcagccattgttctttctcagaccccttctgctttctgatctttggccaaggtagtgctctcagattgggtggggcttcctgggccctggctctttcagatctggggcaagtccacagaatatctatttccagcaaaaaaccccaaagggcacagacttcagggagtggggctcagcctactgtctctgcagggatcccctgagcctcagccacacctgcctggggagcatcacagcttctacccctccttctggaagcccttgacaaagctttcctcagcccttgaggaaacttaccactttagctagttttcaaaataagtaaataaatgaaccagaaggagatggagatgtggagtctgggcgggaggtgttcttgcgctagaaggtttgtgtggtcttagtagcatttcttgtgctcagctcattcctgcaacacaggaaggtggattagtgctctcctcagctcctcccagtcacctttccacttgcctgaagtttactttctttctttctgggccctagaagtagggaaacttttctctgttccatgctggatctctatttgcattctgttccataactggatttatgtcccagctcagccctgctaataatgtccacagcaggaagtaaataagcaaagtcaataactataattctgtggattattatgtcaataactataatctgtgaataattccgttactgctgaggctgattgtttgaggctttccttttggaccagggatgtcagcatctaaaaatattttctgacttagtggttggttacaatctagtctcttaactgtttctttcccccgttcctccacttaaaacagttctgatggactttgttgttattattattattattagagatgaggtcttgctatgttgcccggactagcctcaaactcctgggctcaagagatcctccccaagtaactgagactacaggtgcatgccactgcacccagctcattgccttttgttttgtatgttaaagcagatttagcccatgaacttggagacagttttgctgagcagaacttcatctcttggctttgctgtttgtttgccttgtttttttgttrgttttacttagttttgtttttggagctaacatccataacttttgctatgtatgatataatcccctgtatgaccctgggcaagtaacttaacccattcagggtccaggttcctcttatgggaaagggatgcttgataagacactgttcatggttccttgcagtttactattatgatagatattcgatgacctaaaaattaaaccagtttcctttttcaaatttaattttttcgggaggtggaggaagattttcattccttatggtttgagaaacatcgctttcatacatgtctagggtaaccaagttctctaaatgaatggcaatagtgatgtatttttcttaaatccttttctaaccagcattatgggtttgtgctgtaccggacaacacttcctcaagattgcagcaacccagcacctctctcttcacccytcaatggagtccacgatcgagcatatgttgctgtggatggggtaagaatcgtctctgaactgtgcgttttgtcccagtgagggtggggatgagcagcctgcacttgttaacacagcatttggggtctttgctcaccttttcagcctcaggctctacccatcatctttttttttttttttttttttttttgagacagggttttgctctgttgcccagcctggagtgcagtggtgcratcacagctcactgcagcctcaacctcccaggctcaagtgatcctgctacctcggcctcccaagtagctgagactacaggggtgcaccaccatgcctggctaatgttttgattttttttgtagagacagggtcccactatgttgcccaggctggtcttgaactccggagctcaagtgatcctcctgcctcaggctcccaaattgctgggattacaggcatgagccaccacggtgggctccacccctcttcttggtgacccttagctgtgcctcttgcttgctgtgaggcctcatgcatgtgccatttgctgaaatccaccctacccaccatcttaacccagagggctgtgcttgatgcgccaccctctcagaagccttcggggtctccccagccaaggccgcccttctgtgactgatgttgcctgtgctttctttgctccttaagggtggggtccatttccaattcaattttgtacctgccactgtacaaagtttgttgaacttcgtgcctttatcctacatgagaaattatattctgaaggactgctcgtgacaactattactgaaatgcacaaagaaccgtgtttcataacaaaagcagatgcatttcaggacttccagtcctctcacygaaatggtcacaggaaggaacacaggaaaagattttcttcaccaagaaaatttgttcagaagattttaaaatatttcccattctcttgtaatcaacagctttcatttcagtgggagcagattactaagacattctgctctattgatggtgactgtttcttcgcttctaacttgggtgttgtcttagtgaattatgatcattgtaaggtcaatttttaaagtctaaccttttaaaaagttaggaatatgttgttgataaaatacctgttgtttttcctcattctgttgtaygattttcgtggttaatgcatcatgtcaagtattttgaggtgagaatactccacctaacttctctgattttatctcttttgtctgattttgtcttatctctccatgttgttcagaagcaattttttgtgagtgacttttgtgctgtcagaacacgaagcagctactctagtaagaatcctcccctggaattttccactaaaagtagttggcagtaaaacattccagggcaaaggaaaccagcttagaccgttccatgctctgagctgtgtctggcagttttcctgtttaggaagcagtgattgggggatctttcygacctggccggtaacttgggctaagatgctatcaaagcatttctttccaagtctggtgacacttcaaggcaagaaaatgagtgctaaattaactgagcatgctgcctctccttgctgaccttcttaccctcaattcaattgtcatttggtcttgaaccccacagatcccccagggagtccttgagcgaaacaatgtgatcactctgaacataacagggaaagctggagccactctggaccttctggtagagaacatgggacgtgtgaactatggtgcatatatcaacrattttaaggtaggacaaaccacactgtcaagactaaggtttaaggggtgacaacttagaagttgaagcccagtacagtggctcacacctgtaatctcagcactttgggaagccaaggcaggaggatcacttgaggccaggagttcaagaccagcctgggtaaaatagtgagacctctacaaagaattaaaaacttagccaggtgtggtgacrtgcacctgtggtctcagctactcaggaggctgaggcaggagaattgcttgagtccagaagttggagattaaaatgacctatgatcatgccactgcactctagtctgggtgacaaagtgagaccttgtctcaaaaaaaagaagtagttgagctattttgaagagctgttttcctctgtaggtgatgagaaagttgagctttgcaaacagaacctttcccctgtgtttgagtttggtcatcctatagaaagaaacagaaggaggaagcccctccaccatgcttttcctctgctttaaaagaccaccaagctcactgaaggcactcctttgccagtaaagccagctgagcctctgttctgccctgttttatgggtttggatggttagcctgtggcaaactcttcrcttgtaggaagcctcttcycttggggcactggctctcacctctgttgattactcctgtgtccagatgtgtagcccaaataagtttttctaacacatatttttagagcattattcagcaagcatttgttaagctcccactccgcgagatgccccaccaggtgctttggggaatgcaaaggtgtcaagagacaggcttctctcagggagctcaacctccgcgagaggagagaatgccttatcaagggaacaatggcaccacccaggctagggcaggacaggtgtctggggctatttcctgaccctcttgagatcaggcaattacatcttagggaacttagggaatagctgtgtgcaggccacctttgcctccagtataaatgtctctctcatagttcttgtgctcagggtggacttcatggcctcctgcctggctctcacaggccacattgacccatgggagtgactcgactctgttgtgtagtctctgggtcyccagtacctgtcaaagagcctgacatacagccacctggttaatatttatcaaattattaaatgggcaatcgagacttggtatctgggattccactgggaatggggaagttccctacatacaagccagggaaggggaagttagctgagccttgacagcccagccctggcctgtgtggaacaaatagagcagcttctgaattcaggtctgaggtttgccatcgtcatcattaccttcctatcctcttaaggtatcacagtattctcatgtatgttatctcacttggccctcataacaggtgagtgactcgggtgtggtcctccctgtgatgatggctgaggtgctcaaggccaatatttgctcctggctgcatccgtcgtacctgctccatccgcagtgggatgactattcctttgtatcccacactcactcattccttctgtccccagattccatcttgagacaggatcttgctgtcacccagcctggagcgcagtggcacaatctcggcttactgcaacctctgtctcctgggctcaagcaatcctcccttctcagcctcccaagtagttgggactatacgtgcatgcccccacactaggccaatttctgtatgttttgtagagactggatccctttttgttttgagatggagtgtcgctctgacacccaggctggagtacagtggcgcgatctcagctcactgcaacctccacctgtcaggttcaagcgattctcatgcctcagcctcctgagtatctgggattacaggcacctgccaccacacccagctaacttttgtatttttagtaaagatggggtttcatcatgttggccaggttggtcttgaactcctaacctcaagtgatctgtctgccttggcctctcaaagtgctgggattacaggcatgagccactgcgcctggcccatctttcttggtgcccatctttctctattctagcagtggctctcagccaaactctgaaaatttgggaatttgggatcaatcactctagcaactcaatgccctttctgtagaagcagaaactctgggccttttatagagacatcatgacctgcaaaggagaaagctatagtttggggaatatatctcttcccaaggatttgtaattcaacctccagttagatctgtgttacttcgatgtacacatatttcgaggttcatttcctgttggtgttttgtatcccggtttgcttttcccatttccctggaatgcagagacatgtgaagcctttttccttccctccccagctcactgtgctctgtttctgctttgcagkgtttggtttctaacctgrctctcagttccaatatcctcacggactgkamgatctttccactggacactgaggatgcagtgygcagccacctggggggctggggacaccgtgacagtggccaccatgatgaagcctgggccyacaactcatccaactacacgctcccggccttttatatggggaacttctccattcccagtgggatcccagacttgccccaggacacctttatcyagtttcctggatggaccaaggtacgtgtcttcatgggaagggtttgaattcaggcctaaacttttggttgttagtgtctgagaaagaatcacaaagagctgttagtgagatatcgtgtgatggttttgagtgtggcgtttcggacattcttcaggaggcggattgtggcagatcttcagggattcagtrgccagctcggaggtgctgccatctgcccccttgtcattggcttcctgtagtgaatgacaccatcctgcctcctccaagaagaatcatgaccccttttgatgctgattataggggtgctttctctttatcttgaggacaatccagtcaagacaaagaggtggatccctctgggagagtctgtctggttttcatttatgccaagcccagtgctcccagaatatccccacctgcatccagccccacacccctggggcttctatcataagctgtctgcttctccaytcttcctcatccattttcacttcccagtcactccgccttgtcgtttgaagacattggcatatcttccttcaccgccttctcctctccctcatgtcctgttttcatcctagatcaccttaccatcactcattcaacacacttctcattctgtggccactatgtgcccaaggtgtgtgccaggcactaaggatacaatcatgaataaaaccaaacatggtcctttccctcatggaactttcagtctagtgagggaggcagactcatattaaaaagtaaaaccatagctgtgatggatgctaagaagggctatggggttgataataattggtgcattttgccttgtcagggaggtcagggaagccttccctaagatagtgatgcttgtcagagatatgaaggatgagtaagaattagcatggcaagaagggaagaaagcatgttcctgggagaggtaacagcttgtgcaaaggccatggggttggaggggaaaatgtcaagtgtggaaagtaggtagagactagattgggacgggccttataggccacgttaaagttttgtctttgtgttgagagccattgaagcaggagagtgacatgataagactgtgatctgacaagctcctctgaccccattgtgcagaatggtttgggtaaggacacttatggattcgaggaaaccatctaggaggctggaccatagtctcattgagaaactgggatggtggtatctaagatggagatgacatcaactatttgagagatgttcraagttggatcaataaattgtgacaatggattggacaggagggtttggggagagggatatgtctcggatgactcaggtctcaagcttgcagctgggcagaatggtaccatttgctgaaagaagcagcttcagaaggggacttaggcttagaaaggggggtcatgagtttgaatttagaccaattgtgtttgaaaagctgccttagtctatttgggctgctataacaaaataccataagctgggtggcttataaacaacaggcatttatttctcacagttctggaggctaggaagtcttcaatatcagggcaccagtagatttgctgtctggtgagagtctacttcatcatagacagcaccctctatgtccttacatggctgaaggggcaaaggagctctcttgggtctcttttatgaggacactaatttcattcatgagggctccaccttcatgacctaatcacctcccaaagggggccccacctcctaacccatcacatgggggctagaattttaacagatgagttttgggtggacacaaacattcagaccatagcagaggccttggagaatggctrggaaagacagtattggaggagggttgttggatctataggctgggaattcagggcagggatctgggccaggaatgtatgtagaagatcattgttgtatagatgattgttgaaaacatgggctggatgaggtctctcaaggagagaggatgcagagggaagaaaagaggacgtaaggctgatgtttgagggacaaaaacatgatgaagactgaagaggagagaccaaacaagtaggaagaaaaccagcatttatgctgccaagaggacaaataagataaagacagaagcacttcggtggttttagaagcaaggaggcccttgggaatcagtaagccttgttccagtggagtgaagcatctcccagccagattgcattctatagagaagaccagggtaaggaatacgaacaggaatacttgaatataaacgttctttttgagaaatttaattctgaagaagaggagaaaattatattaatagctggaggaggagaaggcaaaagatgtacatggtgtgtgtttaataaaatgcccttttatttatttatgtgttgcttgtttaaaatttattgaaatgtattttcattattctgtttgaaatattttcttttttttttttttttttgagatggactctgtcacctaggctggagtacagtggtgtgatctctgctcactgcaacctccgcctcccgggctcaagcaattctcctgcctcagcctccagagtagcggggactacaggcacacaccaccactcctggctaattttttttattatttttattttattttttattttttgttttttttttatttttattggagacggggtttcatcatgttggccaggctgatctcggactcctgacctcaaatgaagtctcgaaaagtgctaggatagacatctgaattcattccaacttatagttattatagttattataatactgctgtaaacacttgcatgtaagtttttatgtgaacttggcctcgaaaagtgctrggattacaagtgtgagccaccacagccatcctgttagaaatattttctactttcccatatgatttcttctttgaaccatagattattaaaaagtatgttttactgggtgtggtggctcatgcctgtaaatcccagcactttgggaggccgagacgggtggatcacctgaggccaggagttcaagaccagcctgggcaacatggcagaaccccatttctactaaaaatacaaaaattagccaggcgtggtggtgagtaactgtaatctcagctacttgggagactgaggtgggagaatctctcgaacctggaaggcagaggctgcagtgagccaagagcatgccactgcactccagcctgggtgacaaagcaagactgtgtctcaaaaacaaaacaaaaacaaacaaacaaaaaaagtatgctgtttaatttccacatattttgggtttgtaaaaatatcttgtaattattaatttgtaacttaattcctctataaaacttctaaaatttctctctagggagagaaatctccatgatcttgggttaggcaaagacttcttagatttgacacctaaggcattatccttaaagaacaaaaattgataaattggactttatcagaattaaaaatatttgttcttcaaaaagcattattaggaaaatgagaatccaagccacaaactgggagaaaaataattttcaaatcatatatctaacaaaggacttatatctagaatatgtaaagaattcttacaattcaataatagacaaacagcccagtcacaaaaggagcaaagaacttgaatagacattttaccaaagaaggcataagatggctaagtacatttgcatttgtataccttctttggtaaaatgtctattataaactaaaattagtggctgattaatgttcaacattattaatcatttgggaaatgcaagtcaaaaccaaaatgaaatactacttcacactcaccaagatggctaaatagtaagaaggacaataggcaatgttggaaaggacatgggggaaagggaatcttcccacattgctggtagaaagataagaaggtacatttgggagcatagtttggcaatttcttcaagggctaaacatagattaccatagaacccagcaattccgctcctaggtatatacacaagagaaaggaaaacatgttcacataaaaacttacatgcaagtgtttatagcagtattataataactgtaagttggaattaattcagatgtctatcacctgacaagtggagaaagcatgtatatccatacgattcctcaataaaaaggaatggagtactgataacatgccacaatccagatgaattggaaaaatattatgctaagtaaaagaagccaaaactaaaaggctatgtattgtatgactccatttatatgaaatgttcagaaaaggcaaatccatagagayagtagcttactggttgcctagggctgagggtgggaatggagcgtgactgttaagtgggcatggggtttctattggagctgatggatatgctctgaaactaacttgaatgatggctgcacagtcttcttaaatgtatttagacttgttttatggcccagcacaggcatatatcttgctgaacatacctttggaattttaggctttaatatcctctctctggctgcatgtttctatgcaccaaactctcatgcctaccaaccttgctcttaaatctttttttttatttttttgagacagtcttgctcttgtcacccaggctggagtgcaatggcacaatctcggctcactgcaacctccgcctcctgggttcaagtgatcctcctgtctcagcctctcgagtagctgggattacaggcaccccccaccacacttggctgatttttgtgtttttagtagagatggggtttcaccgtgttggccaggctggtcttgaactcctgacctcgtggtccacctgccttggcctcccaaagtgctgggattacaggcatgaaccactgcacccggccttaaatcttattaatgacctgaaacattccaccattaaggctgcagttcttcctctaccaagcctaggccttaccacaatcttttttatttatttatttatttatttatttatttatttatttatttatttatttatttattttttaagatggagtttcattcttgttgcccaggctggagtacagtggcacaatcttggctcactgcaacctccgcctcccaggttcaagcgattctcctgcctcagcctcccatgtagctgggattacaggcatgcaccaccacgcctggctaattttgtatttttagtagagacggggtttctccatgttggtcaggccagtctcaaactcccgacgtcaggtgatctgcctgcctcggcctcccagagtgctgggattacaggcgtgaaccactgcgcccggccaccacgatctttttttaagagtcatcagtccacctgcccccttgcccctttggccttctactctgcctccttcattcctcctccatgtagaatggatccactactggtgtctctgctggttcaccagtcactgagcacagctaagggacttctcagcgcattcatcgtggctaccatcccctcattgttgccagcctccagaagccctcagatttgcccagcagtccttggtctctctctgctcctttcccccactggccttttcaaccttcagcaccctccttaagccacctgactctccaccctctccactgaagacctcatcctccttgactgctatcaggtgtaactcctttgttccctcagcttcctgtcagacttatctctctgcctccaacctcatttcctgcccagtggtatctaggaggaagtctgaattctgaatctcctccccaccttcttccttcagggcaagatcctgttctcatatttcctctacctgcattttgtcagcctctccatctttctgccgagtcccatttttcagccaaaaagtggtaactaggagctctaggacctaaacacaaagaaagccctccctggatcttccccctttagctagcaagttcttgttccctcgatccctctttttctcccctcctaatgcagtagagaccaatggaaaagtgtgggatgtgttggaggtcagagggaggttcatcttggccaagtcttaaaggtgwcacacgcaagagttactgacccaggcgttctgctcaacgctttatagacactatctccgtagccatcaaaagaggcacctgtggtagatggatcattatctccagtttgcagatgagtagctggaggcttagatagctaagtaacttgtrcgaggtacagaagtgctcagtggcacatctacctgagccccagccgtgtcttgaaggcccatgtgaaaaagcaggcagcattgagaaccggtgaggaactcatactcattatctaggctggggctctttacttatttggtcagtctgatgaatgctctgcatctccaggcttgaaagtacatctccacacagtatttgtgaatgtgtcaaagggttcagacccccaaaagcccatctaatccatatgtccactcaaacacttgtacacaactgttcattgcaccrttatccataattgccaaaaggtggaaacagcccaaatgtccatcagctgaggaatgaataaacgaaatgtagtacatccatacaatggaatatgattcagcaataaaaagaaatgaagtattgatacatgttacaacatggaagaattttgaaaacattaggctaatgaaagacgccagtcacaaaggactgtatgttgcatgattccatttacatgaaatgtccggaacaggcaaattcatatagacaggaagatctgtgattgcctagagcagggaaaagagagtgttggttggatgggaagagaatgttaaagggtacagggcttcttaacggagtgacgaaatgttctataattgactttggtaatggttgtgcagctctgtagtatactaaagactgctgaattgtatggtatatgaattctatgtcaataaagtgccacacacaaggcccatccaagaagtttgtggactttggactgaatgcgtgtgaaggtccaagggtacacacacatcctacctaacacagaaccaatgtggtttctgttttctggtgcacagtggtccctgctgctggggacagtcccaggccagctctggggcttctaaatgatcagccacctcagaacaggcagatcccactcccacactgagtgctaagctctgacatttgaaagaatgagcacgttagcacatggtttgaatgcagggagctggcagttgcggtgtggggttggacaaaatgatccctgaagccccagctgtttctaaggctgtgcactaacccccacatccttcatcaggagaggcccttgtcaaaggccctggcacaggactctatgctcttcctattcattttactgtaaagaaactaccttgatttagagagcaaagtcactgataagggcgattcataagattaaaaaatcacttttgtttacactggctttacttgagtcggatgtggctttctggttaatgccagatgtgaatgaatatcaactgggacttcagtagaaaggggtcaggcatgttctgctctgtccagcagacacagggcaatgctttgacctcactgagttcttatctgactggaaagtccattagataggaagcgttcttctccagtgctttccacaatatgtcctgtatgccagtggtccccaaccttgttggtatcagggactagtttcgtggaagacactgtttccatggactgtgtggtcaggggtgggggggtggaaatggttttgggatgaaactgttccacctcaaatcatcaggcattagttagattctcataaggagtgcacagcctatatccctcgcgtgcgmagttcacaatagggttcctgctcctatgagaatctgatgctgctgccgatctgacaggaggtggcgctcaggcagtaatgctcgctcacctctcactgtgcggcccggttcctaacaggccgcagaccagtctgtggcctggggtttggggamccctgctatatgccaaacctgaaatgtcatgttctgccactgcagcagtgcttgtgctatttatctctctttcagctgggtgtggataagtctcctgtcaatatcctatgcagccttcaacattttgtggtaggtttaggtgcatgacagagcatggtgtgagtgggatagtgtccatttttccttaaccaaaattatgctttgaagagtcaagaatcaaaatagaatactgatgaaaagtaattctgtattttaaagataaattgtcccaccttcaagatgtaaaataactatgaaataaaacaatgtataataaacggttgaaagaaattccttcttttaactgtttgttgcatcttgcttttgaaatttcctggcygacgcgatggctcacacctgtaatcctagccctttgggagaccgaggtggtaggatcacttgagctcaggggtttgagaccagcctaggcaacttaataagacctcatctctacaaaaaaaatttttgaattagctgggcttggtggcatgcacctgtagtcccagctacttggtgggagatgggaggattgcttgagcccagcaaatcaaggctgcactgagacatgattatgccagaaaagagtatgtaaaacttttaaaaccttatcagtgttagtcacttggtctcaatccatttggagagacagaggtatagaaagagcccaagaggattataagagtctgtaagagatatgtaaaccatgcagttgggccttggagaggaagaaattataagtgcttaagattgctgggaaaggtctggtcttcctagtgggaaggatattttgtgcagagggattgatatttttcaagggaatagtatagtaagaaatatatttggtctttgtccctggttccagggccctaaaacccttggaattttctgagtggtaggagtgtcttttgttattcataactagcctctttcaatcccacctgggtttgtgctaatgaggcgacttaggatggagcccctagataacyataggatagttacaagggcatgatggcacctgcagtcccagctacttggtgagaggtggggggattgcttctcctgacttgcgtgcccaaacttctcctggttttcttccctctctttgctccttctcaggcttctctgtcagcttctatgttgcartcctcaggacttggtcctgggctctcttcttacacttttggggattgtcctcacagatgtgctggacatgcttacatttccttttccagctcagctcttacaaggctctggagcccacctttgggggtctcataggcacctccagcctgataggtataaaacagaactctctccctgttacccctgaaagctactcttctgctggagaagtggtccagagagaaggaacagagctggacttgagtgtggcagtagggagggagggcggtccagcttcaggaaatagtaatagtaccagccacatctgagagcttaccatgtgctggctacagtactgagtgctcacaggtgtcttctcacccagctgttctcagcaatcctgagaaaggcacagacatggctgaggaagccccagtgggatttggtgattgatcagtgaaagtgggactgactaagtagtggatggctctactatttttaaattgagtttttaaacgtcactcactttcctgaaaagtagcatgcttaggcaccttctgaccatggagatgtgtatcagttagcttctgctgcataacgagccacccaaaacttagtggattaaaacgacaacagtttatttagttcacgattttgagtattggcagaccaagtagtggttttgctggtctcagctgggcatgaccacctgggtgttagccatctgtcagctgaggcaacagagaagatgagaccatctctctttcatcatccagcaagctagcctaggcttgttcacatgactagcagggttcacacgactgagcagggttcaaagaaagaatgcaaatgcgcaaggctccttaaggccaaagtcaggattcacatgtcgcttcttccacgttgtttggccaaaatatgtcactagaccagccagatccaaggaatggagaaacatgttctacccctttttttttttgaaatggagtctcactctgttgcccaagctggagtgcagcgacacgatctcagctcattgcaacctccgcctcccaggttcaagcgattctcctgcctcagcctcctgagtagctgggattacaggtgcacaccaccatacctggctgatttttgtatttttagtagagatggggtttcaccatgtaggccaggctggtctggaactcctgacctcaggtgatccacccaccttggcctcccaaagtgctgggattacaggagnnnnnnnnnnnnnnnnnnnnnnnnnnnnnnnnnnnnnnnnnnnnnnnnnnnnnnnnnnnnnnnnnnnnnnnnnnnnnnnnnnnnnnnnnnnnnnnnnnnnnnnnnnnnnnnnnnnnggacccactaataattggggccatctgttcaatatcccacaggtcttaacactattggaccctactttcatcctaaatttgatgtgcttgttaaacttcttttttgtctaatttgcagttatgcttacctcctacaagacctactatttccgtctaattcactgtttccagttgcacaagtcccgtgaactttgaaactagaccatcagactactctcaacaaatattatgttaatttagcaacaaaacttgttagaacttttgtaaatgggtaaataggctagaagtgaaagaaggtcttcttcaatttttaggttgtgaactttataacaaatatgacatgaggcagtagtttttgcttatcagttcctagcttggttccagatacgtgaggtggtttgacgactgttgttaggtaagctattgtattaaaaaggtctagctatggtggaactgttggaagttgagaaggaaaaagaatttttatttgggatttgatgagaagtgatttatcttttatgctgttattttatgcatttgatggcttcagttctatttggacctgtcccaaaatatrgagaaaccataaagttatttaattttattactttaagactgaggaggaagcaaaaaagtgtgatttgcgtcagctgcagagccttttggggttctgaaggaaggggagaattaatcttctgtgtatttcattgagatctatttaacctcttatttctaagcaagccttgtaagaggcttttacctttttttcttttcaattctcctctttttcttctctttctcccaggtaagcatcacagtgattcatgagttcggtgtgtgagagcctttaaccttgggaactggacctttgtctttcccrttttaagtcctgcaagtgtctaaatgttttctttcagagtgtgacaaaggcagcattcaccctgagcttattgttgcttttaaaggagctcccaaaaaattttggaaaattttaaactacaacttaaaacagtagtgagaccaggcacagaggctcacacctgtaatcccaacattttgggaggtgaaagcaggaggatcacttgaggccaggagtttgagacaagcctaggcaacatagtgagattctatgtctatttttaaaaatagtttttaagttagctggccatgatggctaacaacaacacgtgcatacctccccccgatagtttcacacctatagtcccagctcctcaagaggctgacacaggaggatcgcttaagcccaagaattcgaggctgcaatggactgtgatagtgcagctgcagtctagtctgaatgacagcgtgagaccctgcctcataaggaaggaaggaaggatggaaggaaggaaggaagggagggagggagggagggagggaggnnnnnnnnnnnnnnnnnnnnnnnnnnnnnnnnnnnnnnnnnnnnnnnnnnnnnnnnnnnnnnnnnnnnnnnnnnnnnnnnnnnnnnnnnnnnnnnnnnnnnnnnnnnnnnnnnnnnnnnnnnnnnnnnnnnnnnnnnnnnnnnnnnnnnnnnnnnnnnnnnnnnnnnnnnnnnnnnnnnnnnnnnnnnnnnnnnnnnnnnnnnnnnncagagaaagtcactttgtcatggaactattttaactgagactgccttaggaagccccagaaaccactgcttggtccccatggggctgacttcattaagagtgtatctacttttagatcatattcagcaacacgtgcatacctccccaccaaaaataattgcaaaagcataactttttaagagaaataaaaatcaatgtatatattttttaaatagaatttttaaaggtaaattatattaaagtgtttttcattggttctaatcaaggagggaaggcaaatgtttttcttttagtgaacaatattctttaaaactcttaaactgggagcagaggaacgtgaagaattctttcagaagggcttcatgtcacctcttcaacgaatcttttcttggcagaattatcaacaagtagcagcagccatgagtgctactaaktgtatattgaatatcactctcctgcgtgcggagaatctcgcctcaaacaaaatggacaaagactttcccttcctagagcctgtgttatagctggaaatagctcataaactagtcatcaaacaaaagatatgaatttcaaatcatgataataactagaagaaaaagaaaaaatgaaaggatagtgagtgacttggaatggaaagcccagcattaaggaggagggtcgtggccctgcctgagtgatgagaaggcttcaggctgaggtgagtagtgtttgcacatggggacgagctgatgcccaagcaaaactaactgaaagtaattggggagctgtgtgtggtgatgcacatctgaagatccagcttctcggkaagctgaggcaggaggatcgcttgagggcaggagtttgaggctgtattgtgcctgtgaatagcaactggagtccaaccttggcaatgtagcaagatgtaagagtgagagagagagagagaagagagaagacargaaggaggagaagagaagaaggagaaggagaagaggagaggagaagagaagagagaaaggaagaacaagaaggagaagaaagagaaggaaagaacaaaaagtagtggagagtggagtgagcaagggggagtgcggcagacacaaggaggaaaggaggaaggtatgggctgtggaccacaggaaggaggtttgaaacaggaatgtgtgaaaagaatcctattttcactttggcagctatgcagagcctagattctagagttaataaagtcaagagactgtgaggaggctgcagcagtctaagacaacattgatttatgacttgctctggaagtcaggctgtgaggatagagagaaatggaagactgatggtctaataatgaagtcactaggatctcaccataccttagctctgtagtccagtgcagtagcttcttgtataatattgttgggttttttctgtttgttttgttgttgttttttttaactgagtcttgctctatcacccaggctggagtgcagtggtgcaatctcagctcactgcaacctccaccttccaggttcaagcgattcccctgcctcagcctcctgagtagctgggattacaggcacccaccaccatgcctggctaatttttgtatttttagtagagacagggtttcaccatattgaccaggctggtctcgaactcctgaccccaagtgatttgcccgccttggcttcccaaagtactgggattgcaggcatgagccaccacacctggccttgtataatattctttacaagaacgttcatttttaaccacatatggttaagtttaaattaattaaatgtgaaaattcaattcctccttcacacttttttaaaaaatagctactctttatagtatcactaaagttggacacatgcatatcccatgacccagcaattccattcctagcattcccctcctgtaagaaacatgtgcatggccaggcgaggtggctcatgcctgtaatcccagcactttttgggaggctgatgggggaggatcacttgagaccaggagtttgagaccagcctgggcaacatggcgaaacctcatctctaaaaaagtacaaaaattagccaggcatggtggggcatgcccgtagtcccagctatgtgggaggctaaggtgggaggttgacactacagtgagtcgtgatggtgccactgcattctagcctgggtgtctggagtgagatcttgcctcaaaaaggaaaaaagaaaaagaaaaaggccaggcatggtggctcacgcctgtaatcccaacactttgggaggccgaggtgggcggatctcttgaggccaggagttggagaccagcctgggcaacatggcaaaaccccatctctaccaaaaatacaaaaatgagctgggcatggtggtgcacgcctgtattcccagctactcagaaggcggaggaacaagaagctcttgaacttgggaggtggaggcggaggctgcagcgagccaggattgcaccactgcacgataacctccccagagcaatggctgctgcttctctccaccctcccaatctcaagcaagggcctcttctgaccaacgctaacccagaaccatccagggaaggggatccagggaaaacaattcccagcttacctaccaggtgcacagtccacccggcatgtgagggcccatctcttggatgcttatgaaatggaacttgaggtttgagaaaggaccaaacctccactttgttcacctgcgatttggtcaagagttggcttggcctgtgtcctgaccatagcatgaagcctgtgtggtgcgtgccattccttggctgctgctcgtaatgccctcccacttctctgtcttcccccttgaccgcaaaagtaaagtgctactgttctctaatactgcaaaaacaaggcaccggcagattttaagctgataaaaacctgctaaagctgtcattgtatataccttttaggatggaatgagataacatatcccagggtaaaaacaagagtgaaatagttctgagaactgtgaaactgtcgtcctctttctaaatgacttaatccaacagacaggtggtttttaatcacggacccccttcttttgtaggcattggaacaccaacatcttttcactttaatcatgtaaggagtgctaccgcttacaggccacacactgttccttcatcatcattgtccccaatgactggtatgaaaaattgagttgagacctgcccaaggtcagacagctagtaagtggcaggacacagatacgaactcaggtaggaaattcagaaggatctaaagtaaaggggacacttggaggctgaaaaatacccaaacgtaagaagactgaggagccctggggtgagcagcagagttgtgttgcagaacgtgatgaggattagggctcagcaggtgtcagccatggctgggcctcctccaggctgtctcctaggatatctgggccattgtaggtcacagtttctttcctgcctccctcccttcttccattcctctttcctcttccttctccctttatgttttcctttcttctcccagattttctctttcttttgcgtgtatgtgatctccccatcttcactttctttctttgtaatagaatggtccatctattcagccagctgttgatcctagcctttgagctttgagcaaatcttttttttttttttttgagacggagtcttgctctgtcactgcgcaaggctagagtgcagtggcgcaatctcagctcactgcaacctctgcctccctgggttcaagtgattctcttrcctcagcctcctgagtaactgggattacaggcatgtgccaccacacctggctaatttttgtatttttagtagagacggggtttcaccatgttggccaggctggtctcgaactcctgacctcaggtgatctgcctgccttggcctcccaaagttctgggattayaggcatgagccactgcactcagcccctttgagcaaattttagcacatacagagaggctgtgtagacagacctaaacatggtccctgttttttaggagtttatcctccactttcagttttgttatgggaagcagcttcccctactcacagaaattgtttatgcaacctatagcatcacctctgctcctgaaccaaacatggagtccacaccctaactctgagggtgcctgtaagagtccttagaacatagcagtaatatagacacccaactggataagcctcttcctctccctcaccccaaacccccctatccctcttgaggggttgttttggggaccactcctggtacctgtctgacctcaggatgcaggccctggagtcctctgttccctgtgttcaccaggtgtacagcagatagtgaggtcaagacctgcctctgggaaaggagaacaaagaaggaaaagatctatttaaggaagcagttcagcagttgtcttctgtgtacagaaaagtcagggagaggctggtctgtgggtacaggcagcacctgggaaccaggatgaaattcagaaatttccacactgttctctggtaccaacatctgtggccactgaagcccgtcagagggaccaaacctgtattttcctgaagcaggagtgggtctttggggcaagtttttgttgccccaaagaaggtggatgggggcatccaccttcttcccaccttggccagttatcccagcaagaagctaaaaccaaggctggcatgggcctggctgtcagcctcgcctttctgggggcatttctttcctccattgctgctggcctgccctacatcagggcccccaccttcctcagggctttcggtgcatctggggttgatggttctctgtctctctctctccagggccaggtctggattaatggctttaaccttggccgctattggccagcccggggccctcagttgaccttgtttgtgccccagcacatcctgatgacctcggccccaaacaccatcaccgtgctggaactggagtgggcaccctgcagcagtgatgatccagractatgtgctgtgacgttcgtggacaggccagttattggctcatctgtgacctacgatcatccctccaaacctgttgaaaaaagactcatgcccccacccccgcaaaaaaacaaagattcatggctggaccatgtatgatgatgaaagcctgtgtctttgagggattctaccctgaacatacctcacagatcctccctgtcatgccacatttcactgattggaatgtggaaatggaaaaggaatttaggatgtgcattttcacctgaggtttccctgcatccctgcagtgccaaagccccaccttcagggaccacctggaatgtgtgaggggctgacagcacagtaacgtgcatacatatctgcagggctggaatggaagctttaaaggtggtagtgatttttattttggaagaatcatgttacctttttgttaaataaaatttgtactcaaatgatgatgtcactgtttttaatgtgcaggtattgaattayatggtctgacttaaatcataactagacttgagtgggctgaataaaccacttcactaacttgaagttcaaaaggatggaaaatagtcttggtttgatctgtggactgctgcttttctgatcgttatttgacttgcttttggactagataacctataaatacagctcaaaacaattatgcaaacaatctaaatgattaacagttgcacagtgtacatagtatggtatatctatatagaagcatagtattttagccactaaaatggtgagagatctatacttatatgcaaattttttgatacatgaaaaaacagattaccttaaattggatcccgttttgtgtgtttcaacataagaacttcacatattcacacagtacaggcctatacacatgtcagtagtcaggcatgcacgtgtgtgtgtgctgtgtatgtgcacagataggaaaggatgtggtgtttctgatattcctgtcctgacatggagcagtagctctcatttgttgaggacttgttctacaccatgcacagttctgagtttatgtttaactcacttgcccctcacaagaacactgaggaatatactgtcatcctgccggtttaccagatctcacagatgtatgtggcgagacagggtttgagcccaggtagtctggctctagtgtccgggtacacattgcatacataaatattaatacatgcttgtgttgcacaagaaaggttaggaataacttaaaaatgttcatatacttatatctggatgctaagtatttgagagattgcttgctttttcttatctgtatttttaattatatactgggaatatgtaatttttttttttttttttgaggctgggtcttgctctgttgcccaggctgaagtgcaatggcatgattgtagctcattgcagccttgaattcctggcttcaagtgatcttcctaccttgacctcccaaagttctgggattacagttatgaaccactgcacccggccctgtagttttgttttgtttttaaggagggagaaaggaaagtttttttatgtcaatctgtaatgttttcttggtggtatatttttccctctgtcataggcacaactaataaatatctgagattgaacagtgagtctttaaacacaggttgagccagctgcaagtggcatagatgagccgaaacaaacactggaacttagttaaggacgtttttccatagtacctttttctagatgttctgcaccatttgatgtttgggcagatcacagggcgaaggaggtgctacatggactcataccctcatttcattactcctccactgcacagttaccaaaaacataaaatgatactcaagaaccatggccaaacagtgataagctttggaaagaaatgtgaaatgactccttttaaagcatatgtacattggtgaattgcagttcccctgccctagagacaagcagagaatctccagaaggcacgagcagtggagtgtggttgcctcatcagcgtgtacacttgccttatatttcactcattcagtcttcagaactacactgtaaggtcaaatagcaataagtccattttacaattgaaaatatttaaaactttggcaagaggcagagttgatttcaaacctggcctacctccctccaaagccagagtgttttgtcttatcaatgtgagggaatttggatgggttttcccacctacagcactctgccaccccttacccaggaagtttttggaaaacagaatcttttttttttgaaacagagtcttgctctgtcacccaggctggagtgcagtggcatgatcttggctcactgcaaactttgcctcctgggttcaagcgattctcctgcctcagcctccagagtagctgggattacaggcgtgcatcaccatgcccagctaatttttgtatttttagcagagacggggttttgccgtgttggtcaggctggtctcaaactcctgacctcaggttatccacccacctgggcctcccaaatcgccgggattacaggcatgagccactgcgcccggccagaaaacagaatcttaatacatagatagtgccacctggactctggactcccctcaacccatccaactctacactgcctctcatgggcacacattttgcctgctacaatgttcttcctaaaataagatgtgccttcagtcattcttgatttctctcaataaccttatttcagatctgtccacgaattgattgaaaatgcaactctctctatggatgctacctttggaaaataataaggggagtacttttattacctactatctaaaccttttatattaaatttatctttcagccaccgtgcccggcctcacaatgtagtcatttgtgtctgatctctctcagcataccgtgaggtttgttccatgttgtagcatgttcaggaatgtgttcctgtgtgttgctgagtcgcattccattgtatggatgtaccacattttgtttatccatttgccagctgatgggtacttgaatggtttccagttttgactattatgaagaatgctgatatgaacatccatatacagttatttgtgtagtcatccgttttcatttctcttggatagatacccatgagagggattgtttagtcgtatagtaatttatattgaactgtttaaggaactgttaaacaatttcagaatatcttttttgaagatagtgaataatgaagaggaggcagaattacccttagacctgtaatcccagcactttgggaggccgaggtgggtggatggcttgagcccaggaattcgagactaggctgggcaatatggcaagacctcatctctactaaaaatacaaaaattaggccaggtgcggtgactcacacctgcaatccaagcactttgggctgaggcaggtggatcacctgaggtcaggagttcgagaccagcctggccaacatggtgaaaccccatctctactaaaaaatacaaaaattagccgggcatggtggcaggcacctgtaatcccagctactcaggaggctgaggcagaggaattgcctgaaagcgggaggcggaggctgcagtgagccgagattgcgccactgtactccagcccgggtgacaagagtgagacaccgtctcaaaaaaaaaaaaaaaaaaaaaaaaaaaaattagctggatgtggtggtgcatgcctgtagtcctagctactcaagaggctgaggtaggaggatcacttgagcctgggaggcagaggttgcagtgagctgagatcacaccactgcactctagcctgggtggcagggccagaccctgtctcaaaaaagaaagaatcacacttagaatttgcagatttatcatccctcctgtcctctctcttcccttctccaccttacactacctactttctttatctgtcattgtcagtctgtttatctttgtttctcagcaaatccagtttattcagaatgaaattgtttaatgctaatccgaggtggggttttttttcattgtttccccaacaagaaatatgtcttctgtcaaatgacacaaataggaaatgatctcatgtggtctttatttctctcctttatgaaaaagaagtcattttctgaaatcacctttttagtcagtctgagggatcctgactggtctgtggtagcacacacagctggtgtggaccatcagcacatgggctgcaaggaaaatcgccccgatgtccagacagtggggccaggtggtttctgggttttggcctagcccctgctcttggtctgactgagcaatacttccccagatgtcccttgcccttcagcccactggccctgacctttgttagaagtggatgcccagcagctttctggttgtctgtgaatgcccggtgaagattctgaactgattcctcaccagacagttgctctgtttgcaccacaaggggctttcccacgtgtgagcaggcctcccaccagcttcattcctccaaactcccaaaccagcagcactgtctcctaagatacaacaggacaggctttgaggacagaaacccagggtcacgttcctgctccatcactttccatcagcatggtctcgggcaagggaatcgtgtaagtctaaatttcttattctcctaaatgtggtggccaccttgtggggttttaaaattaaatgaggtcatcataaaagtaccttgtatagcatttgccatgtagtagctgcttactaaatgctagtttgagtctttcctatcatattccaccacagaagcaggtaactgatcatctggaaacctgggggacaagagggaagaaatgacacctaggatgctccatcctttccctgcatccctttgtgttcagttcaacaacttggttctcctcctgaccagccactgtgcttggctgaggacacaaaggtgaaggagacagtctagtataaaacatgacacagaccagacccaaaggggaggaagaggtcctgtagaaaggtgaaggggcatcattcaccaagcctctccagcattaaccagagactgctggagggcagcgtgagcctacggaaaagactcgacatccagggtttggacttaaaggccctagtgtggacttcttcagtgctctgattccttgaagattctgttggcttgttctcaaaacgtaagcaactttccagtgccaacatattgaattccttgcccacggggcatttctcatcatcatgggttgcaatgtgtgctgttgtctgttgctgcataataaaccagtaagtctgcttaagtggcatgaagcaactattttgttatgcacacgattctatggatcaggaatttggacagcccagcaaggatggcttgtctttgttctgtgacgttggggcttctgctgggtaccagaaccatctggcaattccttcactcacttgcctgctatttgggccaggatgacttgaagtttaaggccacttaggacagtcaacagagcatctacaagtggtctttccatgtgactcaggcttcttataacacagtagctgggttctgatggcatgttccagaagggagcttccagagagtgaacattgcaacagaagcaggtggaagctgcatggccatttaaggcctagatgcagaagtcacatagcatcagtccactgtactctactggtcaaagtagtcataacccagattcaaggggaggaaacacagatccccatccttggatgggagaaatgacaaagaatgtgtggccatttttaagaaatcatcacatgtgcacccagtgctatgttgtagcacactccaatttgtgtatttccatccatttcactaaaggtctgaaagcccagcaagcatgaattgaggtccaaggccccactggtaaggagcaggaggccattggctaagtggttcatttagcctgtgtttagtgaattggatccctttgtctctttttgcaaattgccaggccccggtggtctcaccagatattaactgaggggaattaactggacacaggcaggaaatccactgtgtgaaccccccaccagtcagagtttatggaggtatgagatgatgggcactgcacacaaagctcaatgtggtttctgtttctttgggtgaaatcttttgatacgatttctgatcaagaggtgcagtctgtccaatttacttcaactttctttaatttttactaagcaatacgattattattattattattatttttagacagagtctcactctgtcgcccaggctggagtgcagtggcgtgatctctgctcactgcaagctccacctcccgggttcacgccattctcctgcctcagcctcccgagtagctgggactacaggcacccgccaccacgcccagctaattttttgtattttttagtagagacggggtttcaccgtgttagccaggatggtctcgatctcctgacctcgtgatctgcccgcctcggccttccaaagtgctgggattacaggcgtgagccaccgcgcccgactgcaataggatctttttaccagagtgctttggctgtcgtggaccacctgacctcttttctggggactttgaaatcaggaagtgtcccaagaag

SEQ ID NO: 95527 - DNA, 25609 bp, Homo sapiens
acatactttggctgctgagtcacagcaattgtagatctagagcccacctggcccttgggcctcctctggtcccacctcatcactgccagatgaggaagctgataaccagagaggggaagagcccaagtgtctgaacagaaaagctgggcttgaacctgggacctcggactccatagaacagagatggcagaccctgctccaaacctcccaaattggggtcctctcagctgggaatcctctgaggagcaattcaagtacctgggacttttgcttgccttcccccacttcttttccccgaatcagcagcgtccatcctggttcccctgcccctcccaacccccacctggctttgggcactgctggaacccaggcaagcctgcctgaggcctggcctcaaagataatgaacttggggctttgctttactcctgactagagcccttgagtcaccccgagctgctcacccaggtgctcccacctacagacagctgaggatgaggagtgagaatggaagaaaaggctttgggccctgggagtgaagcccaggactcagaacaaactcaggtagtggggagaggggatgtgtggaaaacacacaggtatagaagtctgaacacgaacgcagcctctgtggtagctggattctcctgggcctgccccagcagggaggacaagcctgcctccaagaccagctcagcccagctccctgctcaggccacagccaggggctgcttgctcctcccccgctccacctagccccaaacctcagagccgcccacctggcccctggatgggggcctggaaactcagcactgcagactcaggagattttccaggccgtgtgtgcgcctgcgcatatgtgctcttttgaaaggcgggggcggcgggcgggggaaggttgcaaccagggaaactgatgtgaaagggaagaggtcccagtctggccaagaggtggcggaaacatcgtaccttctcatcccaccctcatcccacctcacctggggacatctcactctgttctttctggtagccttgatcagcaaccaagaaggggagaggcggggtggaggcgccctaattcggaatctaaggagaagagacacacaggacacatgcctaggtagaggcagagtgtgtcagaacctgctcaagagtccccacaaaaaagcggtctgcggggcccagcacagactccatagctagtcctttggacggagccttgaggaggcacctggccctaagatgcacagctgccagcccccagcgcagcctaggggaccgggagacagggcccctagaggttctgataaataagctgggcatggtggctcatgcctgtaatctcaggactttgggaggccaaggtgggcggatcaccaggtcaggagatcaagaccatcctggccaaaatggtgaaacctcgtctctactaaaaatacaaaaaattcgctgggtgtggcggcacatgcctgtaatcccagctactcgggaggctgaggcaggagaatcactagaaccagggagttagaggttgcagtgagctgagatggcaccactgcactccagcctggtgacagagtgagactccgtttcaaaaaaaataaaataaataagcagcagcctccccagcccaaacgtctccattcagcaaaagaaaaggtaccacgagggctgtatctcctccccagcaaccacccccacagacaaacccacatcctctccctagagaacccctggggttcccccccgctaccctgaggtctcagggcaccttactgattccttctggagagagccagccaggaggcagaggagagagcaaggggcaggtctgggagtgctggcttccaaatgtgaactggcctggcctacagctgtcccaggcagcgctcttccggcccctccctgctctcccacagcctgaagcctggccttgggcagcccccacactggaggaagataatcaccgggcagcagaggggcagggtggctcaggacagccaagtcgcccactccccctgctgcctatactatggggaaggtggccagggagtgggggaaggcctaggtccccctgaccaggccatgggagagcaggggaggggctggtcatgtgtggattgacactgtgcatgtgcatttgtgcaaacgtgggccatgagggtgtacacacctgtctggatggatgtatgagtgggtgtccggggacaacacagagcgggagggagacgggagcccctgggaagaaaaggccacattgtagaatagatgtccatttggctggctctgggcttgggagagagggagggactcttctatcctaaaaccttcctgccagggtcctgagttccagcatcgggcaaagaaccaggcactttcctggacctcctggcaggctggccctggcatcccagtgccaagcagggctggattactggtcctctcagccaggggtaaagggtatgggatgttccccttcatccaaaaggtagcaggaggtcctagctggcccggcacagggttgaagctttgagacaggggtgcagttgtcactctggtcagcctggacttatcccatgcccttaacagcacttccctgccccactcaccctgtctcccctgctgtctccctgcttcctgtgggatgaggcttcccagatccagttcttggtgtttctgtctccccgacacaaacaggaacaagccagggcctacaaagttggggcagaacaagccagctcaggctggcctaggattttgggggtgggaaggatggaggaacagccacccgagatcctagtgcttctccagagaggagccgaggagggcagctaggaagggggcagagcagctggagtgtgcaggacccagcagtcctggccccaggcagctgactctctccccaggatcctccccttggattgttaaaaggtggcagcctttgcctctgggggccaactgctccccagcaaggagctccctactccctaggggctggcaaagagcaacgacttctgggaattccagatgtaatgtccgcctttccccgggcctgggctagggaggggggcgcttctgacacttggggcagggagctgcggctcacagccctggaactgggaatcactagaggggaaaacaagagagtcaagacgtgtgtggccagagcttgggagggctgagggcacccaccacagcctcagatgggacaaggctgactctcaagatgcatcatgccctgcaccagtccctccccagcctggcctggtggcttgggacacccctctttgtcctccctggagtggactctgtcccacccgggatgctgggagacccctgggagtgactccttcctgcacttcctcagtgctcggctggaagtgccccggcagcccgggttcagggagaaagtcagcagtgaggaggaagagggaggctggtgagaggtgagacccggcagccatgacctcctcaccctgtgctgctcccagacccacttccccagccagctcctcccagctcctcggtcctctggctgctgactcccaacctctcctccgtgagcaaagcacaccatgggctgacaagggaggtgctatgatcatcccccagtggagggaggaagctgaggaggagcctgagactcagcaatttgcccaaggtcacacagttaataagctacgtttagactcattatgcatagatctttctgatttccaactattactatactttctctggagtcgagggtggctagaacctaaatctcaacccaggaacacaaatcgattcgagtgatggaagtttgagagctgctgtgaccttttggccccaggggtgggaaggttctggaggggagagggagtcacgcccaggagccttccaacagcccggatgggacagagtccactccagagagggcagagaggggcgtcccaagtcaccaggccaggctggggagggggaggtgcagggcgatgacgcatgtcttgtgccatctgaggttgcagttggcatcctcagccctcatgagctctggccacacacctccatggatgtccaggtatccctaagcacaggggaagaaggagtgggcaggagccaaggagtgactgtcccctctaccccacatccacccagagggaacaggggatctttgagaggtcttgcctaatgctcagccactacccccacccccaaccccaactatcttccccatcgcctggctcccagcttccttgctgtgaagctcagcttccaactgtccagccactgctaggcctcagtctgtgggggaaaggggtgggctcacagccaacagggctcagaccctggaaacttggggggaccaggcagacctgtgtggggagggctttgccgcttcctcctcccacccctgtggtgtcctagcttcctgttcttgataacaatcagcataggctcagagccgggccctctttccaayccccacctgccccctcctgtgtccccagggcccccactacccaccagtggaaacactgactggtgtggggggtgaggcagaggccagtctccaggtcactgctcgcaagcatgttagggattcccaggttcctgcttccctccagtctgtcctgagcacgggaaccaacccctttcccagccctaatcggcctcctcctcagggaaacccacccactccggagaggaacgcaggctgcagggaaggaggtgccaggatcagctggccatggaggggctcaaaaaagagccagcccctgtccccactgccaagagcaagggcgggtgctgggaggccttctgagcctctgggggctgttcttgttcttcgtctcaaccctcctcctcaaggggccagcagaaggccagccccctcccgaccaccccctccggcatgcctaccccctgtgcctagggtacctcatttcttttttgctgtcaccatttgacagctgaatcagggaagtgggaggaagaaagaggacgtggattgtgcrtgttgggggccgggaagggaagggcgtttgaaatgttacaaggtaaaaggaggcgtgcagcgagcatgaaccggctgggctgctggcccgcaaggagcctgccaaggtcaggcaggggcagtgggcagaggagtcttggacttgggggccacccttcaggtcccaggcatccaggcaccccagcagcgaagaggacatgggagtcccctggtgtgagggccagagactgtccactgtctgtaagtcttctaagtagatgtcagggttctgggaggaggcctgcagggggctgagggcccaggggaagcccctcggactccctcccacaagtggactctgctatctgcttcctgctgggctggcctacactcaggccgtgggctgtggagagctgggccgtggcacaggcgtggagacgacctttttggcctggccccggccctttccttcacattgtgaggcatggattcttgcttcttctttttccccaccccgagtctgtgccacatctgctctgggaagatgtggtctgtgcttggccatgaattcccaaggcttgaagcagcaagggctttgagggagagggctttgagggagagggccttgagggagagggctgtggggcagaagcagagaaggagaaataagcctccggccaaggtcaggttgagcaggagagccttgggttctttgtgggacagcacagagctgggggtcaggcgagctgtgcccagcaagtaggcagcggctggatgtgacaaagacccagaggagaaacacagaagaggggagagggtctggaagctggggaaagcaggatggtcgggaaggcctggcccctcacccattcccagggaacggggccttgggccccagaagggcacaggcgggaggcagccgacccctggtggcagcggcagcaggcacrggagggcagaatgcagctggggtgtgcgtgggtggcagcaaggaggggcggagggaggaagctggcttcctggagccttctcagccctcaaagacagaccgacagacagacagacagctggcaagaggcagcctgggggccacagctgcttcagtaagtatctgaaggggggactgggagtcctgtggccccggggggtgcgaactccggggatataagagggcatctctaggagggagtgcgggagggcgagtggggcgccacagtgcctggctggggtatgggtgctcacagacctgatgtccccaagacgggggtgagcagggaagccacagggagctacaaggagagcagaggctgaagggaccttttctgctaccagagaccctcgctctaccactcacacctgtgccaggcccattctgtcccctcacctccgtccctgctgccttggtgattcaacacccccgccacctcgcccactgtgaccctggctctgggagatagggactgcccccaagaggagatggtcccaccacctccatgccycctgtcttgcccccagctgtcgcctcaccatgcgctgtcgttcaagggcttggtgaggccatttcctgtgacggttacagrggcgggagacggggggatgggcaggaggaggaaggaaacacctccagcctacctccctggacagagaccccagaagccagaaayagacctgggagtggaacagcagcagttaggagaggaccctgctggggtccaggagcccgcctgcctggctgcccaaccagctccaacactgctggaggcctccattctctgttcaggggaaggcccactggttagctcagagatggcttctgcgtgctttctcccttccgtcctagagaacacatattttctgtttcctcccttgccttctcccacttggacctgctcagagccctgtgtactctggtgtgtggcctctctcccctctctcttttcctccttctggattctttcctatcttcatccacaatctctaccctttatcttgccgttactctaccccgagactgccttctgccctgggtcccaccaaatagatcctgtccttcccttagtgaaaatgaggccacctcttggggaacagaagacgccccagtgaaaacagagtgcaaacctggcctggcatgggagcctccttctggccaatcaggcaggccagagaacagcagcggagggccctgtctttcaggcagacctcatggctgagtgagcctcccctgggcccagcaccccacctcagcatggtccaagcccatggggggcgctccagagcacagccgttgaccttgtctttgggggcagccatgacccagcctccgcctgaaaaaacgccagccaagaagcatgtgcgactgcaggagaggtgagatcttccctgggggaggggtcttccgagccctgagcccccattccgctcctcccttccttccatctgcccctccagctctgacagcagggtccagagggccctcagttgttgactccaatttggaaaggaaaccagtagtgctcatttgcatgtcttttgcatgtctggagcacagagtttcatatcaaccatgagcctgctccctaaattccaggcaaggcccacagccttcttggtgctggatgcatgtcggagccacagggcctggctgggagtgggaagaggcaggcagctggaagragcagttgagttcaaggctgccctgttctggctgacaaagggagagggctgagccaggcatggtagctcatgcccaaaatcccagcactttgggaggctgaggtgagaggatctcctgagtccaggaattagagaccggcctaggcaatatagtgagacctcctctctctcaaaaaaaaaaaaaaaaagagggcacacagcaggggcccaaaccctaaatttactgggctaccaggttaaaggaaagataaagagcggccccctcagaggtgccttataacagtaatacttgtaagaaaagcaaatatggtcaggcacagtggctcatgcctataatcccagcactttgggaagccaaggcagaaggatcacttgagcccaggagttcaaaaccagcctgagcaacagaacaagacactgtctctccaaaaaaaaaaaaaacttaaattagccaggtgtggtagcatgtacctgtggtcccagttactctggaggctgaggtgggaggattgcttcagcccaggagtttgaggctgctgtgagccataatagtgccatcacactccagacctgggcaacagagagagaccctatctctaaaagaaaagataaaaagaaaagaaaagcaaatatgattgggtgctcactaggcagtggtgggctatgcctgcaggcggggctccaatgtggctctgatgctggacgttcggtccctgggggccgtagaacccatctgctctgtgaacacaccccgggaggtcaccctacactttctgcgcactgctggacacccccttacccgctgggcccttcagcgccagccacccagccccaagcaactggaagaagaattcttggtaagaaattggggtcccctctgaatcgctctgccctctgtatcagaggcagccagctggaaccattctctcacgggcaccctgggcaagtctcccctttgggccccttaggaaagagaacttcagggctgagggaggggctgcccccaggcttccccttctgcccccaccccatctaggcctacatactattgtcaagaaggaatggccagagtccagctgttctagaaaaaggtagaaggagagaaaaggaggctaggagtcagctgctcacccatttcctccccctgccagaagatcccttcaaactttgtcagccccgaagacctggacatccctggccacgcctccaaggaccgatacaagaccatcttgccaagtaagaactgctgctgggatgaagggagtcgggtacagtccctggggctagagaacttcagaggacaaagtacacagtttcagccagggaagatcaaccttgcttggcacatcttctctcagcagagaaagggggaagaaggagcaagaatcacaacagcagcaataataatgtttgcagatatgtaccctgggccaggccctgttctcaatccttttttttttttttaagacggagttttcactctcgtcacccaggctggagtgcaatggcgcaatctgggctcactgcaacctccgcctcccgggttcaagcgattctcctgcctcagcctcccgagtagctgggattacaggcatgcgcctccatgcgtggctaattttgtatttttagcagaggtggggtttctccatgttggtcaggctggtctcgaactcccgacctcaggtgatccgcccacctcggcctcccaaagtgctgggattacaggcgtaagccaccgcgtccagcctcaatcctttatattcactcatttctcacaacaatcccatgaagttggtactgtgatgaccattttacaagtgaggaaactaaggcacagagaagttgaatatcttacctaagatattcaacttagctacttgcaccaagcccctttccctgtcttcctcttgcatgggaaatgcccagccaaggcttgcagtgaaggaagcaccaccaggagggctcccagagagatggctttgagaaagtcagatggagacagggcaacggccagcaagagagcagtggaggcggggagggaggacactgtgctaggagggggtgaccctgcaaactggcagacccggagcaagcaccttctatttttcggaggcaggcrtgaggccccggagcctctccctccctcccctgctctccctacagggaagctactcccagcttgaggctttagctcagtgagcacycgggccctgtctcctgctaaccctcctggagtgtcctctgcctgcatgggcggatcaaggtgctattagcgctattccaggccagggggaggagtagcccttgttcttggcctaattctaatcagccctgcagccaccagaaaagggaaaaattcctttgcctgagattcccctggtccccagggtaccttctgtccatgaccaggctggcatgagcagagcgagagtctcttctcctttcctcacaagccagcttcttcatccatgtttgggtttcatttagagaaatccttcccccttagaggcagaggccaaatgcctcgtggctgagcggaatctgagtcctagtcccacttcacagctatgtgatatctggcaagttgctcatgtgaatcccatattcaccattagaaaacaaattcttcttcctctacatctctttttccatccctagtggcataatcttgttctaaacctgtactgatctcaaggatagaatactgtatctattagaatattatatctaatattgtatcttcccatttggtctctgctgttccgttccctttcttctctagtccatcctatacagcaccactcagttaatcttcccaaactattgttttgatcatgtcactctcctgctcaaaaacattatacagcttcctactgtctgcgtataaaatacttcaataggggccagacatggtggctcacacatgtaatctcagcactttgggaggttgaggtgggagaattgcttgaagtcagaaattcaagaccagcttgggcaacaaagtgaaacccaatctctacaaaaaacgtaaataaataaataaataagcaagccaggtgtggtggcatttgcctatagtcccagctatgtcaaaggctgagacaaaagtatcacttgagcccaagagttagaggttacagtgagctatgatcgcaccactgcactccagcctaggcaacagaatgagaccctgtctctaaaaacaacaacaaaaacaacaacttcagtgggtgtaaggccacctgctatacacaaggtgctatgactgtgatgagcacaggaactctcctctttctgaccctgcttgagtctgtgttagttggtcaccttctgacctctgacctctgctgatttttatttcctagatccccagagccgtgtctgtctaggccgggcacagagccaggaggacggagattacatcaatgccaactacatccgagtgagtggcctggctgcagtggtgggcggggaatgggggaattctcagacgtctgagaatatcttccagccatggctggtggatcaggtgcctgcatttcctaccctccctgctccagctcactgctgtcatagccctaccaagctgggctggtactgaacatgccccaaaacaccaacctaaaaaacggagcagatgttgaaaaatatctggagagaccaccaagtctccctaacctccactatcagtcctcccatgccaccctctaaacttagcaggaagttagcattgttgaacccaatctccagctgcttaagagctcacagctcccgagaactgcataggtgatgccagcactaatgggacctccccgccaacttaccttaactgcccctcagatagcccctcttatatgaagatggttgattgacgtcaagctataggaagctccaggccaggtgggtgttccacgccagcttctcgctgctgtgggccctaaggagatgtaaaagcagcgctctctagtgactcaatgtgggtaagacatcagtcaggggcgcagggaggcgaaaagctcttagctagggaagccatggggaaacatgatcttacatttgccggccaataccggatcaactgcagtctggatttcaccatcttgagaagcaggaagctgaggatcctgaaggtgagaaaatcaggttagggagagtgtgctacattttgctactactttcatagaaaagtagtaacctgtaaatgtgaaactgtcactgaacaaatattaaacactgtttaggtattttgtgctagaagaaagcagcaggggaggaagggaataaacatttatagagcacttgctatcggctagactctcaatatatcttactgaatttaatccactctacattcctacaagatagatattattatgcccaatttacagatgataccactgaggcttacggaggctaggtaactggcttatagtggtacagccaggaaacagcagaacagggatctgatcctcattccagaacccgtatcctttccatcatgtggcttctgagtgtgcgtgttcgtgcatgtgtacgtctacacgtgtggttcacagcttcaggctgaccccagcacctgaggcatctaggatctccccagagctctgctctcactgctccccaccccttcccctgtgcttccaccttccagggctatgacgggaaggagaaggtctacattgccacccagggccccatgcccaacactgtgtcggacttctgggagatggtgtggcaagaggaagtgtccctcattgtcatgctcactcagctccgagagggcaaggaggtaggaggcagagccacagttcatgatgaacccagaaagtgctatgcccaccccacccccaccccacacacagggcagctcagaaccagaggtttccctgggagccagccccagctcatacctctcagaaagttccctgagatatagccctgggaggctgtctatggccaaaatacgggatagggtgagcactctgcttgcaggtrtcaagctcagaagagccaggctccctgttgctgacctcccatccagtaggggtggaggatggggaggagataccagcccctctctgctgccctgtcacctgctccagctgaccctcttctgactcccagctccctccctcctagaaatgtgtccactactggcccacagaagaggaaacctatggacccttccagatccgcatccaggacatgaaagagtgcccagaatacactgtgcggcagctcaccatccaggtaccaccccccyggagccaggcccagtgggaagttgggccgcccacagcatctctgggactcaggctgkctcttcactaggagccaagggtttgctcttctaaaccatcttaaacccacatctatagcagaaagagaaacttgagcactgtcctcagcctctagtctaatagggcagagccaataagccaaataggactaccgggaagtactcacccatctgtgtaaatggtcaggcgrggacaggcaggatccaggagcagggccaagggaaggagaggaggttaaaggagatgtggaaggccaggtgtggcggctcatgcctgtaatcccaacactttgggaggctgaggggggcggatcacttgaggtcaggagttccagaccagcctggccaacatggtgaaaccttgtctgtactaaaaattacagctgtttggaaggctaagacaggagaatcacttgaacccaggaggcagaggttgcagtgagccaagattgtgctactgcactccagcctgggtgacggagtgagactgtctgtctcaaaaaaaaacaaacaaaataaaacaaaaaaagagaaagagatgtggaataacatgtacacaagggcttttaaaatgccttctattattttatggtgttttatatttttgaaagcattcctctatcaactcattctcctccaaatatcctggcaagtaaaccagtaagatatcactgttcccattttccaggtgaagaaaatgagatcaagggacttgcccaaagtcatgtgcttatgggaagcagagccagggcttgaatttgggtctctcccctctcccaggacaatgctccttcccgggattttgaagggggaagtggtggagaacaatgagcacgaaaattgcaacctagcttgctttgagtagatgacccccccacagggtaattccagcccttgccctcctcaggcaccagagaagaaggtagacagtgccctccaccctgaccttggttctcatgcctygtctccaatccagtaccaggaagagcgccggtcagtaaagcacatcctcttttcggcctggccagaccatcagacaccagaatcagctgggcccctgctgcgcctagtggcagaggtggaggagagcccggagacagccgcccaccccgggcctatcrtagtccactgcaggtgcgtggccctcccttcactgcagcytgtggactgtgctcccctcccctgccccctgggtctctcctggggaagggtctgagcagaaaagcatcaggcaagcctagtccttactcagacatgactcgcaaggccattcagcaagggctctgttctttttacctccttcacgcagaacccagacatctgggctggacacccaggccccatccatagaggggatggaatatcaggaagatcccagtcagctgcaggaggacataaacaggattccagctgttggggaactcatttacttattcaacaaatatgtattgaaaatcctattattggccgggcacggtggttcacacctataatcccagcactttgggacgccagggctggcagatcacctgaggtcaggagtttgagaccagcctggccaacatggtgaaaacctgtctctactaaaaaatacaaaaattagccaggcgtggtagcacacacttgtaatcccagctacttgggaggctgaggcaggagaattgctcaaactctggaggcagtgagccgagatcacaccactgcactccagcctgggtgacagagcgagactccatctcaaaaaaggaaaacctatttttgtcaggcacggtgttagctgctaaggagacagctatgaaccaagcagtttggtttcttcccagacagttttataggctggtgggaaagaaggcagattaggctgggtgcagtggctcatgcttataatctcagcactttgggaggctgaggcgggaggatcacctgaggtcgggagttcaagaccagcctgaccaacatggagaaaccctgtctctactaaaaatacaaaattagccacacatggtggcgcatgcctgtaatcccagttactcgggaggctgaggcaggagaattgcttgaacccaggaggtggaggttgtggtgagctgagatcgcaccatggcattccaggttgggcaacaagagcaaaactctgtctcaaaaaaaaattaaataccacgcaatgtgatgagagctgtgatggggatattatggggaccatagaaccaagtctcctaaaccagactttgaccagagaaagttttccaagagaaaggccatctaagccaagctaagacctgaaaggtgaattagccaagtgaagagagggaagggaacacgttccaggcaagtggaagagcacatgctaaggcccagagaagaaatgtgaaaatggatacactgctgggagcagggttacaggttaggcccagaggttgtgtgtggggtaatgatgagagatgggtttggaaggccagtgaaggtcagatgatgaggggacttggaggactggctaagacacttggatttgccattttaaaagaacactttggctatagagtgaaaaatggattgggccagagtgagggggtgtcgtaggggacaagactaaagaaagggaccatttgggagtgcatatcctaaataaaacagagcacagaggcaaaaggcatgacacaggggcctcccagcccacccacaggtagcactgggacatgtgcagggaggtcattaggggctcacgcaagaggaaggggaggcctagggggttttgaaataaagagagggcacgatagagaaagcagaacagagtrgagagaagactgtgggagggcgccaaggtgggaaacagaggggccgggcgtgggctgcgtggaagatgagtctgagctgagaggaagtcaaggttagataaggagggctcgagggtcagcacacccacaagtgggaaactgtctgttggaaaccactgtagactcagcagaagggagatcgtcaaaatgtccacagggaccaaaaggtggcctgcaacaggcttacagtaaggctggtaagaaatgtaaactcctcccatgccaattaaaacctrcctccagcagggcccccaaggggactggaaagcagagtactgctacctgcctccatctccagagccctatccccaaaatatagcacctgcaggtcccatttctttctccatagtttggggcctggctctcatattccctggtctcccatgacctccctgtcccctccctggctatctccagtgcagggattggccggacgggctgcttcatcgccacgcgaattggctgtcaacagctgaaagcccgaggagaagtggacattctgggtattgtgtgccaactgcggctagacaggtgggtctgtgggtgtaaacaaggccaacaacgttaacggatggcatcagtgcctctgggccccagagttctgctaggcccatcaccatcaagcactcctgcaagaaaggaagaaaccctttctgcttagagctgtttattttacaactaacaaccaggaaaaaatatctatctggatggccgggtgcggtggctcacacctgtaatcccagcactttgggaggctgaggcgggtggatcacctgagcccaggagttcgagaccagcctggccaacatggtgtaaaccctgtctctactaaaaatacaaaaattagccaggcctggtgcgggcccctgtgatcccagctactcaggaggctgaggcaggacaattgcttgaacccaggaggtggagattgcagtgagccgagattgtgccatcgcactgcagcctgggtgacagagcaagactctgactcaaaaaaaaaaaaaaaaaaaaacaaaaaaaagaatatctgtctggaatgttggcttggatgcctggaattaaacatgatatgaggcagcaacaagtagtgcaaagaagatcactgggtggaggcagagccggtgttcagattctgacatctgtctcactgagatgtcactagatttctctgagcccccatttctttttttttctttcttctttttttaataatagagatgggggtctcactatgttgcccagactagtctcgaactcctgggctcaacaatgcccacttggctttgcaaagtgctgggattacaggcttaagccactgtgcccagcccccacttcttctttatctagacagagataatggctccttcccccagaaaactgttgtaagaaatgagttaacttatatgaaaatgttttggaaatggaaactactatacaaatgtatggaatcattatttttactttttaagattattagaaagaaggaaacttgaggctcaggagtattcctggcccgacccaaggcttcagagatctggttttgtcccaggagctgagtggatcaaggaagaccaagtgtcaacatggggcatcacccctcagcacgtgtaaggggcagaggacttctctcacagcagatctgaggggcagcaatgaggagtagaaagtagaaaagatgaatataggtggtggggcatggtggctcatgtctgcaatccaagcagtttgggaggccaagatgggccaatcacttgaggtcaggagttcaagaccaccctggcaacatggtgaaaccctgtttctactaaaaatacaaaaattagctgggcaaggtggcaggcacttgtagtcctagctactcaggagattgaggcaggagaatcacttgaacctgggaggcagaggttgcagtgagctgagatcataccactgctctccagcctggctatcagagtgagactctgtctcacaaaaaaaaaaaaaaaaaaaaaaaagtgaaaagatgaatataggcaaaggagttggcatgttctttgagaaagtcaggactttcccagtaggaccacagggatgtttgactggagccattcagccagcaccctgaccctccttcactcatggtctgtgtrtttctccttgcagaggggggatgatccagacggcagagcagtaccagttcctgcaccacactttggccctgtatgcaggccagctgcctgaggaacccagcccctgacccctgccaccctccggtggcccaggtgcctacctccctcaagcctgggaaggtgggtctggggaaagtgggccgagtgatctgggggtaccccttgggttggtgtggggaaggagtgcctccttagtggtgcttgcagtcacaggaagcagcagcagtaaggacaaggggccggattccaggtcttcaacactggccactcctctgcttcctctgttggccccagatggacagtaaggggaacctccaatgtctctctgaacttaaagacaggagctggcatttatgacagacaaagaaagaagcccaggtgtcctggtgttctctgagacactctttgtgakcttcagtttcctgttctataacatgaacataagtgcttagctgccatgagggaaaagtaatgagagaagtttctagaagccactccagccactccttcctggggctgacaaaagggtgattccaagatcatccttcacccgaggtcctgcccaagcacaggccagatgcaagaatggggaaaagtctggtcctgatctccaagtctcaacatcctatcagtgactctgctccctgaccacacatcggaagggctggatgaccccaatcaaaagaaagaacaaggactctggttacccttgcctccacccatgtgtcataagagtaggctacagaggtgaccaggcctggcagttgaaatctctggaagagggaacatgtggggactaytcagaggcaaagaggagctgctcctgcctccatggttgctggccwctcccaccaactactcttagggaggctaagcagtctctgttttgcttccatggctcaaataataccctgggtatgcaggacccactataccttgcatttgctgagwacacctagagagcttggctgtttccaaaaacaatcagggtcataaccatccatgcagacatggaggctcggctgaaccaggactcctcactgtctacctgagagaatgagcacccctcatccatctcagcatcaacacaatttccaggggacctcaggtctacctcaggactgaacgccacacctcaggattcctcctccttgaatctgagactggctgcccattctgagatggggatgaaggtaagatgccgcatcaccaggcacgccgcccctgacagctgccttgataccagctctctgtggaaacccccgaggagttggatctggagaacagctgggcctcctcactcaggacttctctcctgaagaacacgcagtgctaaaactgaggatgatttccctaatgcttctgcttggccttatggaggagctgctccttccttacagccttggggatggacttgcccacacctccacctcccctgagccctgtgagaggcacgactgtctatgccaatgaggctcggtggggggctctcaagtgcctgatcctgccctgggctcagagccagcccagagggaagcaactgcacagccccacaggccctccytggcactgtccccccaaccccatctcagagctcagagggtacaagctccagaacagtaaccaagtgggaaaataaagacttcttggatgactgactcattccttctttccatcttcttcttggccctctggggcctctttgtagcaagagagaaagactgcagaccagggacaggcaggctgcaaatctttgcccttgggatatgcacttttctagcacttccaaggacataaagtaaggtgaaaccaaagtcaatttaggaagtgagacagggtggaccctcatagcctacccaggcagctgtaacaattcacactaccgtaaaccatgtggcttctaaacaacagaaatgtattgctggcctggcgtggtggctcatgcctgtaatcccagcactttgggaggccgaggcaggcggatcacgaggtcaggagatccagctaacacagtgaaacgctgtctctactaaaaatacaaaaaattagccggacgtggtagcacacacctgtagtcagctattcgggaggctgaggcagaagaattgtttgaaccctggaggtggagggtgcagtgagctatcatgccactgcactccagcctggatgacagagcaagactccatctcaaaaaaaaaagaaaaaagaaaaaaagaaatgtgttgctcacagttctggaagctgggaagtctaggatcaagacccttgcagactcagtgtctggctattaggcagagccttctttctgtccttgcatggtgaaaaggttgtgggctggtattcttccccctaatcccaccggccccctttataaggctctaccctcatgacttaatcacctcctaataccatcactttagggattaggacttcaacctatgaatttggggggacacaaacattcagtccatagcctttatcttaggagctagaggaggacttataaagggcagaggttagaaagatggtgcttaataaaccagaatattggccaggctcatgcctgtaatcccagcactttgggaggctgaggcaggcagatggcttgagctcagggcttcgagaccagcctggacaacatggcaaaaccccgtctctaccaaatatacaaaaattaggctggcatggtggcgcatgcctgtagtcccagctactcgggaggctgaggtagaagaatcacctgagcccgaggaggtggaggctgcagtgagtcgagatcccaccgctgcactccagcctgggccacacagtgagaccccatcaaaaaaaaaaaaaaaaacaatattatgctagccgaaaccttgtgattcttctactttggtaactgtttgactatttggggtcatctaactccagttgattggacagatatggttgatattgatagtttacccacttttgactaaaacaatagactacatatgactacatttgaaaaccaaaccccaacgggcagccagcataggctggggactgcccgaagcctgagcctacccgggactgccagctgaggttgtcagcctgcctgagcaggtcctatgggtgggtcttgcaaggagaggggcaggagtaaggcatctttgcaggcactccagacccacttcaagaggagaactatcacttctcctcctgaagaatactctgcttttcaccaaaacagggcaacattttcctttgtcacagacgttcctcactgaaaaccccctgccaggactgtatctgtttgggtatcttggggatgctggtaaaaatccggagcaagttcaagcgtccgtttcacttggggccagaggcttcctaacaagtggtcggggtaaattgtggtgaacaaaacaagatggagtattaaaagacccgaatacggttgtccctctgcactgggtgcattttgagaggatgggactgtacccaggaatgctcagaggcaagggttcagggacaaaaaagcctccatctgcctccctgtcgtagagatctcatctccgtgtcctgggaagtgggtgacccactctccttcaacctgaaaaggctcctgcttaaccggaacctcacccacctcgagcccaccaccctttaagaaagggggtgccagtcagggcgcggcagtcggggacagggtctaaaataaattagaccccatttcccaagcgcctctcgacgccagctgccggtcaacccccgccgctgaagcctgcggattccctgctcaccccacctgcggattccctgctcaccccacctgcgggtgcggcccctggccccccggctccagcgagggaggagcgcgcgctcgggtgcgagcaggacacggcccggccgcgagggagggcggcggcggcggcggaggaggagggcgcggaagccacacccatcggcgagccgattccggggcagcgagtcgtcggcagccgcgctcgagcctccgcccgcaccgagccgcgggacccgggccgtaccggggaggggccgctccgggccgcagcgcgagggcagcgaggggcggcggggacctggcaccgggcggggccggcggcagcgaccatgatcgctttgttcaacaagctgctggactggttcaaggccctattctggaaggaggagatggagctcacgctggtcgggcttcagtactcgggcaagaccaccttcgtcaacgtgatcgcggtacgagggcgtcgggcgcggggtccccgggcgcgggccgcgggtcgggcctgtccccgcccgcgccgcgccctgctgagccggggtcgccgcctggcatagccgggcacggccgggcgccgggcgggggaggagccggccccgagcgcttggggcctagtacggcccgtgccgtgggggaccggggcggcgcgcgacccgctctctcacccgggccggtactgcacggctgggggcaggggaagggggacgaacagacagggccggtgccacggggcaggcggcaccgaggggctctcgaagcaggagggacccgctgccggctgagacgggccccctctggcccccgcgcaagggggcatgacggggcgaaagtgcacgggccttcctgtcccgcgggtagagggtcacgggacggggcggccgagaggcttgaggagggggtttgggcaagcccagccccacccagagggcttaacccctccttgccggaagaggaagccccggccctattgagggggaggggaggtatcccccggggtagaggagtcagctgaggcccttggctcaagcccagactcctccccaacttctccccgacccgcagtgtctagccgggggtccagggaggatcgcatggtaacgggagtttggagactccgtctggctcagaagtttkcaggagcaggtgctcccgacaagagaggatgaggtgtaggggcacggcccactggggccttgggagagtggctctaagggctttgggtcgtcaacactgaagtgggtgattgtaagtctttcagcgccaggggagtggtggggaaggagttaaaatctctctcaaaaaaggggaagatgagctccatgggtgtgagctgaggctgccgtaatggctgcggcctgcctgtcagagccaggctagacagggcttgtgggtcgaggaagcatgggacaggggctggggttgtccagggacctggccccagtcccaaagctgaggtttcccacaactgtgagttggccagatagtaaccaaagatactgatgagataggtcagcagaggaatgtatccagccggcctaggtacctctacctgtccgtgttgttgccccaccttgcagaagatgggcctcctcgacagttctcagcgtcctagaaggcaggggacgtcacttcattggacctgaggcatgaaggcagatggaaagctcgaggggcgggcatcctgtggttacacaattgaacactggcttcctttcccaaacatgctctgcaaatgacctctgcccttyctcgacccagtgtctcctgtctcctgacctgacagggcaggatcttcaggccaatgctgcggttttggcacagtaattttcggagctaacacccctgggctctgtctgcctaggctctgcccttggggtcagagaccctctggttaaacttggcattgacttaggctcttggattcccagagcaggcacataacacctggactctgacctgactctgcaggcctaggtggcttgggttctaggcgtttaggtctgagaaatgcagctgggcctaggtatctcctcgttccccagggtgttactatagctgtgctctgggacagggatccacaggtacccgggtgggttcggtttctgggtctgcagttgagcctttgacaggagggccccctctagaccagcatcatatccagagagttggagactatagcaggccagaaacagaacccaagagtcccaaattcccctgccagggtcaagagttcctgtgatatacaggaaaagccccccatctccagcccacaaggtcccctttttaatcttaaatttgccacttccgctggcacattctaaaagagcaggcaagctaaattcccttctttagagaggcttcccaaggaaaaccaccccatgtgggctgcagttggaattccagtgtcccggtcactccagtgttttcagatcctctggggctaccacactggcattgctgcccaccccgtgtataatcacagttgagtgtcttccagaaagaaacgaagagttgggacccctgggctctgttcccatgcctaccactgaatttctgaattacctgtgcctgttcatttggcctctgtttgtctcagatctttcgccattgggttttttctactcaccctatgaggtctggctgtaaatagaaattgagtttagtgtgtctagctgctcagcaggttaatgtgagctggaaagaaattatatacactgcttctaagaacctgaaacatcagccgggcatggtggctcacgcctgtaatcccagcaattgggaggccaaagtgggggtttcacctgaggctaggagttcgagaccagcctggccaacatggtgaaaccccatctctactaaaaatacaaaaattagccaggcatggtggtggccacctgtaatcccagctacttgggaggctgaggcaagagaattgcttgaacccaggaggcggaggctgcagtgagttaagatcgtgccgccactgcactccagcctgggcaacaagagcgaaactccgtctcaaaaaaaaaaaaggaacctaaaacatcctttgagttctgaaaaagttgtgatgctagaaaagtgggagatgttttgtcctaggaaacaacagggtcattttcaaatatttaaaagtgtcaaagactgtcctatggaataactagtcttggagtgcccaaggggacttaggaacaatgggtggacattctaggaatgatagatttttttttcttttttttcttttttcttttttttttttgagacagagtgttgctctatcacccaggctgggagtgcagtggtacagtctcggctcactgcaacctccgcctcccaggctcaagcaattctcctgcctcagtctcccgagtagctgggattacaggcatacaccaccatgcctggctaatttttgtatttttagtagagatggggtttcgtcatgttggccaggctggtctcgaacccctgacctcaggtgatctgcctgcctcagcctcccaaagtgctgggattacaggtatgagccaccatgtccggccggattgttaactcaatataaagaactttctgatagttggaactgacccaagaggggatggggcagaagggactgaagtctgagacaagaggttgggctgcatgacttcaggttacttccaaccttaaatgaggagcctatgagacagggaggcattagcagggaaattaagtcataatctgattccaccttagctccgattcacagctgaacaagacctactggtgccggggagcctggctccttgaaggtcctcccagcatccccctctgccaaggtcacattctgccaggctgggcttctcatttacttggtagcctgtggatcttctagttgccaaagagc

SEQ ID NO: 95528 - DNA, 15862 bp, Homo sapiens
cacaaaaaaagaaatcttccctggtttaccttctttgaactgttcccaaatcaaatcatgtggacccggtgatcttttcttctgccatatttctcatgaacttactcttcttttgtatttgtattaattttccttggatacctggtctcttcaaccagactatgtttcaagaaagcagaaatatagccttctttggcctccctgcagtgtgcactaaacaataaatggttgacatcattcagaatacaaaggtaattagcttattcagcagataaggcacaacaaatatcctaaaatctggcaattgcttatgacctgatcctcttccccaactgggtaccgagcacaggaaatgccatcaaatctacagtttagcatggaagacaaacagatgtaaacttgtcatcttgacttatgatcatggtagaggtctgcatggaccactgtgagagatagagaggggagcaccacttcagccttcgagaattaggatgccttctcaaagcagctgaccttgggtacagtcttgaggtttagacgtttgtggggcaggggagggtatttaggaagtcccactaggcagagggaacggtgtatgaaagtttcatctgactacatatgagagtcgtacgtagaaagtcatgcacatagtacatgatgtgttcttttttatagtgtctaccttataaaacctgggttaggtgctgggactagaggatgaacaaggcaagatgctgctcatatggaatgcagcaagtctgaggaatgggaagcagctcttcatggctgcagcgtgagagctctgtggggcaaggcaggagacaacactggagaagtaggcaggaggccagattttgaaggcttgaaataatggcagttttataggcagtagaaaggagaggatggagtgaatggattcaatagatatttaggaagcagaggcagtagaaccaatttgatgtaagagtgaccaatttgatgtgagagtaagttagaagagtgaatgatgatccttagattgctaggaaagagggcccagcgggtcagctgtgttagtgtgtggagactagggctagtgacacctccgggtcagctctgtgcccaggaagcacttcaacctgtgtggcaggagggatagcaataggaagcacttcaattccccacaactcagacacccagacgggagggcagaggaccaaggctgaaaggagtagagagcctgagagagagatgagactgaggggagctagtggtgactcaggctaaccagtcagcgggagagacctagaccggggggcagagaaggcgggagaactggagagaggacctagcctaggaggagagggagcaggctgagaaggaaatgctctgggtaggagagacagactccaaggaaaaatccaacaagtagaggaggatttgggattggaaaagctgaggtccagctgggagagctgaagagggatagaacagaagaggttgagccatggggtttcaagtacgcggaaaggagcaaagatgttaggaaagggtcgaaagggcacatcccggagtcccaggtagcaggacgaggatggcaggggaagagccaaggaaatgaagcggagatgttgagtggctcccgccttgcctggccttacctgtgcgcagccagttagcagccgcagccacaagcacagctacttcaggactgaggccagcaagcttttcctataaatggccatataataagtatttttggctttttgggccatatggtctctgtctcaactactcaattctgcctttgtagttcaagagcagccatagatgatacagccattaatgggtctggctgtgttccaataaaactttatttacaaaaatagttggcaggctagatttgacctgtaggccacaatttgctagccttccctctccctgctctagaatagtaaatacaggagtaggaacagacttttgatagggtgttccctatcagggcacagggaaaatggtgaactcagcttcatacatactaagttgacagattgactgtggaaccttctggtagattcttcacaggcagttagcctttgagtctgcagactgggaaaaagactgggaaaaagttgagagagggatggaagagtcattcatgtggaagggaagtttgaagtagatgtttttgtgatgctcccaaggcaaggccaccctgggaatgaattagagtaaatttagggccaaggacttaacccagaggatccagcagttaaggaaggacctgtgaatagagaagaaataaccagaaaggtgtggggcctgcctttaaaggagagagactcatgtcctggaagctaagaaaaggaagtttctaaaagaacaatgtggtcatcaatatcaaataggtcaggtaaaacaagagctgaaatatatgcattgcatttgaaagtaaggctgccattggtgaaccaaatgacaagaatttaggtggaatgacaggggagaagcctgagtgtagtgggctggggagtcaatagatggtgagagttataaacaagaagtataggctctttttttctttcttttttctttctttcctttctttctagaaaaggcagtagctaaaaggggatttaaggtaagaagaagggttttgttttgttttgtttaggtttgtttttaaaatactgctgtttttgttggagaggcttaagaatataaacatgttcagagaaaggcactaatggagaagttgaagatagagaattgagataataggtggaacagcattttggaggagatggctgggagttacctggaagcccaggagttcactagacctgaacagcagctattttttcttctttgcccttagactgaacaagagacccttctgctgagtacagcctgtcctcccacccaggaacaccctctgcctaatgacaggaccttcctgggaagcatcttgacagcagtggcagatgaaggttaaaggccctgggatttgggggtgggaaagttgtgacgctgctcctgatatcttctgctgttgaagatgtccaccagcggrcttgtctatcttaccctggcttccattatggtagacccctgcctggatcatcagaggggccctctcccattattggtttttctcttagagccagaatcaactcctgtgcccttgcttggaagtgacaagagtgctttcacccgagtagcatcaatggtttcccttcagcccgcaggttaggaggggctccagggatcctgcctcatttctagaaaatctggtggtgatgagtaaagacgaaagcagtgagaagtgctttgctctaaaaacctcaattctacttgggctcattttatttctgccttctgggatctgtaatgttccagacattcaaatcctgtgggtggggaacacggataagagttgtggaaatgatggctatacactccttccttccagggctggaaggctagacctctatctgggactttctctttcagagaccccaggcatggaggagagcctggcagaaatgagtattatgactactgagcttcagagtctttgttccctgctacaagagtctaaagaagaagccatcaggactctgcagcgaaaaatgtgagtgggatgcagttttggtgacagagggacagtgagacatcctcttatgccaagggtccaactgatccctgagaggacaggaatgttgctaaattcttccttccttcagttgtgagctgcaagctaggctgcaggcccaggaagaacagcatcaggaagtccagaaggcaaaagaagcagacatagagaagctgaaccaggccttgtgcttgcgctacaaggtgaaggagggacctagaagtggggcgatgaagaactggggcagctctactggcccactgggagccattatctctccaggaatctgggtggtggggattttccaaccactgccctagttttgcccttcctggggtcagacatttcacatgtcagctatgggctgacctgtcttcccaggctgactcaggagagaagtcaggaactctagcagagctctcccaacactgaaatgtgccttgcctggcttggccctggggaaagaattggcgtgatatcaattggtcccatgtgggctaagcatgggtcaggcactctctcctacctcctggcaagggctgtgaagagaccagctcttcatgtgtcttctcacctccctttccctcacagaatgaaaaggagctccaggaagtgatacagcagcagaatgagaagatcctagaacagatagacaagagtggcgagctcatagtatgttcaccatcatgcccaggcctttgccttctgtgttactggtcagccaggatcccaagtatgagaaatggtttgcttttgttcaccacatgttgtctatccttatgtcctattggacacctctccattctcattcccagagccttagagaggaggtgacccaccttacccgctcacttcggcgtgcggagacagagaccaaagtgctccaggaggccctggcaggccagctggactccaactgccagcctatggccaccaattggatccaggagaaagtgtggctctctcaggaggtgactcagagttaacagaggagctggacagcaggtggggaccccaggctgtacccctgttgatctggacatatttctaggtggacaaactgagagtgatgttcctggagatgaaaaatgagaaggaaaaactcatgatcaagttccagagccatgtaagaatgtccatgccattccagggccatttcctaccatcgttaacaaatgcccygccatgtttcccctgtcctaccaagtttgctcttttatgcataggacttataaaatctgtttgctttctagagaaatatcctagaggagaaccttcggcgctctgacaaggagttagaaaaactagatgacattgttcagcatatttataaggtataggcaggagggaggtgatatcactaatgaacctggtacaaggcctggccccaggaggtactaatgagcacagatctggttcccagcctgtgctgagagctgggcctgaatcactattgcaggcttctctgtggtgtctgttttctcccctctaattcagcggctgcctcctggggctgggagccctgggccttaagtctgtggtcctgagctgcgttttctgcctctcttcccagaccctgctctctattccagaggtggtgaggggatgcaaagaactacagggattgctggaatttctgagctaagaaactgaaagccagaatctgcttcacctctttttacctgcaatacccccttaccccaataccaagaccaactggcatagagccaactgagataaatgctatttaaataaagtgtatttaatgaatttctccaagcttacggaatcttactttttgggtgagagggggcggatgatgaagtcagggaagaagcagcttgggcctcctgcctgggcaccctccatagatccctctccacctcctgctgcatccaaagccaaggctgcctgcccttcctcccttcctctgctttcaccaaaactctgggcactggactgcttgttccctggctcaccgcctggaggaaacagaaaggcttcattctcttactttccccagccccctcgggggtataccctggcaaatatgggggtgaggacagagaagctcagttcattacttcctgccctgaacttgggcaccttgaagatgcttctgccccacctactcaacctgttgttactgttctggtgcctcctcttcaccagactaagcttaatccccagcatccagcaagtgcccggcacgtggtaaagggattgtggcagaaatgaacgcaaggtcatggccaggctccccgaggtgggagggcagtccctaacagccacggatgcctggcggggcgctcactccacctcgccgccccgcctctgagggcgtggtcttgccccggacaccagtcctggggagggggtgtggtcagggcggggcatgcaggccacgcccccggaggagtcacgtagctctgcgacatccgcagcctcatttaccagagggagccagggctgcagcctcatctgtttgcggatcagaacccgagctgtgcttgtggctgcggctgctaactggctgcgcacaggtaaggccaggcaaggcgggasccactcaacatctccgcttcatttccttggctcttcccctgccatcctcgtcctgctacctgggactccgggatgtgccctttcgaccctttcctaacatctttgctcctttccgcgtacttgaaaccccatggctcaacctcttctgttctatccctcttcagctctcccagctggacctcagcttttccaatcccaaatcctcctctacttgttggatttttccttggagtctgtctctcctacccagagcatttccttctcagcctgctccctctcctcctaggctaggtcctctctccagttctcccgccttctctgccccccggtctaggtctctcccgctgactggttagcctgcatcaccactagctcccctcagtctcatctctctctcaggctctctactcctttcagccttggtcctctgccctcccgtctgggtgtctgagttgtggggaattgaagtgcttcctattgctatcctcctgccaaacaggtgaagtgcttcctgggcacagagatgacccggaggtgtcactagccctagtctccacacactaacacagctgacccgctgggccctctttcctacatcactgcagccccactggggccaacctctggtactgggtgggaataggcaataggcataggcaggcaggtttggagtacaraaaaggagaagctgcaggagcctgtgactggtatttgtgccactcctactccctacctgttcttccaaccttttcctctagaagctgagagaagagggtggcaataagtacttttgcctcattctgaagccttggaagtaagtacactttccctaggggtcctgtggaggatgagaaaagggaagctggaaaggccaggacttttgcctacctcaacaagggaccaagttcagtgaaagaagggttggcatccttgattgggcagcagatttatcagaagagctgtggcttcagggctgctcacctccccacccccaccctgcatctttccccagggctggraaggatgcctaccagggacaaaaggagatgtgggaactggagccctaagcttgctagctgtcagaaggactggtgccacttgatgcccaggactcatgccaaggactgctgccctgttcccagccccttgcttgatggggaggccatttggcccatctggccaggagaggcagcagagggtgaggtctggcttttttatcttgtctccactccagggagctgtcaccatgcctcactcgtacccagccctttctgctgagcagaagaaggagttgtctgacattgccctgcggattgtagccccgggcaaaggcattctggctgcggatgagtctgtaggtaagtggacatctgtagccaggtagggtacaggtggctaggggaccctggggatgttctcactgcctctctttgtttgcccctaggcagcatggccaagcggctgagccaaattggggtggaaaacacagaggagaaccgccggctgtaccgccaggtcctgttcagtgctgatgaccgtgtgaaaaagtgcattggaggcgtcattttcttccatgagaccctctaccagaaagatgataatggtgttcccttcgtccgaaccatccaggataagggcatcgtcgtgggcatcaaggtgcagcccctggccctgctctgaatggaagctgggtgtgaaaataagcttgtgtaggaggggtagcaaggagaatcctgcctggattcaaccctctgcttgtacttcctctacaggttgacaagggtgtggtgsctctagctgggactgatggagaaaccaccactcaaggtataggatgggtgggcttgaggaccaaagaggtgttagatagtygatgctggtaaaagaggggcagagtaatgaggttggcactgtgcttgcagggctggatgggctctcagaacgctgtgcccaatacaagaaggatggtgctgactttgccaagtggcgctgtgtgctgaaaatcagtgagcgtacaccctctgcacttgccattctggagaacgccaacgtgctggcccgttatgccagtatctgccagcaggtgtgtgtgttgggagggtggtgagctaggtgccctgtatgcctggtggggagagagtcacaaggctttcttcatctcccctactgcccctcccaagcatctctgctcttgcctgcagaatggcattgtgcctattgtggaacctgaaatattgcctgatggagaccacgacctcaaacgttgtcagtatgttacagagaaggtgagtccacacctgggcacacaaacatactgcagggacagctcggcaggagtgtctgttccccagaacccccagcttagatccaggcacactttcccctagcactttttcacttcatcccggcacaggcctgtgatctgagcctgtactgagccctcacagtctgtgcccatctacccctacatagggagcatcgagcagtaaccagtgggggcccagacccttagtaaacctcctctaatccccacccaggtcttggctgctgtgtacaaggccctgagtgaccatcatgtatacctggaggggaccctgctcaarcccaacatggtgaccccgggccatgcctgtcccatcaagtataccccagaggagattgccatggcaactgtcactgccctgcgtcgcactgtgcccccagctgtcccaggtactacccagctccctaacctgctcctatccctaaggcccatcttcaggtccttcttgtggccttcaggggttccctatcctggaaaaattgggagtgaccagtcagtttgtcttctctcctccacactaggagtgaccttcctgtctgggggtcagagcgaagaagaggcatcattcaacctcaatgccatcaaccgctgcccccttccccgaccctgggcgcttaccttctcctatgggcgtgccctgcaagcctctgcactcaatgcctggcgagggcaacgggacaatgctggggctgccactgaggagttcatcaagcgggctgaggttgggagctacaggtggtggtgggtgggggcagcacccagaggctatagcctgggcagggcttggcacctgtgggctggctcagcctgcttactccacgctcccttttgcaggtgaatgggcttgcagcccagggcaagtatgaaggcagtggagaagatggtggagcagcagcacagtcactctacattgccaaccatgcctactgagtatccactccataccacagcccttggcccagccatctgcacccacttttgcttgtagtcatggccagggccaaatagctatgcagagcagagatgccttcacctggcaccaacttgtcttcctttctctcttcccttcccctctctcattgctgcacctgggaccataggatgggaggatagggagcccctcatgactgagggcagaagaaattgctagaagtcagaacaggatggctgggtctccccctacctcttccagctcccacaattttcccatgatgaggtagcttctccctgggctctccttcttgcctgccctgtctcctgggatcagagggtagtacagaagccctgactcatgccttgagtacataccatacagcaaataaatggtagcaaaacattctactttgcctgtctgttttacacatcaaattcccacctcccagtttctgatctctgctaattctatctctgggccctctgactctggaggtggagagggtgggatttgagtcttactgggcttcaagttatggaggaagggcacatgcagtcaccatccccagctcaggctcttgctctcttgatgtccaagtctggagtggggcaatgaggaagactgcaagtcttctagggactgccacatcagtggcactgggctgcagctacagaagtatggagtgaggccaaactggcaactcctgaaggcagatttgtgcaaggctcaaagcagggaggcagcaagacaggctgggataagagtgggtgggagtctctcccatctcgcagtgttaagcccagctgggacctggtaccttccactagggtgagccacaccagtaagggcaagcgagcacctggactcccgcccaaagaggaaaaccaaggctctgcgggctgccagggctgagcagggcatctaggaggttgccaagggctatggcccattttcatttggggtagaagtgggcacaaagggagccaattggagggtctgggtaaggacagctctggtgaggcctgatgctgaactttraccactgggctgggttgtgaggtaggctgagaacctgggtctaagcagataaaaagaagagataacaagctgcgtgtgttctgtgtcaactggggaggctacaaatgctccaccctgtgtggcctgactttataataacaaaaatagcttgcacatagcaccaaccctgttctaatcactttatatgtactgacacatttcatacaactctataaagtaggtactattactatcatccctattttaatagagaaaacaggcacagataggcacagaacgatcttctcacgatcactcacctaataagtgatgaagccaggatttgaaccgcagtgatcagcatctagagtctgggctcatgacttttcaagatttttaagtgaagtattctgagttttccaagttggaaatgaattaaaacgtattttaaaatagcgagagagccaattgtgctaaaacatactagcttgctacctccgtgtttgaggctttgaggagagggcaccctaagaggagttctacgataaggataataagaccgtgacagttgacgttgagggctttccgtgtgccaggctccttacaagaacggcctcatttatgtaaatatctccattttcagatgagcctcggagctgcctgtagttgcccagctagtatttaaggactgcagaggttgcgctcttgattgcggggctagaagtgtgttctacagggaagcggggaacttcgttccagcagcgccgaaacccgcacggcccctaggctgtccctccgcgcccgggtgacttcctttcagatccccagcgaagctcccagcggagccctcccacccctcgcccgcttgctcccgtctgcgggtctggagtagcgctcgcgattggccccgatcaccgccgcggtcctgccccctcgttgcagagattccgattgggtgaggctcacgaagctctgcccccacggtggccggagcagccggaagctagcatggcggccgccggggctgcggctacacacctaggtgcggtgggcttcgggtggggggcctgcagctagctgatggcaagggaggaatagcaggggtggggattgtggtgtgcgagaggtcccgcggacggggggctcgggggtctcttcagacgagattcccttcaggcttgggccgggtcccttcgcacggagatcccaatgaacgcgggcccctggaggccggtggttggggcttctccgcgtcggggatggggccggtaccctagcccgtttccagcgcctcagtcggttccccatgccctcagaggtggcccggggcaagcgcgccgccctcttcttcgctgcggtggccatcgtgctggggctaccgctctggtggaagaccacggagacctaccgggcctcgttgccttactcccagatcagtggcctgaatgcccttcaggtgagactgctgtgcgggagggtcgggggacagcccccccggcaaggtggagactcagtgacggccctgatgctccttcctgtagctccgcctcatggtgcctgtcactgtcgtgtttacgcgggagtcagtgcccctggacgaccaggagaagctgcccttcaccgttgtgcatgaaagagagattcctctgaaatgtgagttactggggatcagggctgcttttcgcctctgagctcagttcagagctgagttgggtgggaggagcgggggtgtaccataaacgcagttaaaaacttactgttgaaagacctctgaatgaacagtgtgtttggtcagaaaaaaactactttcaaattcacagtcactaaatagcaattttactcgtaagacaggctacctaatcggaagcagttgatgcccatcagggtataggggaagaggtgggatatagtggaaagaacacagagtttgaaattaaattggatttgcatataggccctatttagtttgtttgtttatttatttattatattttgagacggagcttcgctctgtcgcccaggctggagtgcagtggcgccatcttggctcactgcaacctctgcctcctgggttcaagcgattcttctgcaccagccacccgagtagctgggattacaggcgcgcgacactacgcccagctaatttttgtatttttagtagagacggggttatgccatgttggccatgctgctctcgaactcctgacttcaggtgatccgcatgcctcagcctcccaaagtgttgggattacaggcgtgagccaccgcgcccagcccctattcagtttaacattaaacactttactggggtacttttttttaggtaccaagaatttaggaatgaataagaaattgataatggtttcaagatgttcataggtaggggagaaagataaaataaattacagtagaagtatacaagaaacagagattgcacttagtaaagagtattaaccatctgggaggaaagaaaggcagagaaagttttgagagatgtaattcttaagtcggatttttaaaggatgtgtaggaattcaggttaagtgggaaaaggagggagagaatttcaggcaaagttaatagcatgagacagtataaggatagctgatagttgttgctcgctgtgtgccagaaactaggtgaagcattttatatgtgttgcctcatttaatcctttctaatgatatgatccccattttataaatgaagaaactgagccttagagaatttaacttgtgcaaggtcacacagctagtaagagatggaactgggatttaaatccaggcctgactgattccagtgttcaagcttttaaccaacaaactatactcctgtgtgaaagtgtggcggggtgaatcagcatattgggggacctatgagcagttttgccttactggaatgtgtagtgaaagactgggaatgactggagatttgggctgagtctagagcatgaggcatctgtgtgccatttacttttttagttctttagccttggtgaaaacttttcttttcttttttttttttttttttgagaaagggtctctctttgttgcccaggctggagtatggtggcacgatcagggcccactgcagccttgacctattgggctcaagcgatcctcccatctcagcccacctgccttaatagctgggactacagccgcacaccatcacacccagctgatttgttttggtatttttagtagagatagggtttcgccatgttgcccaggctggtctcgagctcctgggctcaagtgatcagcctcccaaagtgctgggattacaagtgtgagccaccgcacccggctggttaaaacatttttttaaaaaaatgatatttcgtatggttcagcctctgtacacacacaaacttctggttttctttcttttttttttttttttttgagatggagtttcgctcttgttgcccaggctggagcgcaatggcacgattttggctcactgcaacctctgcctcctgggttcaaacgattcttctggctcagcctctgaagtagctgggattacaggcgcctgccaccacgcccagctaattttttgcatttttagtagatacggggtttcaccatgttggctaggctggtctcaaactcctgacctccagtgatccaccagcctcggcctcccaaagtgctgggattacaggcgtgagccaccatgcccagccaaacttcttgttttctaaacaaaaattggactatccctcacaagttagtttgaaatttgattgttttcagtttatcatggatttcttcatatttgataacacagtgttcagtaatatgggtatactgtaaacgtatagtataggcaacacgtataaagggtgaccaagagtatagaatctgggatcagagagctggaattcaagccttattctgccacttatttgtgtaaatttgagtaaggttgttaacttctctaaaccttggtttcctcatctgttagacggaaatagtaatagcgttgttcatttattcaacaagtatttactttgtagctatgtcagatacagttctagttactagagatatagcagtgaacaaaacagacaagaagaagacaataaaaaagacaaagctggatgtggtagctcacacctgtaatcccagcactttgggaggccgaggcaggcagatcacttgagatcaggagtttgagaccagcccggctaacatggtgaaaccccatctctactaaaaatacaaaaattagccgggcgtggtggcgggcgcctgtaatcccagctacttgggaggctgaggcaggagaatcgcttgaacctgtgaggtggaagttgcagtgagccaagatcccaccactgcactccagcctgggtgacaaagactccatctcaaaaaaaaaaagaaaaaaagacaagtaagtcaaatgtatgttagatggtgacagaagaaaaatagagcaggacaggaggagagggaattttcttgaggaatgggaggggattgcagttttagatagggtggacaagggaggtctcattgaaaagaggacattcgagtaaatacctaaaaggcgagggaatagactgtgcagatatctgggggaagagcatcttggcagagggaaaagcatgtctaaggtcccgagttaagagcaagtgttgtacctttcaggagcagtgagaatctccttgtggcttcactggagtgaatgaggaagagagaaagaggaaatgaaataaaaccagaacagtagaagggggctgaatcacttagggcctggtagatcactgtgagaatttgcattctaggcttttattctagataagaagggaagccattgaaggttttttgtttctttttttaaacatgactaccattgtcacacctaactaagttagcagtgattccttaatatcacctaattctcagtctgtatttagatctctccagttatctccaaggtatcctttcacagatggtttattccatcaggatcaataagttgcatttgtctttttgtcacttttattttatgtcagctccccccaccctacccccatacatttctttcacaccattgatttgttggagaaaccaggtcatttgttttatagaacatctcacatttgggatttggcgagtagcttcctcacagtttaatttaactcattcctctagcatccatattccttataaactgggagttagatctagtggtttgattaaagccaggttcaattttttggatgagaatacattgtaggtggtgcagtgtacttcctattgtgttgtatcctgaagcacttaatggctagttgttccattttgggtgatgcaaagattatgtagtgagttcaggtattgtcagcctgatctctatattttagagtttctcatca

SEQ ID NO: 95529 - DNA, 67597 bp, Homo sapiens
aattgcaaaagacaagacatgtgaaggaaatatagcagactacctttaggacctttggattgtaaagtatttcttttttctttttttatttttggagacaaggtcttgctctgtcacataggctagagtgcagtagcgcaatcatggctcagtgtagcttcaaccacccaagctcaagcgatcctcccacctcagcctccagagcagctgagactacagtcatgtgccaccacacctagctaatttttgtactttttgtagagatggggtcttgccatgctgcccaggctggtcttgaactcctgggctcaagcaatccccctgcttcggcctcccagagtgttgggattacaggcatcagctactgcgccaggtgggatgtacttctcaagacacaaaaatcactaattataaacaaaagataaatactgttggcctgtgaacggtggctcaagcctgaaattccaggattttgggaggccaaggtgagaggatcgcttgagccctcaagtttgagaccagcctgggcaacatggtgagactgcgtctctacaaaacgattaaaaaaaaaacttagctgcatgtagtggtgtgcacctgtagtctcagctactaggaaggcagaagtgagaggactgttggagcccacgagttcaaggctgcagtgagctgtaattgcgactctgcattccagtctaggtgacaaagtgaagccttgcctcaaaaaaagaaaagattaatatgttttaactacactaaaattaagaactctgtgcatcaaaggactccttcaaaaaagcaagcaaagacatgtcacaaactggaagaaagtattagcaacacatgtaaattaaaaggattagaagaatccagaatatataaggaactcctaaagtaatcaactagaaaaagatacactatagagggaaaatgggcaaaaagcatggataggcattttattttattttaaattttttttgtttttacataaacaacactttttttgttgatgtgttcatcaatagacacaggttgtttgcatatcttagctattgtgaataatgctacagatatctttacaagatattgatttcatttcccttgggtttatgctcacagagaaattgctgaatcatatggtagttctacttttaatttcttgaggaacttctattttcacaaaaataaagtatatccatacaacgaagtattgttcagccatgaaactgtaccaatttacaaatattgccaccaacagtttacaagggtttcattttccctatacccttgccaacatttgttatttgtcttcttgataagtcatccaatatattaatactacatttatatagactctttcatcatataaagtagtatcaagatactagaattcctttgatcttcaaaatatccctgaaggtatattgaagatggtagggaaggtattatcaatgtcaatctcatcttgtacacaagaaaattgaaacttgcccatgataggcaaaaaagaggcagatctatatataattcaaactcttaatgaatcactacaaactatccatattaaacaaaatatatatctgtattatatacaatacatacaactctatattaacatagttgactaagcatatattggaacagtttctaaataagtaatgatatttaaatacttaggctattaaaagtcctcaaaattcataaatagttaaactacagtagctctggcaagcatgtgttggtatattttggggtaatggtcaatgcaggggctgactctaggctacatttatctcctgaccacttagaattcagagcagaattcagaaggtcatcctcagatttttctacaccagtcaggcacaccaaggagccaaacaagtaatttaagaccttcattaattagcatcttgcattttggtaaacgtcactctttctgagaattccattgaatagagcagagtgtcaatttaacgaagccacagtcatgttctattttttttttcttttaggcagggtcttgccctgttgtctaggctggagtgcagtgatgcaatcacaacttactgcagcctcgagctccagagctcaagtgatcctctcgcctcagtctgtaggactacaggcacacgccactacccccagctaattttttgtagagatggggttttgccatgttgcccaagctggtcacaaactcctgagctcacgcgatcctcccgccttggccttccaaagtgctgggattacagagccaccgtacctgtcccacagtcattttcttaaggataaattgtttcatcttattttgtcccacatttatagaaagtaacatagacaaccatcttagaaatatcaacaattgagcaagcactctaagaatggctaataaacatgtagaaacatgctcaactttattaataatcagggaaattcaaattaagattataacatcattttataattactaaattgggggaaaattttaaatctgacaatatcaaatgagaaacaataaacatacagcagctaggcatgtagtttgtacaatcacattggaaaacaatctcgtattatctagagtaaacttgaagataaacataacccctgtttcaacaattcaacttttaggtatttatcctaagcctactaatcaaagtgtagttggctaaccaatagcatttgtatcacctggagcttgttagaaatgcagaatggcaggtttacccacatttactgaattagaatctgcttgttaacaagatccccggttgctatgaatgctcattaatgtctgagaagcgctgtgctaaagaaaccctagaacatgcaccaggagaaatgatcaagaatgttcataacagcactgacggtaatagcaaataactagaaatagcacaaatatccactcagtagagaatggataaataaatcatgtcagaaaaactagttgcagaaagatacatacagtttaataccatttttatgagactcaaaaacaagcaaaagtaaataatatgttactaggcatccatccatatatgtatatgtggtcaattctaaaataaaggaatgaaaaacacaattcaagataacgcttatgaaggggagaggtaaaggaaggagcagacagtgatcttcactaacgggaaagattctatttcttttttttttagtttaaaatgtattttatttttagacaacctacataatgtgtttttccataggttctatttcttaaagttgagtgataggttcaagggtttttgttatattatcatgtgacatatgtatttgttttgtattgttttgagatggaatcttgctctattgcccaggctggagtgcaatggcacaatcttggctcaccacaactttcgcctcccagatttaagcaattctcctgcctcagcctcccgagtatctgggactacaggcgcatgccaccatgcctggctaatttttgtatttttagtagagatggggtttcactatgttggccaggctggtctcgaactgctgacctcgtgatctacccgccttcgcctcccaatgtgctgggattacaggcatgagccaccacgtccagacttatgtatttgtttttattcatatgttcattattctctcatataacacagttttaacagctttattatggtgtactttacataccataaaattcacctgtcttaagtgtataattcaaagatttttagtaaatgtacagaattatgcaatcattgccacaaagtggcaacagaaaattttcatcaccacaaaaaaaatctctcttgcctctgcaatcactgccccttccacctctagccccaggcgaatttgttttctaatgctaaccttattaattaataatactaatataatcttattatataactaatataactaaaactaatctgtttttcatctctataaatcaacattttctggacatttaatttaaatggaataatgtaatatgtgatcttttgtgcttgtattcttttacttagcataatatttttttgacattcatccatgtcatagcaattatcgctaattcagtcatttttaaggatgaataatatttcagaatatggatgtaccacattttgtttattcacctgttaatggacatctgggctgtttctagattttggctgttatgctgttatgattattcctattcaagtctttgtgtgaacactgttgtcatttctcttatgtagctatccaggagtggaattggtgggtcataactggccatttttaaatctaaaaaaagagaagaaatggggtctttgtttctttcaaactcgaataaaagaattaactagggaatagatggtgtatttctttccagatgctggaatgaaagataaggacacatattatactgaatatagaagcaagaatccattgacataagaagacggtaaaggaaaataaactagttatcttctgaggagcaggtacagttaaaaacgaaattaggacaaagaaagttgtatagcagcagcttggaagggagatgattcacttcaaaggtacaactgccactgctttttatacaaacacatgcttgtgggattatcaaatatattaataatgtctataaacatttttaaggaaatgtaaaaacttgaaattcttttgactactctagattttctgagaaagatagctatttaggccggacccagtggctcatgcctgtaatcctaggactttgggaggctgaaatgggaagatcgcagtttgagaccaggactttgagaccagcctgggcaacatagagagatcccatcttgaacttctgagctcaagccatttgcctgcctcagcctcccaaagtgctggaattatgggcaggagccaccacgcctggcccaagagaccctatctctaccaaacaaacaaacaaacaaacaaaaaagataataagatttattgtttgcattgattttttgtgtgtagatgtgtaatacataaaatggcaaatgagggggaaaagtgtttgggtcatattaaacaatgaagttgtgaaatacctgagattttgtttcataaccactaatcttcaatgttgagcatttaaaatgtatttgttccagttttttttctctgtaattccttagacatctgtgcagattttcattcccacgtaagaagcaataacagactaatgtcatcctggacatttccaggaattggtttcctagctgctctgaggaagattgccttttaaaagaaagctctgatctgttctttaccagttccacttgacctgaatttgacatttctttaagagacaactaaatcaagatcatgtgtctgtgacatgtattgcatatgctagttagctgcatctgatagcagtctgtaaaaagaaagatgataacatgtttattttagacattaggtaatgttcatctttcatgaaaaaaattgattagccaattttggtaatcaaaaacataaatgggagtaaaaaaggcagtcattgggaagtactgctgtatggacttgtgaaacaactagttgtccagagccttgctacaacgtatagaaatattctattttctgtatttggggcggttacactacaagatgaagacggggaaatgttttccaactcatccctcaggtcctactgcaacataactttcttgaggtaagtacctttctttgtgtttccttaacactctctattttccccatcacatacactaaaaagattatctttggtgcatctgtatttacacagcagtgttaaatttgggctgccctctgccccgcctccgtcccccaggctcttttcactccccgctgggtcccagatcctagggtttagctcaggctccgccctactccttggttggctgttgggtgggaggctcgtttcttccctccctattggtcgcccagggggaggygcgtttcccatctcctgataggccgcgccgaggagagtctctccagtttgcggcactgttgtcatttccggggtaagatggctgcagtccgtatgctgagaacctggagcaggaatgcggggaagctggtaagcacgtttgggcagatctgaggccgggaaggagtgatttgtccggagtcatccaggagtggtgttttactttctcctccggtgccaggcgtccagggcacgcgtgatggagaggtgaagggatgcatgcaaaataaagggcagagaacggagcgagtcgaccagtctggagtggaaacccrctccctccccttacctggaagcgcttctgcagcgactcagccgtcctgctccatctgtaccccgaggcccagctagcgttttattgagcgccttccaggtgcccaggcattgtgataggcgctgtggatccagagatatattcgtttagcatttattgcgtacccacagtatgccaaacactggtaacacgacccctaccctcaaggaatctacagtgtgtagaggaagaggccgttcaagttatagaatatcagcaggggtccctgcttccgaagaactgagcagctcggcgtcactcttttgccttgtacttctatgtccgcaccacatatcattcctacccttttgtcaccaaggctgtgacccatcaccatctcccctgcacttccttctctttctcccagtcttagcaccaagcactgacacataccggtaatgatacttgttacccctatttgcttagtgtttcttcttcctgcctcttctccctttccctagatgctcctgccttggtgaccccgatcttacaaaaactttcaagagcctgctatgtaccagtgctgtgttaggcactggagatacaaatatgaaatagacatcatatcttccttctcaagagattacaaccttgtggtggaggacaaaggagagggagacagatagaaattacaacccagcatgagaggtactgtgatgggacaagtgcctagaactacaggaacacacaggagtggacacctatggtggacttgggggtcagaggagttcccagaggatactgtatgacttgagatgtaagaaggataagtaagagataaccaggagaagagagctcttctcagcaacacttaacacatattggtctctcttctttctagagctttccattcttgttttctgtgacaccagtttcccaatattattctttcttcatctttggccacttcatcccaatatcctgtttcccttcccgccttttaaatattgctttttctaaagggctctgactttggccctctgcacttttcccactttctgggttatcccatccactctttggctttagttaccatctatgctgatgagtcctaaagttccccagtcttccaaccaggtctactccaaacccatatatcctactgtcctggaaatctccagtttcatatgtaygtgatgttttccagctgcaattaaaaacccaaccaataaataggaaattaagtatccatgcatacagagcatccccaattagatgtcagctcgcattaagtggcttatgattatcaatgtcgtcatttccctagtagttcatttgtccttttcctactgtatacaagagggctgctacgacttcttattttatgttgaaggcaggaaggcggaagaggaggaggttccagtctcactggccagaactgtgttacatggcccctgctagcacaagggagcttagaaaaacttgtcttttttttttttttttttgaaatggagtctctctctgtcacccaggctggagtacagtggtgcgatcttggctcactgcaacccctgcctcccaggttcaagcgattcttttgcctcagcctcccaaatatctgggactacaggcacacgccaccatgcccagctaatttttgtatttttagtagagacgaggtttcaccatgatggccaggctggtctcaaactcctgacctcaagtgatccgcctgccttggcctcccaaagtgctgggattacaggatgagccaccatgcccagcagaaaagcttgtctttagtcttctcacagtgtctgccgtaaagcttcaaagcaggtcagactctccagcctctagaaatgaaccctcaaaccagtttctcttaattttttttttttttttttttttgagaagagtcttgatctgttgcccaggctggagtgcagtggtgcaatctcggcttactgcaacctccacctcctgggttcaagtgattttcctgcctcagcctcccaagtagctggcactacaggcgcgaaccaccatgcctggctaatttttgtatttttagtagagacggggttttgccatgttggccaggctggtcttgaattcctgacctcaggtgatcctcctgccttggcctcccaaagtgctgggattacaggcgtaagccactgcccctggcccagtttctcttgatttgagcctgtaattctctctgaagaaatctagtcatgatttttccaccctgccctcaactggaggtgtcttggcccttcttaactggattatatgcctccagtggtcttgtagtttttccaacccattctccatagtgtagccagagtgatcttataaagtaagagacatttgataatatcattttcttgtttaaaactgccttcagcaaaatgtccaaaattcaaatgactatgaggcaatttatgatctggacctttccagtctcttagatctcattccttaccaaaacctacccatcccaaccccaactctgacacttccccacccttattccacactaaactacactagaagtctgttgaacaacttgagttatttgcacacacactgtgctttctstctcaactccagacctttgcacatgtatttcctctgctttaaagactcttgccttactccactgtggccttatctgcaacatacctcatccccggggttacacctactcatccgtcaggtcttacttcaacataactttctccagctaggttcccttaacacactctatttccttcattatagcacgtgttataatcaccggtttacttgtctttacctttcactgtactgtgcattctataagggaagaaattgcatctgttttgttctctgtataatcccaagtgcctggcacattgtaggtgtgcataaatattttttaaatgactcagtaaaaaaaaaagtcaggtttgtaaactcttgtaaaaagttgtaagcaaaaacagttcttacccccgtagtaaattattaaaatagccttataatgttgtgttttacatttccctaggacataatgcatttgactcttgattaatcatgccatttggaatttttctgttgtgtctgtcttcctgtagtaaagtgtaagcaatttgaattcaggaactatatattgcatcttatttagctttgcatttccaagtccagtacaatgtctgactttaggagtgctcaacagctgcctattgaattattattaaatatttccttaatacgctactttggtgaacagtttcatttccctttatgttcttctgtcctggttgtgatattgaattattaattttttatttttattttttttgagacggcgtctcactctgtcaccaggctggagtgcagtggtgcaatctcagctcactgcaacctccgcctcccgggttcaagcgattctcctgcctcagcctcccaagtaactgggcaggcacgcgccaccatgcccagctaatttttgtatttttaatagagacggggtttcgctgtgttggccaggatggtcttgatctcttgacctcgtgatccacctgcctcagtctcccaaagtgctgggattacaggcatgagccactgcacctggcctaattttttattttatttattattatttttgagacaagttcttgctctgttgcccaggctggagtgtggtggcatgatcttggctcactgcagtcttgacctcctgggctcaagtggtcctccttcctcagcctcccaagtagctgggactacaggcattcaccaccacagccagctaattattttgatttttagtagacaaagtctcaatgcattgcccagtatggtcttgaactcctgggctccagtgatccttctgctttggactcccaaaatgttgggattacaggcatgagtcactgcacctggctgaattatttttaaaatcaaggaaagacctattttagtcaaataattgcattaagacttagactacacgtatagttgttcaaccaggatgtatttgagaatgaaaatggtgttattaataattgccttgaatcactagaggtgaattgggtgtcacctcaggcaaattggtacagatggtccccatagaactaggtgtctttagtattgttcatagatgaatttagaattgcttcaaatataaaatatataaaactgataattccataagcatgcctttttaaaattggaggtttaaagccttatgcttaatttactagtctagctgggtgtggtggctcacacctgtaatcctagcattctgggagactgagacaggaggattgcttcagcccaggagtttaagaccatcctgggcaaaaaagtgagaccctgtctttattttattattattattattatttgagatgggattacaggtgtgagccactgcacccagccaaccctgtctttgaagaaaattaaaaaatataatttactagtctaatagtctgtttctagaaaaaaaatttagaattctagcttgaaaaattatttcttctcctctttcctgttgcctgttaatccatctattcagcaacttcacagtgtttttagccttctcctcagagccattcaattactattatattaatcatatactgcctatggtacttttgttgctttttttctttttctactattaattacctcagtcaggagcctgttgctttgtgtctcaaatactatacagtactctccccttcttatctgtggtctcagttagccatgatctactgtagtctgaaaataggtgagcacagtacagtaagatattttgagagagagaccacattcacaaaacctttattacagtatattattataatttttctattttattatcagttattattattactgtcttactgtgtctgatttataaattaaactttatcataggtatgtatatataggaaaaacacggtatatgtagaatatgtaggattcagtactgtccatggttttaggcacccaccgggggatcttgaacgtgtccactgcacataaggagataagagaggaatacggtaatagttmtttttttaaaaaaatccttttttgataattttggtatgtaatagtttcttgacttctccctttctctccagattttatctgttataatctattcaataaaccactactaatttcctaatcctttttcttcaataacccataatgtatgagttcaaactccttatactgacattatagtcatcaaccatttcctccttgagctgtttccattgctctcttttatacctttggtcaagccaaatcaagccgctcaatgtcccagcagatatgctaagtcaatttctgctgtagtttatttatgctgtttcctctgccttaaaagtgcccttctgctcttttattatgtatgcttattatgcacagtgcagcttaaatcttcctccaagaagccttcccaggtcacactaacgtgaaaaaaaagcccaccagacccctctacttaaactcctttttttttttttttttttttgagatagaattttgctcttgttgcctaggctggagtgcaatgagattacagctatgaaccactgtgcccggcctgcttaaactcctttatcacgtactgcctatgtctcttttttttttttttcgtaaacctatggactatattaaagaagcctatgcctcttattacaaaaagttagagcatgcatgtccatgcttgagtgtgtttgtatgtgtgtttattttctcacatacgttgtaaactctttgaaattagggattatttctcctatttctagggtctttgacatcaaatttatttagcttcagagctcgattgctccacttatttgctgtgtgaccttggacaaattacttcacctttcccatcagtttcccgtgtgttgaagagggctaacgtgtatgttccacagggaaattgtaaatgtaaagatgatgtctgggccgggcaccatggctcatggcctgtaatcctagtactttgagaggccaaggtgggcggattgcctgagctgaggagttcgagagcaccctgggcaacataatgaaaccccgtctctactaaaatacacacaaaaaaagtttagctggacatgatggcacatgcctgtagtcccagctacttgggaggctgaggcacgagaatcgcatgaacctgggaggcggaggttgcagtaagctgagatcgtgccactgcactccagcctgggtgacagagtgaaactccatctcaaaaaaaaaagaaaaaaagatgatgtctaaaaaggctatttttctttttttctttcttttttttttttttttggagacaaggtctctctgtcacctaggctgaagtgcagtggtgtgatcttggctcattgcaacctccgcctcccaggttcaagtgattcttgtgcctcagcctcccaagtagctgggactacgtgtgccaccatgtccagctgatttttgtatttttagtagagagggggtctcgtcatgttgaccaggctggtctcaaactcttgacctcaagcaatccactcacctcagcctcccaaagtgatgggattacaggccagagccaccatgcctggcctgtctgaaaagaaagtactcagcacatgggaggcactcaataaatgttaagcgtggtggtttatgctgccccgacccatgaatagttcaatacgagttgtgttgttgttgaaggtaagaccttctagtagtttaattttctttcaaatgttttacaaatatgaacaattttatttaaattaaggtgaatctatatacttcaaaactttcctttattgtccctaagttttatgtctgatgaaacagaggttgattcactcctttgattttattgttgaccaagagtcaggattatgggagctgaaggagaaagcaaggacaaacaaaatggaaatgtttgggaaagagaattcttttattgtcttctggttttaagttatcaattttaattattttagttaggctttatatttcctgaatattaatgttagtaaaaataaaatgttgatattataaagactagtcgatttagggtgatctctaaagttaagatgaatgatttaagattatttatgttttaggaaagggatcttcagtttttctttgccttcagaaatcagtaatagtttgaaatttaaagtaaaaaaataagaatttaaatgtattgttcttgtcagtaaaccaaacttttacttttatatttgctatcagaaaaaaacaaaaattctagtttataaatatgtattaaaacatgactgtactatatgatgtttattataacatagcctttaaaagttaagagctaatcaccactaatgtacatgatttttttttttaagtaaaagtgactctgttacatacatgaaaaagtttcacttatcagtattcttatactaagaaggttagaaatttctgcagagaagtaagctcagggctttaaaattaaataagtaaataaattctgtagtttatgtttacagtatgatgtagttaagtattaatagcattgaaatttttttttttttgagatggagtcttgctctgtcaccaggctggagtgcagtggctcgatcccggctcactgcaacctctgcctcccgcattcaagcgattctcctgcctcagcctcccaagtagctgggactacaggcgcatgccaccaagcccagctaattcttttgtattgttagtagagacagggtttcaccatatcggccaggctggtctctttaactccctacctcgtgatctgcccaccttggcctcccaaagtgctgggattacaggcgtgagccaccgcgcctggcctaatggcattgaaatattaactttccaaataagatattatggcctggcatggtggctcgcacctgtaattctagcactttgggaggctgaggtgggaggattgcttgagctcaggacttcaagtccagcctgggcaacatactgagaccttgtctctacaaataataaacaaaattaattgggtggggtagcatgcgcctgtggtcccagatacttggaaggctgaggcaggaggaccccttgagcctagaaggtcaaggcttcagtgaactgtgatcgcaccactgcactccagcctgggcaacagagtgagaccatgtctcaaatacacacacacacacacacacacacacacacacacaatacctttcagacacttaggttttgatatatagagttgaatacatttgggcctacttatttctataagagattttaaaataatattatactaaggtactatgtaaaatagttaattctaaagagtcatctataagttactataagtaaactttggggtatcatactatacaagtttttcattgtttttagatgctaactattactttagaattctttagtagttttagttcaggaagtccaatgacttaagcatacctataagctgatgtatttatacagaatacactgttaaaatgtctttactttcagaaggaattttgggtaaggatcataaatgtaacaaatctaaatctaaggatataatatttctattgtgacaatggttctacttttagaatggaattgaaattcaatttatacttagagataagccggtatggttgtttataaatgcttttactttttgttttctcatctgtagatttgtgttcgctattttcaaacatgtggtaatgttcatgttttgaagccaaattatgtgtgtttctttggttatccttcattcaagtatagtcatccacatcacttcctgaaaacaactgctggtaagtatgatttcaaaataacgtgtataaaataatgttttgtacctcattcagtaatattttttagtagttgattgagactttttaaacaaaaaaaagttgactctgtatttctagccgggcccttcccatctccccacatttttccagttctcactttcttttttctcatccctctcttttacatactttccttaacactggcacccctttttaaaaaaaatttttttttagagacaggatctcactcagttgcccagattggagtgcagtggtgtaatcacagctcactataacctgaactcctgggctcaagtgatccttctgcctcagcttctcaaagagctgggattacaggcattaacttatctcgcccagcacttgtgtctttataatattgggaatgggttgtgttgggccatctatttatcatctggctcatctaagtgcaatagtcagcattgatatgactttctcagtcaaggtaaattgttgacttaatagaggtgtctttgtgttggcatacacattgtggtattgtttgttgaaagaagcacttaatctgtcaagtgaacatggtgtgatgaaaccagcctgatttagtactaaatagaaagttccctgactttcaccatttacttactttttccccagctttttctaccctctgtaaagaacttgaaggattaagtattagatttggcaagggcacaagaactgttttttttcctgatgttctatttagaacgctgataaagaaccctagacttttgttacactattaagtttttgacagatacatgggagcttagtttgtgctgggaatgaaaaatgggggaattccaggcagaccccaagtcagcctttccatgctcttttttttttttttttttgagctctgttgctcaggctggagtgcagtggcacaatcatagctcactgtaacctcaaactcatgggctcaaatgatcctcctgcctcaacctcctgagtagctgggactacaggtgtgcatcactacacctggctaatttatttatttatcaggatgttgtcacagtgcccaggctggtctaaaactcctggattcaagagatcctcctgcctctgcctcccgaagggctgggattacaggcatgagccctgcaccggccttccatgccttttcttttgctttcttttttttttttgagacagggtctcacctctcaaagtgatgggattacaggtgtgagccactgttcccagccatcttccatgttttttctatgtcatcctccactatagcctaagacatgtaaactttaccttcactacttttacaaaaatttccattttttaaagttgatctttttttgttacttcccagagaaaatagaggtcattcaagtaaatacttcaacttcctggtccagtctgtaaacacttaggaactttgggttgctggatacaccagttccaggctacttggattcctggtctacaaattactagcagtgtaactttaagcaagtttcaccatctgggaaatgggagtaatcatagtatttagctaattgtattcttgtgagaattcattcattcaacaattaatatttattgatcacctgtgttccaaggcactgctctaggtgcttgggatatatcagtacacaaaacaaagatccttatacttgggtggattaaataaattagaatatataaagtacttacatactctaatactgcttagatatactaatactgcttacatatactaatactgctttctctggatacttattaaggtttctcttcttctgcttctcttttaaacttcagtttttcataggatcccatcctttgccctctcttcttgtactacatctacacacatgccttcaactctcacctcattgaagacttgtgaatctgtagctgtagctcacatctctcaccaactccattccaatgtccccaaaactcagtcttctacaaatctcttttccttctgatatttcctaactcagtaagtcattaagctagactagcctagcttaaccattgatatgagaccctgcctctacaaaaaattttaaaaagtcagctgagcatggtggtccacacctgtagtcccagccactcaggagtctgaggtaggaggatcacctgagccccagagtttgaggctgcagtgagctgtgatcatgccactgccctccagcctgggcaacagagttaggccatgtctaagaagaaaagaaaagaagagaagagaagaaaagagaagaaggaggaggagaaggagaaggaaggaaggggaggggaggggaaataaaagaaagaagaagagaaggaggaggaggaagaggaggaagggacgggactggaagggacgtgatgagacaggacgggaagggaagggatggggaggggaggggagggaagctagaaacctagagccatcaggagggagggaagaatcaaggaaaggaagggaggaaaggaagggaggaaaggaagtgagggaaggaagggaggaaaggaagggaggaaaggaaggagggaaggaagggaggaaaggaagcgagggaggaaggagggaaagaaggaaggagggaaggaaggaaggaaacctagagtcatcttgagggagggagggaggaaggaaagctagaaacctggagtcatcctgactctagtctcacatcaaactgattatcaaaacctattaattttacatcttacatttttcttaaatctgccttcttttcaaatggctttgaaaagtatataaatatataaatcacatacttctgtgctgggcagagtggctcacacctgtaatcccagcactttgggaagctgaggcaggaggcttgcttgaggccaggagttcaagaccagcctgggccacagaaaagtgagacctcacctctataaaaaattttttttaattacttgggtgtggtggtatggacttgtagtcagctgctagtcctagctgaggtgggaggatcacttgagcccaggaacttgaagttatcatgagctgattgtgccactgcactccagcctgggcaacagagtgagaccctgtctctaaaaaaataataaattaataaattctatacttctgcttcttacctgaagtagcctcctgcttcccctgccttgttttgcctctgccacccactccccgaccccatctaccacactcctgccagagaaattttttctaaacttatagacctaaagttgcagatctgatattataaataggattccatatcagttaattactgctgagtaacaaacaatcccacaacttagtggcttaaagcaacaaggactgatcatttctcaggattctgcaggttggctgggtgatttccttgctggttacgcccaggctccctaatatggctgtattcagctagaggatcatatgggctggaaagtccaagatggtctcactcatgtgtctgaccattcatgctgggtttccgatggggcaactcatttctccttttcctgatgtctcatcctccagtagactagatcaacttccttgcatgaggattttagggcagcattccaaaagggagaagggagaagctgtgcggacttttgaggcctagcttcatgaaccttcacacttcacttctgttatattctatttgtcaaagcaagtcacagcccagcacagatttaagaactggtgaaatagactcggcctcctgatgggaacagctgcaaagaatttatgaccatgttaatttaccactgggtcctgatcacctttaggatgaagttcaaatattttagcatggtacacaaagtcttttaagtctgggctgatttcttgccacataccgcatcttcggctatagagaactgttctttaaccttgccatgaaccatcacattttcatgctcttgctgttccttgcatattgctttgtatagaggtgccatagtatattttcttgtttttgtgttacttagattgatttccagttcttcattatgaccctatagtaaccattttttagcaagtggaattacttatggaatcaagaatgttgatttaaaaaaattttttttaaatgcttttgattgttaatgctaaaccattcagaaagttgccaggttatactccaatcagcaagctgtgagaggacccaacttgctagagaggaagtaagaggtacctaatacctccataaccaaaatgtattttgtattttttattactaatttaactcctcatatttaagaaaattttacaaccctaattaatttgttatatgttttataagcaaatatggttaacagcagtctaaagatacaggagcattcctgaataggttcagagccatttgttaacctggaaaagtgggagggtccatacgtgctttcaaatgatcagaaatacttttctcttttgagaataattaccatacagtatcattggcatctaagtattacaaagagggtatagaagctgggtgtggtgggtggtcccagcttcctcaggagatggagggaggaggattgcttgagcccaggagtttgaggctgtagtatgcatttatgcacctgtgaatgtctactgtattccagcctggggaacatagtgagactctgtctccaaaaaaaaaaaggagggatgggtagaaatttgaaaaggggtagaaaatggaaagaggaaagagacgacttagggataaggtggcagaacataagtttggacaaacaagtttccatcaagtttgctagatatagaactgcctgatttttagccattaagaatgagaaagaatagttatataaattcaaaagaaatctgttcatgttattatagtttcataacttaaaacaaggatatctagctgggtctctctttgtatatctttgttctattttctattcattacattgtttcaaaatttaattaatttgttagtagggccttttatagccttataacagaccattttggaagttagaaaatgtaagttctgtggcagtgccagtaagtctgtgttgtaaaataatttatttaaatctctaatggttatgaataatggttatgctcttaaaaattataaaatgctgtttttctgtctgtaagatggaagaatttctgcctctgcctgagaacattctctaattttagatgtgaaagtatatattagtaatatgttatatacttaatgagatcatttctcatttgtctttgaagctctccgtggacaggttgttcagttcaagctctcagacattggagaagggattagagaagtaactgttaaagaatggtaagtgaatctgaaaaaagctcttaagtaaatttaaaaataatttgagtaaaaataactatttttatttttatttatttaatggatagtgggaatccatttaawttgagaaacgtctttataaacacataatgcatttttaaaagcaataaggtagaattaccttgtgttgatgatatagtggtgaaggactttgtcatacatcaaggtactttatttagtgtgatttaaaactgtcaggtagtctaagctctcttcactgttacgaaaatgactttagtaagaatgtaagtatgtttgacttaccattacctgatacagtttacttgtatgtttagaagagatgaaaatattttaccaaaagtcatgaatcaaaaaataaattttgaaacattaaaaaattgtccaaaaaagggcctgaaacagacaaaagcctttcatcctctaccccatttttttctttcaccttctggaaaaatagaaacacctctgggtaccgaactcagttttagaggtttttagaagtggcagttaagatgagtaaatagattacttcccaccttagatttataccattaaagatccttttaagaatctggttcaaccacctgaacattcttttcttgtacttattattattgctttgtaagttagaagagaactgtaataacataaacataccttatggttatgtctctggtggcactgtgggattatggaaagagcaatggacttcaaatcagaaaagtctgacctggaaacttattagctgtcctacctgtgactcacttggtctcttaatgtgtcatatgaggataatagtacttgctctgccaacctctggagtgatgaaaggatcaaaataatgtcatgtataagaaatgcatttgataataccttcttttcaagaccaagacagtagtaaaaaatctttaaagattttcgactttttttttttttttggtagagatgagatcttactatgttgaccatactggtcttgaactcttggcctcaagtgatcttcccacctgggccttccgaagtgttgggattacaggcatgagccactgcacccagctttttttgattgttttaaaaaaccatttgttaatttctacctcttattctctagacccatatgcttagtatagggcttacagctcttggaaggggaaatcattttattcctaataaaattctaaaagctcttttaatgagaaactaatcatttgattagttttcagaagttctttgcgaaatattaagagctttcttgaattctgttttttttcctaacttcatattgtaaaaagtaaagtagaggttcctcttcaaagactttcttcctcatttaattaggaataaatagtaacttctcttagaagcaaaatttattcaaagacctgtgctaacattcttaaatatctgctagccgtgataaatcaatgtactttatgttcttagctcctacaatttagcctaaaaatttgccctggcatgcttatactggtccaagcaagcattaggtcgtaggctgttcctcttccttatctgaaggtgtttttacctttctcagcattccacaagttacttcctccttcctttgttctcctctacctttgcctcttttaaaaagtgctaagttgctagccaatcaggacaaatacagaatgtgagttcccattccagccaatggaaattggacacagcagtaggttggatgcgtcaggttataaatgaccctgtctcctttgttccgtgtactcttgtggcaaaactgctggtgagtgtactttttctgcaggaagtaaaaatggccttgctgagtaaattaaatttatgttcaactgctatttctttacggcactgaggaacaaccatttcaaactatccataaataacttaaggaaaaaatatgtattgcgttgcacttggtaaaatgctaaagggcagaattgtgttctataaaatgaagcctgggaatagaaatttgaatatgtaaggaagcataatttaacagaagttagtgtggttttgggtaagggtaaataaaacctcattcttagaatttgtgggtgcatatgtatggaaaaagaaaaaaaatacttaaatttcacaaatcctttgacaaacttctaaaacaagtttagatgttatgtgtgcttttgtcttaaagtctattttgtctgatagtatagccactctagcttgcttgctttctttttttttcctttttttgagggacagggtcttgctttgtagcccaggctggtctcaaactcctgagattacaggcgagccatcacacctggccttgtgtgacatatctttttcaatccttttactttttaccatttgtgttgttgaatttaaattatatttcttagcatatagttggaacatttttttagaatctattctgccaatctttgcctttttattggagtatgtaaactttttactgtgtattttaaagttattttctttgtggttgccctgaggattacaattaacatgttaatttaaaacactataatttggattagtagaaacttaatagaatacaaagactctgctccaatatagctctattgtctcttccttccttttgctatttctgtcatacgtattcctgtttttcttttttagaattatcattccattagcctggcatggtggcacaggcctgtagtgtcagctacttgggaggctgaggtgagaggatggcttgaacccaggatgcagaggttgcagtgagccgagattgtaccactgcactccagtctgggcaaccagagcaagaccctgtctcaaaaaacaaaacaaaacaaataattatcattccacattgaaagtattccatttttaaacatcataaagcacatcaacacagttttataagtattgccttaatgtggttgtcttgtaaatcagataggatttttttttaaagttacaaacaaaaagttacaaataaaacaaaatacagatgtggccaggtgtggtggctcatgcctgttatcccaacactttgggaggccaagatgggaggactgcttgaggccaggagttccagactagcctgggcaacatagcaagaccctgtctctaccaacaacaacaacaacaacaacaacaacccagatgctccttgacttatgatggggataagtcataaacccatcaaaactaaagtgtcttaagttgaaaatgcatttaatatacccagtctatcaaacatcatagtttagcctagcctaccttaaacatgctcgaaacgcttaccttagcccacatttgggcaaagtcatctaatacaaagtccattttataaagaactgttgaatatcttatgcaatttattgaatactgaaagtttaaaacagaagagttgttgcttttacaccatcataaagttgaaaagatataaaagtcagagaccatctgtagtgccagtttctccggggattttgctttttgtggtgatccaaacctagtattccccttacagtggctgcgaggctgctgatttggctcctgctgcgctagggaaaggaggatggaaattgggcaagttaaaatactacaaaactcaaccatttttcctgaatacatccttctcagttgttgcaagcctttttttgatttccaaaattctgaaaaaattgatttttaacaacttttggcactgtacttgttgctcatatggaagagcagattttcagatgtctttaatccatcattctggaagtgaaagtatgtgcttttaaagctggtttctatgtcatgggtgctgttttatcataggctgaggactggttaggacaggaggacaagaagcaagaatgacaacaattatctgttgctggcaataagtcagaaataagaactagagacattaagaatgccattagaatgaaaattagatgtattatttcaggtttggtcccattcctcctgttttgtttgccaaaacgatctagaaaagcctgtaaagtatacctaaaatgattatgggattagaaggactttatataagaacaggctaaaataattttaggaagaaagactgggagaactcccatctaaaattcatgaaattacaaaggatatgtattgaggacatcactttttaaacttatttctggaagtattgggcatcccttaaagtttggaaaagggtaatataagacaatagaaggaaataccactttaaaaatgtgtttttagaacttgtttttctgataaatgggtcagacagaaaacctgagagtttaattaaatttttggattatagactgtgaattgcttaaaatttttttgagtgtttcttgcagatacattgaagagactctgaaagtcattatagtcatctctgaaacattgcttagtacaccatctgaaagtaaatgctgggctagatgaatactgatctaactcagcatggcatttacatccttaatatgatctgtacttatgactgtttccataaaagtgtctcatttctttttcttttaggtatgtaaaagaaggagatacagtgtctcagtttgatagcatstgtgaagttcaaagtgataaagcttctgttaccatcactagtcgttatgatggagtcattaaaaaactctattataatctagacgatattgcctatgtggggaagccattagtagacatagaaacggaagctttaaaaggtattgtaagtctgttaatctattttaccaaattgattattggtctctttttgtcattgggtcccaattaaaagtgatctttgtttttttgttttttttttttctattcctatttatttttagctcttgaggaaatgtaatcttttcaacgtgaaaaaaggtagcaagttcaacacaaaatagaaatctgaattgtaggataagacaaaaccaaaggtgggggggaaaaggcaatagcaaaaggaagagatgaaatgttgcaaaaaagatggaggatgtcccatcctttctcctctgggkaatgactcaaacattcaggtggcattatacatkgttccacataagtcagtgacgttattccttttggaggggtaagaacgggtggggatgggcttttaataacttacaggatttgagttggagttttagaagccgaaatcaggaaaattgaaaaggttctctgtgagtcatgattatcttttggccagttgccatgttaaaaatgtgtacagtaacacttcatttacctgaagtcctgccttctcgagatgttagtgttcaaagaggcaacaagctctctcagtaattaaagattcagactataaatactggccacaaagaacaaaaattggagtatctaaagatgaaatctaatataatggattgctctgtttgccactgatacaaaaaaaaaagcactcttgttggagatggttataaactttttcaagagaagttgaagagaaaagaaggaaaattaaaatgaaagcaaagataccagcatttagaagcagcagcaaccatgggacttacaagtgatagatgtcctgtcaaaagggaattcatcatgagaatgttacagaggaaaactaaaacagttggcagtcccagtggtggcaggcagctggctggctaactcacaagttccttacagcactgttgtggtataccaaagttttgtcatctaggaatcagttttgatactaggggctgcaagagcaataggttctgtgacagaactcctaagccagcattcccwccttggaagtgctgagataaagatatctcactgtaattcagaagtctaattgaattacagtgtctggctgacacttagttctacagtcggtggaacaataactaatattacaatcttttttttccagaatcacatggtataatttataaaactttttacacttattattctgtgaaatattccagtttagcagatgaagaaactaaacccaactagaaaggttggacaggctgggygcagtggctcacgcctgtaatctcagcactttgggaggccgaggtgggtggatcacgaggtcaagagatcgagaccatcctggccaacatggtgaaaccccatctctactaaaaatacaaaaattagccaggcatggtggtgcgtgcctgtagtcccagctactcgggaggctgaggcaggagaatcgcttgaacccgggaggtggaggttgcagtgagccragatcgtgccactgcacttcagcctaggtgacagagcragactccatctcttaaaaaaaaggaaaaaaaagaaaggttggacaatttgctcaatggttggtgacaggaccaaagttagaacttagatgacctgagtctttgtccagaatattttctatgacatgttgcttctaaaagctagaaggtgatttattgaaggcttcctactactttttattattataaaagcaggaggggtgcattgcagaaagttctaaaatacagaaagccaaaacaacaacaaaaaccctaatgttcacaaatcacactcaatgcattcgtgtatatcattccagatatttttctaggtcatatgtgtacatgtaggtatttttttaaccaaaataatatattgtatatgctgtagtccaatctgtttgctttgttcatctatgttttcatgacagtacatttcaattttatttttttgtttgtttgagacagagtcttgctctgtcacccaggctggagtgcagtggtgcgatctcagctcactgcaacctccacttcctaggttcaagcgactctcccatctcagcctcctgagtagctgggactacaggtgtgcaccactgtgcctggctaatatttgtatttttttatagagatgggatttcaccacattggccaggctggtcttgaactcctgacctcaagtgatctgctggccgcatcctcctgaagtggtggaattacaggcatgagccaccgcgcctggcctatttccattttatatgatcgacagaccatatttagatttcctgaattatccccaaaatgtccttgatatttcaattgatttttttttaactaggatccaatataggaccatacattgcacctagttgttatatctcttaagtctcttttagtctagtttatcctcctctacttttgtttcatgacactcatttgaagagattgcctttgttttgcagaatgtcaaactttttggatttgtcttgttgcattgtggtgttatttaacttgttcctctagtcgttatatttcctgtaagctggaagtaagttttaaaggctgaattcaggctgggctcagtggctcacacctgtaattccagcactttgggaggccagggtgggtgaatcacttgaggtcaggagtttgagaccagcctggctggccaacatggtgaaaccccatgtttactaaaaatacaaaaattagccgggtgtggtggcacatgcctgtaatctcacctactcgggaggctgagacagaattgcttgaaccccagaggcagaggttgtggtgagccaagattgcgcccctgcactccagcctgggagacagagtgagactctatcttaaaaacaaacaaaagaaaaaacaaacaaaaaattaaaattaaaattaaaaattaaaaaataaaggctgaattcaagttaaatattttgggtggaatacatcatagatcatgtttgtacttcatgttgcttcacatcaggatacacttaacatctgatgactgccatagtgatgctaagtttaaacactgaactaggataatgatacccttacccctctattgtggagttgtgttttccccttttgtaaccagaaaattatgtatgtagtgttagctttgacactaaataagtaggttctaatataatttgagatccttcctaaatcaataattgctttagtggttgtggaatgatgatttttggattttgtcattcctttaacattattagctggcattcttctgtaaagtggacctttctcctctcatcagttggggctatctgtatgctacctgtatgaaatacagttcttactggaaagaaaataaatgcttaattctttccctttgccagttctcgaagtaaggagttcctttagtagtcacttcaaatgctgatagtaatttttccagcattctcagtgtatgtgtgagtgtatggtcatatgtcgcataacgacgttatggtcaacaacagactgcatatacaacagtggtcccataagattataacacatctttactatacttcttttatgtttatatatgtttaaatacacaaatatttaccattgtgttacagtcacctacaatattcaggacaataacatgctccacaggtttgtgacctaggagcaataggctatttcatatagcctaggtgcgtagtaggctataccatctagatttgtgtaagtgcacactcaagtttggataattgtgaaatcacctagcaatgcatttctcagaacatactcccatcattaagcaatgcatgacagtatttcaactgatttcatgtgtttaattgattacaatcattattcttctcgatgctcaaatcattgtagtggtgaccccttcaacctggctcctatgtgttctattaacattgtcctgttaacttttaaaagcttccttgcttttggcacaaaagatgttctgggattcacctcatacttttcccaccccatacctggaatcattcatttcttcaggggctcttgttcctttaagtattagtgtagaatgaataagaggctataatctgggcgttaggggtgcttcctattactttgattctaaatttcttttgaaagacattattggctaggcacagtggctcacgccagtaatcctaacattttgggaggctaaggtgggagaatcacttgagcctgggagcttgagactagcctgggcaacataacgagaccccatctctacaaaaaataaaaaaaaatagccaggtgtggtggcgtgcacctgtggtcccagctacttaggaggctgaggtgagaggatcacttgagcccaggaggtagaggctgcagtgagctgtgttaatgccactgcactctagcctgggtaacaacaggaccctgtctcaaaaaaaaaaaaaaaaaaggcataatttagaaaaatttaaagaaaaacaaaacaaaaattcacctttagaattaaatgaaataaacacagttttttttggattcagatttagaaaggaaagagtgtttcattcttggcataaactgacaagtaaggattctgaacagtactatggatgtcattaaattagaatgtccaagctggaaaccagattagataccaatttaagttatctaaaaaagcaagttatttatatgaacaagtaaacaattggagtttgttatttgttttgttttgttttgttttttgacatggggtcttgctctgttgtacaagctagagtggcacaatcatagctcattatagccttgaattcctgggcacaagcagtccttctgccttagcttcccaagtagttaggactccatcatgcccagctaattggccttctgatttttttttttttttttttttttttgtgagatggagtcttgctctgtctcccaggctggagtgcagtggcacaatcctagctcactgcaacctccgcctcctgggttcaagcaattctcttgcctcagtcaccctagaagctgggattccaggcatgtgccatcacacctggctaatttttgtatttttagtagaggtgaggtttcaccatgttggccaggctggtcttgaacttctggcctcaagtgatctgcctgcctccgcctcccaaagtgctgggattataggtgtgagccaccacacctggtgctggttttgtttttagagtttgttttgacatctcaagtaagatccaacttaataagtctgggtatagcaaattataaaatcacagtacattttgtggggggcctgtgttttttctggagaattttttttcacaaaaattaatattctctataacatgataaatcttaaagaaattatgctgagtgaaagaagccagaccccaccactcaaaagaaaacatgctatatgatttcattacatacaattttagaaaatccaaactaatctctaataacagaaaaccaacgagtggttgcctggtgacagagtatggagggtaggaagggttggaaaggaggcattaccaaggaatacgaggaaacttctggaagtgatagacatgttcattatcttgattatggtgatggtttatgagtatatacatatttcaaagcctatcagattatatgtgtgtgtgtgtgtgtgtgtgtgtgtgtrtatatatatatatatacatatattttttttttttttttttttttggggggagacggagtcttactctgtcgccaggctggagtgcagtggcatgatgtcggctcactgcgacctccaactccctggtttaagcgaatctcctgcctcagcctcctgagtagctgggattacaggcaggcgtgcaccaccacacccagctaattttcatatttttagtagagacggggtttcaccatgttggccaggatggtcttgatctcctgaccttatgatctgcccacctcggcctcccaaagtgctgggattacaggcgtgagctaccatgcccagcctcagattttatattttatgtatgtgcagtttattgtgtgtcagctgtatctcagtaaagcttagaacaaaattaatggcattggataggttatatttacagtaaaaattatctgacagtattcttcatagagagctgataatttgctagccattctgtttcatttgccgttcataatatgttttaaacaattatcttgcatgctagttttatttcacatctgtacctttttgcttttatatttggacttgttttttatatttttattgtaagaataaactatgaagcataagcccatgtatcaaataagcaggcctatagaaattaaattcagcttaatgagagaaatttatatatgcttcattttaattgtggaaataagaaagatttctaaatattttatgtatcttttcttaagcaagaatttgtagtaatactgaatttatgtttttcctgtcttaatgctagtaaaaccaattatataaaagacgaacacaaagtcttctagaagtataaattatattattaacattttacaggtggaaaattattatagcatagagccatgaagggtagaagagatcaagactagacatcttaatagtagtattggaaattaagtcctatcttgtaatgctaattatattctatagtactgtcttttgtaacatagtagtagtctgcttttcaaagctagagggtcatgataattttggtgagggaaactgtatttgtgacctccaagtcctatctatgagtcctttgactgtaacagacctctacttcaaaacagtttattggactcaggtatgccaacttgtatctgtgacatataaaaaggcatatactattaaaaaaaatgacaagttgaaatccagttacttaatttttttttttacttaacattatcaccattatatcaaagctattccatgtttcagtgccttgtctactgtaaatgtggtttagaccatgtgcagtcactcatgcctatagtcccagcactttgggaggcccaagtaggaggatcatttgaagccaggagtttgagactagcctgggcaacacagtgagacctcatctctacaaaaaattttaaaaattagccaagtgtggtggagcacacctgtagtcccagctatgcaggaggctgaggtgggaggatcgcttgagcccaggagtttgaggctgcattgagctatgcttgtgccactgcattccagcccaggtgacagagcaagacccagtttcttaaaaacacgcacacacaaaacaaacaaaaaagttagacgggtggtagtacacccctgtagtcctggctactcagacagaggaaaccctgtctcaaaaccaaaacaaaactaaaaccaactcagtttaaattgtgttacctcgagttgtctttacagctgatgtggtgacagatgctttctctagcctctatttatttaatgcagtaaaatgattcctcacttttctaaacaactaagcctctttgttccaaaacttttcaaaaacttttttttgagagaaatcattaattttgttttaaaaatttcatacatgttaattcttaaagtgaggatattgagtaagcttttttgattatgcaaagacatgttatgaacattcaccactgtactagaaacaatacaattctgcgtttgatttttagtttttcagcccgtttagattgtccttgtgccaggtcatcacccaccttcmtaactttctgagaagacatataaccaagttgattaagaagtatttgctaacaaaggcaaataggagctgattgagagtgtaaatacctttcctctgggtcaagtggacagttttaatgctgaggctgtgtggcacctattttaggtacactgggccatgaagctatgttaagatgaagttgccaggatgctccaccaccagataagtggagagttactgaacctaactgagaggtaccatggggcagtgaaaggaggagaaagagggacatgagctttagcagaatactttataaaactaatattattctgccattatattgcatttaccccttaacatcaacttgtattgttgattggtttctctgtgctaatactatatatacatctcatttaacaaatgtaatatctgcttttgacacatggaccattgagactctgagaggttaaataacctgcctatgattacatagctactaagtggtggagttaggatttgacctcagctctgtttaatgtgaaagcccatgctcctaaccactttgttacactgataatttagttcagagaggatggatatcagcttcattttgcatctagagtaatgggacttactttctaacactttacatatgcattatttacaaaattctgctacaacaacacagtttagtttacaaatatatagattttataatattgaaatgtttaccaggattagtataaaatgttttaaagaaaagctctttgacataaaaccattccaataatgtagtgtaccatctaactaaattacattcagtaacataaattgcatggttcaatgctaggcatagtaggtgctcttggtagctataactgttcattttrtatagcctattgtagattaaattgattgaattcgctgttttaataatttgaagtgaaaaagaaaatgcaatgaaatcttttcagtttggatgtccttaattttcaatttatgaacattcggacaggaactaaagtttatttttgtgctatgaagaaaggtcttccaaacacacttgaatactttagtatttcaaagcatttttcttaaaagaatttctcctagctgagtgaattaakkggattacttaatgttattcttagaaatacctaagaatattgcagtttcacagttttatcaattcatattattcttttatttagttaacctgaaataatgtggttttattataaatttgctttctacgaggaattaccttaacacaagattgacaggcttcataagaaaaagtgtttacttaccagtgtttgtttgctttttcttaaaattagttaaagcttttaaaactgtactctaattccctaactgaagatcaatcatcaaaggctaaaatctcacatattagactgtgatgctagaaacactaaagtcatatcaactggggagacttgtgaaattcaaatttggtcaacttcatcccccttagagtctgtttctacattggtaacattgagaaatctgtcctacatactcataacatttttgtaatcagaggagaaaatatgtgtaaaaacactgaaggaggccaaggcaggagatcacttgaagttaggagttcaagaccagcctgggcaacgtagtgaaacactgtctgtattaaaaaaagaaaagcaaaaaataaacattttgaagattatttaaaatcttctgctgtgtagtaaggtggtattttattacttggttaagtgacagctttcttccaacaactacatgactattagaaataatatatgagtgacttctcacaagtaagtttgtcattcatatttacactcaagttactctaaaagggtagtactatgtaggtaatatatcacaaaatgttttccagaaaggtaggtagcaataaattacttggtcttttggaataatgtaataatttttgtatgttatatatttggatatttatacattctcttcagcaaatatgcattatccaagttagcattggagttcctaccatattggggttcctaccattgaatcccctgattttcgtttggatcttggttccacatgctaatctttcttactcatttctccaatgactttaacagatgtagagaatatacagagattctgaaaattcaacaaaaattatgccttgaactataggagttgtattctagctactttgaccagaaggaaaatttactagggctatgaactaatggaaacagcacagattgagtcagccctaggactgaattcagctcttagatttattaggtgtctcaccttgagccaatctgttcagtcaaacctcactttttaaactgtctataaaatggggataataatacctatcttaaacagttgtaatgaaaagtaagatactgcatatgcaggacagtatttgacacataatagatgctcaatacaagttttgggtttttttctcttcccttccttacctttaggagaatttctttgtagctccactgggccaattcatagactagtaaagaggaatgaatagactatcttatcacggttgcagtagtagaagatttttatttacctagaaatgaatgtcaaaactgtcaaagcagattcagttgtctgttcattttcagaagttctgtcagtctttaatttaccaattcagacagattctgctatatgtatacatcactgatttcctaacagcagaatttgacaattaagtgctctcaaaaacatttttttttttgcttgcagaaatatatgctagtagcctgagatagtttttctaataacaggaatccagaactagagaataaaacaaccaaattagcattagccacagcagttcttttttcttttccttttttctttttgaggcagccttgctctgtcacccaggctggagtgcagttgtgcaaccatgactcattgcagccttgacttcttgggcccaagtgatcctcccacttcagcctcctgagtagctggaactacaggcacacaccaccacacctggctaattttaaaattttttatagagagagggtctccctatgttgccctggctgatctcgaactcctggcctcaagcaattctcccgcctttacctcccaaagtgttgggattacaggtgtgagcaaccatgcccagccaccacagcatttcttaaactattcaaagcagagcaaacttttacgtactatatcatctcaggaaagtgtttaagattttcatagattttatatgattcttgtgcgtttttttttgagactgggtctcactttttcacccaacctagagtgccgtggcgccaacatgtctcactgcaggcttgacttcctgggtttaagtgattctccccccctcggcttcctgtgtagcttggaccacagatgtgtgctatcgtacctagctaatttttaaaattcacttgtagagacagggagtctcactttattgcccaggctggtcttaaactcctaggctcaagtaagtgatccacccaccttggcctgctagagtgttaggattacaggcatgagccattgtgcccagcccattctttcatataatttatcttacatttgatccttattccgtgctgtttataaatataaatgagaattttattagaaaaatgtttaaaatacaaattttttttttttgagacagggtctcactgtcatccaggctggagtgcagtgatgcaattacagctcactgcagcctcgacctcctgggctcaagcaatcctcccacctcggtctcccaagtagctgggaccacaggtgtgtgccaccaaactcagctaatttttaaattttttgtacaggtggggtctccctatgttgcctcagctagtcttgaatgcctgggctcaggtgatccttctgccttgacctcccaaattgctgggattgcaggcgtgagccactgtacctagccacaacacattttaaaatttcttgaggaaaactctcatgtttaaacttgtagctgctatattatttcaacaggagtgacatatccaccaggtactaataattaaaaagtaccaggtaccggcacacacccccccccactctacccataccattaggatagttgtgttttcctattctgaagtagttcaacttttatacatttagactataaactttaatttatttagatattataggccacatcttagtggccttactttacatcttagtaaaaaaaaaaaattttttttcaactgaagttaagttttaccttgttaccagattcagaagaagatgttgttgaaactcctgcagtgtctcatgatgaacatacacaccargagataaagggccraaaaacactggcaactcctgcagttcgccgtctggcaatggaaaacaatgtaagttctcttaatatttaagtctgagattgtataggaagtgtacatttgtatctctgaaaaattagccaactatcccatgatgaaatagctcaatgaaattaaggaaacatgaagatatttgctactgaaaagcaatagttgcataaaaatacatgggagaaatgagaagttgtaaacttattacttactatcaattgagcagtatgattttattattctttcttagagcctaataacagtaagagctaccatttactgagcacttgtaaataacaggtcttatgtcaggtgctctagaggcacagcatgagataggaatttgaaggagggaaaacctgtaaagggactgaaggaagcgagataaaaaagagaagagaagggaaattggccagacatggttatggtatcaagcatctggcctgtcccaaagcttgccatggtcctaagtaaaaaaagaaagactctggcctgatctgagggtgcaagggagaaccacagaattactgctttgaggcaaggaggccggccttttgtatttcctctgccagtcactgactgaatggaaggtggaatgccaggcagggtggctccctggcactgggataggtatttacgtattctcatttaaccctgtaagataaggagctattttaagacttggagggtttaagtaactaaagtcacacagctaacatagcaagagccagaattcaaaagtgagtctatatcactccaaaacctgtgctgttagatgttatataaacctcaacaatcattgcctccattatttgagcacatatgtgccagacactatagacacattatctgtaatcctcacaaggaccctgcaggcaggttgattaactaatctaaaaccaagtaagctgaactagggatttgaacacaaatctgtctggttctgaaacctgaatactttccactgtgccccacaatgagactttttgtttgtctctttttgagaaaagtaaggttgctgtgggaaaaaaataaaagtttatattttgtgaaatatgtaatagagtcattaaaatgttcatattctttcagccagttatcctgccactggggaactatcccaagaaaataatctaggaatcattcttccttgtattttatatagccaaaaattagaagatgcatacgcattcaaattatgttatgtatccttgataaaatgttatgtaacccttaaatgtgtttaagtatgaagaccatttagcataacagaaaatagatatagtaaygtggaacattaggttattaagggcatcagatgaaataatgatttaacattttgctttgaaatctataaagcattttaataatttttttcttaataatatagaaagaaatatatagaagaaatgtatgatttggctttcctaaaacactccctaaagatgggtatagaatacttgggtagagtgcttgtatgattactaaaaattaaatattggatttagttatcagaaatcatcttttttctttgaatttgcatatttatgaattgagtttgtttaaaattaagaaccagtggcatttacagttgtttgtaactgcctaaaaattatttgtttaaattttcatagtccatttgttacaaacttagtgtttgccttagtaaagtcctttattattttagtcatccttagagatgcactaatacaaatgaaatggggcctatccctaagaaattaatacatactatatatgaggagatcattccaagcttttatgtttatttttatttaaatagaattaaatgttttgtactgatctttccaaagcaactaccagaaaaataactaatttgagagagcttttgtattatgattatttaagttgttacgtttttaactggtagccagtgtcagaaacattggtctaaatttggtatagcatttagtttctcttaaattctcagctctccctcttcttatgtagtccccaagaatagaaaaggtcgagtaagaattatgcaagagattttaaaatacttgagtataaaaatgtaagttttcagctgggcatagtggctcacgcctgtaattccagcacttttgggaggctgaggtgagaggatagcttgaggctaggagttcaagaccagccagggcaacagagtgagaccctgtctctacaaaaaatttttttaaaaagtaagttttcataaatagctctagattatatataatatagatacctgatggttaccacatgcatatgtgaacagtatatacaaaagtaatgattacttaagtagaaaatgaaaaggttatttccttttactaatttattggacagatatattttactgtcagttgatcaaattccattttgaaactttaatgatgtttttaaatagttgtatttttggcattaaaatatatcattttttagattaagctgagtgaagttgttggctcaggaaaagatggcagaatacttaaagaagatatcctcaactatttggaaaagcagacaggagctatattgcctccttcacccaaagttkaaattatgccacctccaccaaagccaaaagacatgactgttcctatactagtatcaaaacctccggtattcacaggcaaagacaaaacagaacccataaaaggtaatgataataataacaatactataaggcaatagttcatttattttgggggaagctacctcagtagataaatgtatataatatggtgttttcaagtcttactgaagggaaagttcaacttcagtcagcatataatttttcttttcttttctttttttttgagatggagttttgttcttgttgtccagactgtagtgcagtggcacgatcttggctcactgcagcctccgcctcccaggttcaagcaattctcctgcctcagcctcctgagtatctgggattacaggtgcacgccaccatgctcagctaattttttgtatttttagtagagacagggtttcatcatgttggccaggctggtctcgaactcctgacctcaggtgatccaccctcctcagcctcccacagtgcagggattacaggcgtgagccactgcgcctggccataatttttaaatggtgaaatagcatagcttttccaggaaacacttacaatttatgtgtatcattatcttctgaagagtaatacgttagcaggtttcttgaaatataaacttgtatattgataattgctctgtttgaagacacacaggacattttaaacattcactatttgtagttagctttcaaaataactagttctgatttgttatttataaactcctggaatgattaacttccagaagagtggctttgcaggaaagctgttagggaaatacatggcttgcattcttttgaattttttatataacacagcatttaaagcagttacctgctatgttattgcatttgccactgagtgtcatgatgcagtcagtgttccagctttgaaattagtgactttcagtgtaatgtaatgaagagagtagtaagaggaagggtttaactgagagagtaaaagacattagagaaccttccattttagtttctttaaaaaaaaaaaaaaaggatgaagagatttgagaatttaaataaatgaataacaatttaatgcttttcaggctttcaaaaagcaatggtcaagactatgtctgcagccctgaagatacctcattktggttattgtgatgagattgaccttactgaactggttaagctccgagaagaattaaaacccattgcatttgctcgtggaattaaactctcctttatgcctttcttcttaaaggtgagattcattcatttcaaacaaggcttgagtaggacatttatttgtttgtttgtctttttgagacagagttttgctcttgtcacccaggctggagtgcaatggcacaatctcggctcactgcaacctccaccttccgggtttaaacaattctcttgccttagcctcctgagtagctgggaatacaggcacctgccaccacgcctggctaattttgtatttttagtagacacgtggtttcgccatgttggtcaggctggtcttgaactcctgacctcaggtgatccacccccgccccagcctcccaaagtgctggaattccaggcgtgagccaccataccyggccccaagtaggacatttaaattttgctttgccaacatgcaatatgttgactgtggccttgaataaaaatattacttttcgcaacatcagatagttagaaaatgtgccatttctttgttcaataggaaattataaaattgagatttctgtactatatttttagctgcttatctttgagctaggtagagacaattctgccagttaagtaaagcctctgatcctaaaaggatcactccaaccaagtcttggtttgaactaaaatgagacttgatattaattttgcaatatcactgacatatatttaatatttattttcatttactcaaccaacttatattgaggatcctgggaatcatttctagtgctaagccttgggaccagtataaaatggagtaagaccatcagctaaccttgagcagcatacagtctagctcacattagtgactgtgcagcagctaccatgtgccagcctccatagtaagcatgctgtatacattatctctctcttttttttttttttttttggtatgaatctcatttattgaaaagattatttctcacctttctcaaattgaagactgcaaaaaataaaagcagtgcttcattgagttgtcatgagcctggggcaggagcagcagcgctgcctctccacgctccgggaaaccgcagctggcgtgtgccacatcggtcccacctcgctttacaaaacagtcctgaagcttaatcaaataaaactattgaacacaacatttacattagaaaaagagagctgggtgtaggaaaggccgagcctggtgttccctttaagcgaaggtggctccacagttggggcatcttcgctccctcaaggcaaaacagcaaatgaacccaaaggggaacaggatgatggccaggaagatgcccaggaaggtgaagcagtcctgcagccccccgaccctgcagacgggacagcctcccacgaccacgatagwgttggtaggatagcggatgacggtccagctgtggatgttgtagaccctgggatggtgggtgggtgtmcgtgtgacgaggtaggagtagggcggctgcgggggcgcggcggggatggcgccgtagccgtgcgggcctcacgcgtagtcgccctggccggcctccaggttgtaggcgggcggccgctcctgcagcagagtcttgtggtccatggcggcccggctcggctctgtcggccccggcggggacgcggcgcacgccccgggtggctcgggcccctctgaggcagacgcggggcagggcccattatctcttaattctcagagtaaccctgacatgtaaacattactgtctccactttccatttaaggaaattggggctcagagaggttgagaaacttgttaaggacttacagctaacaggtggagaagctctttcaggttctggtctgttttactcagaaggacatactgatgtctgtaatgccaacatgtccagtcctttctctacactgcaccaagactggtcttccgtaaatcaaattactgtaatattctctgattcttttcagtggttccctttcattaccttcaggataatttgtatgccatactccttagtgtggcatacaaatgtgttataagtctctgctgcctgcctctccattcttacctcactccctcatattaaggtacccataattgctggaatacacaattccacctgaagtgcccgttcttctcgatcaaacacctgcaaatcccaaactgtggtcaggtacagactccttctgtggctgtcactatttgaattaaatacttttgtttcccactgttaacttatctcagtgcattgagtgcttactcagttttctcttcacttactcacttacygggcgctgagcctcatgaggcagaaactattcttctttatctccctttttctttctttcttctttttttttttagaaagggttcactttgttgcccaggctgctggagtgcagtggcacaatcacagctcactgcaaccttgaactcctgggttcaagtgatcctctgcctcagcctcccgagaagctggaaccacaggtgtgcaccaccacacctggctaatttttttttattcttagtagagatgtgtctcgcagtgctgcccaggctggtcttacagggatgagccagcatgcctggctattttgttttaaaataaaacataagtttcagaacattcgaaaaaatactacacagtattgtagagggggaacaaatgacctaatccattgacacataccttgtattttcttggacaaaatttggattatactcaaatatttttatatgtaacagtttagactaaccttaggggtttttagataaagactattaaaattacagttattgaatcaaatgcttactaaaactttcaagttggctgggcgcagtgtctcacgactgtaatcccaacactttaggaggccaaggcaggcagattgcttgagctcaggagttcaagaccagcctgggcaacatggtgaaaccccatctctacaaaaaatacaaaagttacctgggcatggtggcacacgcctatagttccagctactcgggaggctgaggcaggagggtcactcgagccaaggacgttgaggctacagtgagctgagatcatgccactgcactgcagcctaggtgacaaagaaagaccctgtctcaaaaacaaacaagaaaaacttccaagtcataaaaattaaggaactcgtagcagttcttttaattatatttttcttcagttgatctactctcttaacctgtcctaastaatgaaaatgaaatgtctctatatatttaaacttttttcttaactctctagttcaagaatttgatttttttcccatcaagaccccgatgcactgagaagaataacacaatgcatgtaaagaactttaacagggaccagacaagggcagtgggggagggaattctttttaagaatgatcttaagcatttttattttgctatcttttaaattcaatacaatgcatggccaccacatgtaaggtatgaaacttgattattagatcccaaaaacagattatcaagaacattttgggtacagttagggaaatctgaatatggacaggagagaaatggtattaagtgacaaaagggagaaggcagcagagagggaaaatataaatgctattcagtgagacttgagctgtaaagtaaatgttcaggacatctctgcccttcagctggccaaggacaccaagtagcaaactggcatctactggtcagtgcgctttgaaatcctcgttacgtgttctttccacacagagaaatagcttacctgctttttttgtgttttgattcctagtattacttctcatggaaatcttaagatcaacatgtcagtgaggaaatcacctagaatttagacattttctttggaactttggctggtctgtatcattattttgaaaatctccttgatgtttacaagctacctgactactttatcttttattctttaatgattagggtgacctagttccacatggcctgaaggtaacattggcagtaatgtgactaggtacatgtagacttgaaattaaactcagcataaataagagttctctctctccctccttttatacctcttattgtttcaaattctctatcctttctaagttaaaagtactaaaattgcattctttttctgttaaacaggctgcttccttgggattactacagtttcctatccttaacgcttctgtggatgaaaactgccagaatataacatataaggttggctatgcagagtaaaaatgttcttattattaatagaagatggggcaaatgtgcttgtagattagagacttctattgtacctcaaatagtgatcttttttagactagaattaaaggtatggggtaaaacattaaacttaagtctaattcattgttgttgtttttgtgttaataatactgtttagagattcttaaaactatttttaagcttttttttttcctgcttaaaataatggaaatacatagctgtatggcagattatgttacccactctacttaccctctcaaaaagaagcagctctttcaaaattgaattcctggaattttaatattattattcttattattattattattawtattattattattattattggcagagtctcactctgtcaccagtttggaatgcagtgttgtgattgtggctcactgcagcctcaacctctcaggcccaagcaatccttctgccccagcctcctgtgtagctgggactataggcatgcgccactatgcccaactaatttttaaattttttgtagagacgtggtctcattatgttgcccaggctggtcttgaacttctggtctaagcaatcctcctgcctcagcctcccaaagtgctgggattacaggcatgaaccactgtgcctggcaaattcctggaattttaatattaagaataatttaagtgagaaaaataataaaagtttgaattcaatttgagtaaactcttctgtgagtagtgaaagtttcttaagaccgaaaactctttttgagatgcctttcctgaagtttacttatcattagaagtgcacaaccagaggctgggcacggtggctcacgcctataatcccagcactttgggaggctgaggcgggtggatcatgtgaggtcaggagtttgagaccagcctggccaacatggtgaaaccctgtctctactaaaaatacaaaaattagccagccgtggtggccagcgcctatagtcccaactactcaggaggctgaggtgggagaattgcttgaacccaggaggcggaggttgcagtgagccaagattgtgccactgcactccagcgtgggcgacaagagcaaaactccatttcaaaaagagaattaaaaaaagaaaaaaaagaaaagacatgtacaaccagaaagtgagcttagatattctgggaggtcagctcccatacggttaatacagtcagctgtattaattttaattttaatatctcctgattaagtatatacttattaaaaaaatttcaggcaagaaaatgatgttggccgggtgtggtggctcctgcctgtaatcccagcactttgggggacagaggtaggaggatggcttgagcctaggaattcaagaccagcatgggcaacaaagttaggaggccccatctctacagaaaaaaaaaattagccaggcatggtggtgcatgcctatagttttagctgcttgggaggctgaggcaggagaatcatatgatacctgggagatggaggttgcagtgagttgtgatcatgccactgcactccagcctaggtgacaaagtgaaaccctgcctttgtcaaaaaaaaaaaaagaaaagaaaagaaaagaaaaaagaaaacaaagatgtttaccctcaattccatgaccctaagatagctcactgtttatgttgagatatacatctttctaggatttcatttttacatactttttacaagatatagaattatttatattttctttaacttgcttttttctttttcttttttttttttttttgatacagagtcttgctctgttgcctatctaaagtattccccatagagaatatctatgctgtggtgtaatcatcgcctcactgcagtgtccacctcccaccgcagccttctgagtagctgggactataggcacgtgccaccatgcccagctaatttttgtactttttttttttttttgtagaaatggggtcttgccatgttgcccaggctggtctctaactcctgggctcaagtgatccacccacctcagcctcccaaagtgctgggttacaggcatgagccactgtgcccagcctcttcattttcatttactatattgtagacatcattgtcaacaagtatagctttgttatttatttagccagtgacctatttataaacatcatgattatttgcagtttctcaaacttataaacagtgtgtactcaacatccctgtgtatccctacatacttctgcacttagttccttaacacgaatttttataaatgttggttcatgttgtcatatgttctccagaaagtctctacagtttaagtatccgttacctgaaatgcttgggaccagaagcgtttttggatttaagatttttttggattatggaatatttgcatatacaaaggagatatcttgaggacaggactcaagtgcaaacatgaaattcacttatgtttcatttacccctcatacacatagcctaaaggtaattttatacaatatttttaacatttttgtgcatgaaacaaagttggatttgtttttttttgtttttgttttggagacagagtcttgctctgtggcccaggctggagtgcagtgctgcgatctcggctcactgcaaactctgcctcctgggttcatgccattctcctgcttcagcctcctgagtaggtggtactgcaggaggctgccactacgcctggctaatttctttttgtatttttcgtacagatggggtttcactgtgttagccaggatggtctccatctcctgacctcgtgatccgcccgcctcggcctcccaaagtgccgggattacaggcgtgagccactgtgcccggccacaaagttttttttttttctttttttgacacagagttttgctctgtcacccatgcataatcatagcttattgtaacctaaaactcttgaggtcaaatgatcctcccacctcagcctcccaagtagctgagactataggcatgtgccataatttaaaaaaaaatttttgtagctaattaaaaaaaatttttttgtagagatggagtcttgctatgttgcccaggctggtctcaaactcctggcctcaagcaatccttctgtgtcagtctcccaaagtgttgggattataggcatgagccactatgccctgccagaacaatggctgcatttttctcttttttttttattgatgggctctgatatgattaaatattacaaaatgagaactgtttcaacaactatgcagcataatgtttaaggacaaaatattgaatatactttttattatatatgtattttatcacatagtaaggaatgctgaggtgcttaatccatccaataaattgaaaataaaatctttacatttctatatttgtcagtatacagaattctgaagatggatcttgactcagggtgataaatcagttttcaaggaaattggctacatcacatgacgtcatttcagcccccagaagtttcagatgttggagcatttcagatttcagatatttggactagggatgctcaacctgtaccagttacattcccactaacgatgttgggaaatagcctattgcctacattcttatcaataaaaaattatcatctttttttggacagagtctcactctgtctcccaggctggagtgcagtggcacaatctcggcccactgcaacctccacctcccaggttcaagcgattctcgtgcctcagcctcccgagtagctgggatcacaggcctgtgccaccatgctaatttttgtatttttagtaaagatggggtttcactatgttggccaggctggtcttgaactcatgacctcaggtaatccagccaccttggcctcccagagtgctgggattacaggcatgagccactgcgcctagcccaaaaaatcttttaaaaattatttttaaattatttcttttaaatcactaccaatctggtaaaaatgagttttggtagtggtttctagatggcagtgaaggttgatcctttctttgctgttagcttattcattaaaagccctactgtacaattttttattttttaggcttctcataacattgggatagcaatggatactgagcagggtttgattgtccctaatgtgaaaaatgttcagatctgctctatatttgacatcgccactgaactgaaccgcctccagaaattgggctctgtgrgtcagctcagcaccactgatcttacaggaggaacatttactctttccaacattggatcagtgagtaataatgttgaaatacataaaccattacttaaggtttctgatcatatgcttaattaaaaatagaaaagtcacttggcatttgttccctgaaaaatcttaacttttaatactctcctttttttttttttwaaaaatagattggtggtacctttgccaaaccagtgataatgccacctgaagtagccattggggcccttggatcaattaaggtacatgtattagataactgaaaaatggagtttaagcaaattcagggactaaacacaatgaagagtaaccatttctaaggtttcccctccttttgtaggttttaagtttctgagtttatcttagaaagtctattatttcttttttttttttttttttaactttaagttctgggatacatgtgcagaatgtgcaggtttgttacatgagtatacacctgccatggtggtttgctgcacccatcaacccgtcatctacattaggtatttcttctagtgatattcctcccctagccccagaccccacgacaggtccccagtgtatggtgttccccaccctctgtccatgtgttctcatttttcaactcccacttatgagtgagaacatgcagtgtttggttttctggtttccagcttcatccatgaccctgcaaaggacatgaactcactcttttttatggctgcatagtattccatggtgtatatgtgccacattttctttatccagtctaactaacattgatgggcatttgggttggttccaagtctttgctattgtgaatagtgctgcaataaacatacatgtgcatgtgtctttatagtagcatgatttataatcctttgggtatatactcagtaatgggattgctgggtcaaatggtatttctggttctagatccttgaggaatcgccacactgtcttccacaatggttgaactcatttacactcccaccaacagtgtaaaagcgtttctatctctctatattctctccagcatctgttatttcctgcctttttaatgattgccattgtaactggcatggtatctcattgtagttttgatttgcatttctctaatgaccagtgatcatgggctttttttcatatgtttgttggccatataaatgtcttcttttgaaaagtgtctgttcatatccttcgcccactttatgatgggttgtttgtttttttcttgtaaatttgtttaagttccatgtagattctggatattagccctttgtcagatagatagattgcaaaaatgttctcccattctgtaggttgcctgttctctctgatgatagtttcttttgctgtgcagaagctctttagtttcattacatctgatttgtcaattttggctttgttgcaattgcttttggtgatttagtcatgaagtctttgcctatgcctatgtcctaaatggtattgcctaggttttcttctagggtttttatggttttaggtcttacatttcagtctttaatccatcttgagttaatttttgtataaggtgtaaggaaggggtccagtttcagttttctgcatatggctagccagttgtcccaacaccatttattaaatagggaatcctttcygcattgcttgtttttgtcaggtttgtcaaagatcagatgggttgtagatgtgtggtgttatttctgaggcccctgtgcggttccattggtctatctctctgttttggtaccattaccatgctgttttggttactgtagccttgtagtatagtttgaggtcaggtagcatgatgcctccagcttccttctttttgtttaggattatcttggctatgtgggctttttttttggttccatataaaatttaaagtagttttttctaattctgtgaagaaagtcaatggtagcttgatgggaatagcattgaatctataaattactttgggcagtttggccattttcacaatattgattcttcctatccatgagcatggaatgtttttccatttgtttgtgtccccttgtatttccttgagcagtggtttgtaattctccttgaagaggtccctcacatcccttgtaagttggattcctaggtattttattctctttatagcaattgtgaatgggagtttcctcatgatttggctctctgtttgtctgttattggtgtataggaatgcttgtgatttttgcacattgattttgtatcctgagactttgctgaagttgcttatcagcttaaggagattttgggctgagccgatggggttttctaaatatacaatcatgtcatctgcagacagagataatttgacttcctctcttcctatagaatatgctttatttctttctcttgtctgattgccctggccagaacttccaatactatgttgaataggagtggtgagagagagggcatccttgtcttgtgccagttttcagagggaatgcttccagcttttgcccattcagtataatattggctgtgggtttatcataaatagctcttattattttgagatatgttccatcaatacctaatttattgagtgtttttagcatgaaggggtgttaaattttatccaaggccttttctgcatcaattgagataatcatgtggtttttgtcattggttctgttcatgtgatggattatgtttattgatttgcacatgttgaaccagccttgcatcctagggatgaagccgacttrattgtgatggataagctttgtaatgtgctgctggattcggtttgccagtgttttattgaggattttggcattgatgttcatcagggatattggcctgaaattttctttttgtgtgtgtgtctctgccaggttttggtatcaggatgatgctggcctcataaaatgagttagggaggattccctttttttctgttgtttggaatagtttcagaaggaatggtaccagctcctctttgtacctctggtagaatttggctgttaatctatctggtcctgggctttgtttggttggtaggctattaattactacctcagtttcagaacttgttattggtctattcagggagtcgactttttcctgatttagtcttgggagggtgtatgcgtccagcaatttatccatttcttctagattttctagtttatatgtgaagaggtgtttataggattctctgatggtagtttgtatttctgtgagatcagtggtgatatcccctttatcattttttattgtgtctatttgattcttctctcttttcttctttattagtccagctagcagtccatcaattttgttaatcttttcaaaaaactggctcctggattcattgatttttttgaagggtttttttgtgtctctgtctccttcagttctgctctgatcttgtttatttcttgtcttctgctagcttttgaacgtgtttgctcttgcttctctagttcttttaactgtgatgttagggtgttgattttagatctttcctgctttcttctgttggcatttatttctgtgggaaatttatagtgctataaatttccctctacacatactttagctgtgttccagagattctggtacgttgtgtctttgttctcattggtttcaaagaacatctttatttctgccttcatttcattatttacccagcagtcattcaagagcaagttatttagtttccatgtagttgtgtggttttgagtgagtttcttaaccctgagttctaatttgattgcactgtggtctgagagactgcttgttattgtttccattcttttgcatttgctgaggagagttttacttccaattgtgtgttcgattttagaattagtgctatgtggtgctgagaagaatgtatattctgttgatttggggtggagagttctgtcgatgtctattaggtccgcttggtccagagctgagttcaagtcctgaagatgcttgttaatcttctgtctcattgttctgtctaatgtctaatgttctgtctaatgttgacagtggggtgttaaagtctcccattattattgtgtggaaatctaagtctctttgccagtctctaagaacttgctttatgaatctggatgctcctgtattgggtgcatatatatttaggatagttagctattcttgttgcattgatccctttaccattatgtaatgcccttgtcttttttttatctttgttggtttaaagtctgttttatcagagactaggattgcaacccctgctttttctttttttttgctttccacttgcttggtaaatcttcctccatccctgtattttgagcctatgtgtgtctttgcacatgagatgggtctcctgaatacagcacattgatgggtcttgactctttatccagtttgccaatctgtgtcttttaattgaggcatttagcccatttacatttgaagttaatattgttatatgcaaatttgatcctgtcattatgatgacagctggttattttgcctgttagttgatgcagtttcttcatagtgtcgatggtctttacattttgggttgcttttgcagtggctgctaccagttgttcctttccatgtttagtgcttccttcaggagctcttgtagggcaggcctggtggtgacaaaatctgtcagcatttgcttgtctctaaaggattttatttctcctccacttatgaagcttagtttagctggatatgaaattctggggtgaaaattcttttctttaagagtgttcaatattggcccccacactcttctggcttgtagagtttctgccgagagatccactgttagtctgatgggcttccctttgtgggtaacccgacctttgtctctggttgcccttaacatttttttccttcatttcaaccttggtgaatctgacaattatggatcttggggttgctcttctcgaggagtatctttgtggtgttttctgtatttcctgaatttgaatgttggcctatcttgctagttcggggaagttttcctgaatagtatcctgaagtgtgttttccaacttgtttccattctccctgtcattttcaggtacaccaatcaaacgtagttttggtctttttcacatagtctcatatttcttgaggctttgttccttccttctcattcttttttctctaatcttgtcttcatgctttatttcataaagttgatcttcaatctctgatatcctttcttccgcttgatcgattcagctattgatacttgtgtatgcttcacgaagttctcatgctgtgtttttcacctccatcaggtcatttatgttcttctctaaactggttattctagttagcaattcctctaaccttttatcaaggttcctagcttccttgcattgggttagaacatgctcctttagctcggaggagtttgttattacctgaagcctacttgtgtcagttcatcaaactcattctctgtccagttttgttcccttgctggcgaggagttgtgatcctttggaggagaagaggcgtcctggtttttggcattttcagcctttttatgctggtttttcctcatctttatggatttatctacctttgatctttgctgttggtgacctttggatggagtttttgcatggtygtcctttttgttgatgttgatactattcctttctgtttgttagttttccttctaacagtcaggcccctcttctgcaggtctgctggagtttgctgggggtccattccagaccctgtttgcctgggtatcaccagtggaggctgtagaacagcaaagattgctgcctgcttcttcctctggaagcttcatcccagaggggcacctgccagatgccagcgagagctctcctgtatgaggtgtctgtcattccctgctgggaggtgtctccccgtcaggaggcatgggggtcagagacccacttgaggaggcagtctgtcccttagcagagctcaagcgctatgctgggagatccactgctcttttcagagtcggcaggcaggaaggtttaattctgctgaagctgcgcccacagccaccccttcccccaggtgctctgtcccagggagatgggagttttatctataagcccctgactggtgctgctgcctttctttcagagatgcctgcccagagaggaggaatctagagaggcagtccggatacagtggctttgctgagctgcagtgggctctgcccagttcgaacttccctgtggctttatttacactgtgaggggaagaccgcctactcaagcctcagtaatggctgacacccctccccccaccaacctccagcatcccaggtcgacttcagactgctgtgctggcagcgagaatttcaagccagtggatcttagcttgctgggctccgtggggttggaatccactgagcaagaccacttggctccttggcttcagcctcctttccaggggagtgtctctcacagttctgtcttactggtgttccaggcatcactggggtatgaaaaaaaaaacaaaactgcagctagcttggtgtctgcccaaacggcctcccagttttgtgcttgaaactcagggcccttgtggagtaggcatccgagggaatatcctggtctgtcggatgcaaagaccatgggaaaagcatagtatctgggctggatagcaccatccctcacagcacggtccctcatggcttcccttggctaggggagggagttccctgaccccttgcgcctcccaggtgaggcgacgccccatcctgcttctgctggccctccatgggctgcacccactgtctaaccagtcccaatgagatgaaccgggtacctcagttggaaatgcagaaatcacctgccttctgccttggtctcactgggagctgcagaccggagctgttcctgttctgccatcttgcctgggaatccaaaaacctattacttcttcctaagagctaggccggcacttctggtggctgcctctgtgtgtaataaatggtggcgatstgggttgtttctgtatggatcaaccattgtggattatgccaggcacagatattgagtcttaatgaataatcacaaatatagccaatctacttctatcaaaatatctttatttcattataccaaagaataatagaaaaccaattgaaaatgttattttaaacaaagtgagactcatttagagcattctttgctcaggaatcactgggagtgttagttaaaagcgcagatttctttaccttaggggcagaaccctccgaacttaaattttgaacaggaacccaaatgagtgcaaaaaggtgatcggtgaccatggtttagaagacactgacttagaataagggttgcagtgattcttcaccctggctacatgttagaatcatacgggagcttgaaaaaaattatggccaagctccccctctaccagctgaattggaattttgggggatgggacttgggtaccccctattaattcagggttgaggaccactgaggcaaataagctcctggataccacttcaataccatgtttattaaatgtcattgtcactacattaagaagagtgtgttttaagaagagcctttcttttctacacttataatgcttccatgttgaacatctctgggacttgtcctcatgagtttattccttgcgtgttggaaccctcacaaattctttccttcagcctttgatttgctttctagcagatagtaaattagcatctaagtcattcccccttcctggcatccactttcccttctggcaagcagaggagatagggagaaaaaacaaaaagacacagtatgtcactatttccaaatcagttctctgagttataacttctctctatcactcattctcttttccaacaagaattcaacatttgattctcacaaaattctggcttcctgcagtttccaaaccattatacctgtttgacaaaattttgtgttctctttccttaaagagattatcttcttctgaattatatgtgtatatgtatataattgtggtaaaatatataaacataaattgaccatttaaaccatttttaagtacattgttcagtggcattaagtacatttacattgtttgccaccatcaccaccatctgtctccagaactttttcattatcccaaactgaaactctgcacttactgartaatctctccatttccccagcctttggtaaccaccattctattttctgtctctgtgaattaattggactattctaggtacctcatgtaagtggaatcatacagtatttgtccttttgtatctggctcaaggttcattcatgtagcatgtatcagaatttcattaatttttaagggtaaatagtatactgttgtatataaatgtatgccatgttttgtttatacattcatccrtcaatgaatatttggatttttccattttttggctcttgtgcataatggtgttatgaacaaatgaatatttgatttataaatatctgttcaatagatatattttacagaatcattttatccatggttttttcaagccatgaagtgtagttcttagagtagaaatcttattcccttaaaataatatttgtggggtagggacaaatagtatttaattcctttctccctttgtgtcatctttcctttgctattttgttttcattatagaattttaattccttcttgctaaattgtttaagtcattaagtcttccatgttactcaattctcagtattcgttttccttgacctactagttgaccttgagatgactgatcaatccaacctctttggaaaactttcttaatattgacttgcagaatacctggccattttggttttcctcctatgtcactgcctattccctctaagtctcctttacccatacctcctaatgttcctaatctctgcacatggaagcaccccaggattcagttctcaccgcttttctttatctgatctttcaataccatttatacactgatgactcccaggtttatatctctagactggacctcacttttgaacttactcttatatcttgcttggatgtataaaggcatcttgaattttaacatgtctaaaactgagctcctgctcctttcctcastgccccccaccatcagacctgctcctcctaaagtcgtcctctttcagtgaatggccaatctgctcagacactttgaagggcttctcatctcacatagaatcaaagacaagtagttgcagtggcctacatggctttacacagatgctactcagtgtgctcaaggatccacatctggctgtgactgttgtatcccagccatgaggagatcagtatagaaaaagagagtagagcttagaaacttttatagcagtttgacagcatgattttatgtctattgaatctaataataagttggggcttatattttgtctacattttttttgatagtgaaaagatatatatttagaattagctgggttcattttagatgatcccaattttgttggcaatatccaaagcattgtaatcaggagctaatggaatatatgccttcctctctccgggcctgatcaaggtgttgaccttggccgcatcagtgtcatagagcttccagcctgtttgatgtggtgcttactagctttaatatccacaaagaacacaagcatgttgttgtcctgtcttcttcctggccaactcagtggtcaggggaacttgataatggcttgtttcctcactgccttcagtgaggaagccttatttaattgtctgtctctccccagagcctagaagaatacttggcacatagtgggtatacagtaaataattattaaatatttgaaatctgagatgaaagttaatgaatgtaggtatgggaattgtacaagggataggaagtaccttggagaacttctgtaagctccaggcatatactcaaagatgggaagagtaggaatcagcattttcaaaagtcattggggatgcccatttttttctgtactgtaggaagaagggtttgcctgatcttacaccattgttagagcttgagctctgaacaagtgaaggtttactctttgttctttttttttttttttttttttttcatttctaggccattccccgatttaaccagaaaggagaagtatataaggcacagataatgaatgtgagctggtcagctgatcacagagttattgatggtgctacaatgtcacgcttctccaatttgtggaaatcctatttagaaaacccagcttttatgctactagatctgaaatkaagactgataagacattcttgaactttttgagcttccaaagagtatgtaaaccctagctgtgccagcacatgttcatctttacaatttatattgtaaaygatttgtatcgtatgattaaggatctaaggcacaatatttgtcactgttctattagactttttactgaaaatgaataatggtgtaatggttctcctggggctgtcacattttataggtcagagtgtgacttcttaatatggtgctgatgtttttgtgtcaatggcttgaaactggcaagattaacaaaattaggccgggcatggtggctcacgcctgtaatcccagcactttgggaggcccaggtgggcggatcacctgaggttagaagtttgagaccagcctggccaacatggtgaaacctggcctctactaaaaatacaaaaattasccgggtgtggtggtgggtacctataatcccagctacttgggaggctgaggcaggagaatcgcttgaacctgggaggtggaggttgcagtgagctgagatcgtgctattgcactccagcctgggcgacagagcaagacgccatctcaaaaacaaaaaaacaaaattcatgttactaaaagacaggtagccatatacagacagtatatgccctattttttttaactgactcttaatgaaactttaattttacttaattaagaaatggaatttatatacaaaaatattttccatttccgttattatgctaattgttgtatgaaataagtgcaattatacttctcttttgagatatccaagagtatattcttgctctgtatagagaatatcatctgatagtgtcttatttatattaattaatgtctttgaaaagggaaaagtataaactggccttaaaattgtccaattatagttttataaccagtctattaaaggtgtttgtttaaaatggatatagttttagatttgtggtaatgctttggtattttcttggggaagaccttcacctttgcaaacttccctcatgtaaggaaggtactttaaatgtagcagccactgacatttctttttttaaaaaaaatttgagaagtctacttccttttaacttttttggtcttcagctaaaaaataggataagaaattaaggtctattccattctccatatcctgggtaagaatgtaaataagaggagaaggaagagtctaatagtaattatggatataaaaaataagaaattttgtatagaaatgaaggtttcataatgatcattttgttaaaggtctactttaatcagaaatagcaacgagatgaatgtatccaacatttcaatttgcattcggaaatccatgttgtttctaatattgtccagttgaaaactgtatgccaaaattagttgtttaagtgaagttttgtgacagaaaaaaggttgttttaatatctacttggtttttctcaaaatggaaataattttaaaatcaggaaagaataaatcagccaggtgtgatgacttgtaactgtaatcccagttataggggaggctgaagcaggaggatcacttgaggccaggagtttgagaccagcctgggcaacatagtgagatcccatctcaaaaaacattatttttaaaattagcctggtggctcacgcctgtaatcccagcactttgggaggccgaggtggccagatcacctgaggtcaggagttcgagaccaccctggccaacatggtgaaaccccatctctacagttttgtaaaaatacaaaaaattacctgggcctggtggcacacgcctgtagtcccagctacttgggaggctgaggcaggagaattgcttgagcccaagaggtggaggttacagtgagcagagatcacaccactgcactccagcctgggtggcagagcaacacttygtctcagaaaaaaaaaaaaaaaccaaaaagccaagtgtggtggtgtgcacctatagtcccagctactcaggaagctgagacaagaggatcaattgagcccaggagttcaaagctgtagtgagctgtcattgtgccactatcctccagtatgggtgacagagtgagacctggtctctaaaaaataaaataaaataaaaaaaacaggtcaaataaatgctgttgttgtaaaatttcagataatacaaagagttaaccaataaaagaaaaagtcattcataatcttaccactattaacattttgatgtatctatctgtatgtatggctattcttttttgttaaaacatgatcatagcatatctactattttattatttgatttttaaaatttaacattatattatgggtaaccttacatgtcaataaacaattccacattgtcatgctttaaatggctgcataggctgggtgtggtggctcacgcctgtaatcctaccactttgggaggccaaggcaggtagatcacaaggtcaggagttcgagaccagcctggccaatatggtgaaacctcatctctattgaaaatacaaaaatcagccaggcacggtggcaggcgcctgtagtccacctactcgggaggctgaggcaggagaactgcttgaacccagcggcagaggttgcagtgagccaagattgagccactgcactccagcctggtgatagagcgagactctgtctctaaataaataaataaataaataaatgtctgcatagtattccattgtatgcatttattatacattcaaacattaaacatctaccataccaatcatggttctaagcatacagtagccaccttcatgcttccttgattgggcttacagtctagtaaggagacagatattaaataactgcataaaacactgttcttggtaggtaataacccagatgctatgagccatccagtaaaggttaccgatcttatctggaaggatcagaagatggatgtcccataatttaaccaattatctattgataggcatttattgagttttaaatgaataatgacatgatcaataaaaatgtcctcctcacttaaagaatagaaaaaccaggagaagggagttctgaaataagtaagtatgtaggtccagcatcaatggctcaagatactctattcccaaataacccttaagttatctggttctattccaacccttgggtattactatcttctctttggtctcatgcattgagaattcagcaaaggatttgttccctacagtgtgcacggcccttaggatagcaggattccctgaagagggccaaaggggcaggagtgcagccttagtggcagtgctggtccatgaggctctacaaagcaagggatgggtgtttgggaggaggaaaaggctcttgctgtactcctagaggttggaattaaagtggaaaagccagaaaattcaagtcctttactaacatgtctggagattagaaggtatatgtacatgggggagaagccaaaattattgctgcgagtggtcagcaagaaaatcaaggctcttttcattattttgagcattcctctgatatttgaaaaggaagtacaacaggaaaggaagtctgaggatggaagctaaaattggtatgaatttatattttagagatcaaaatgtaccttatgttgaaacctatgtaagaagtgattatgtagaaagagtgaaagtgatagctcttagtctggaaagcccactggcttgtttgggcatttctcatggcttcccactcaaagtggatccccaaaatcacttgatggatttccttgctgatttctaagtaaactatggtttaagaaagaaatgacagggctcagcactgccctacagtaccaagaatacaaatgtttccatgaagtcttcaaaggcatttgtaaaattcaggctgtaagtgattagttagttcattctgcacttatttattaactgtatattcagttccaggctctagggtagagattatggataaaggtgaattagatagatgaagtttttgccctcacagcaaaagctttagccaataattaaagctatcactggaagtgggtctgtgccaataacctagagaagagcagtgcttttagagttgagctatattcccaatcagttcttaatggtggttttacccccttccctctacactgtcttttcttgagattggatcatgtgtgtgaacccacatcatttccagtcaaaatcaccaagagaggccggacacagtggctcatgcctataatcccagcactttgggaggcctaaatgggtgggcctcttgagtccagagtttgagaccagcctgggcgaccccagctctaccaaaaaaaccaaaaaacaaaaaataccaaaaaaaaaaaaaattaggccgatgaagtgacatgcacctgtgtgccacctactcaggaggctgaggtggcaggatcacttgcatctgggggcaaaggctgccgtgagctgagattgtgccattgcgctccagcctgggcgacagagcaagactctgtgtgtgtgtgtgtgtgtgtgtgtgtgtgtgtgtgtgtgtgtgtgtgtgtgtgtgtgtatacacacacacatatatatacacacacccccaggagaccttttgtctttcttggttcatgtgcccatcagtgtgggcaggagaatagaatactctgtccacacttgagtcttagtcacctttggagcctaggagtcagccatcctcattcaactacatggatcgagaatgggaatctgggagaatttttttatgggcagattaaaaaggaagttaactatgtaaagtaaggcattgccttcccaccccatcccacctcagttcgtgttaaattatgaatttttctaagagagttctttaatgacatggatagagaggaagctgaggtggcagtagagtagggagtggaaggcaaatacataagatactattaaactgtgaagctgtttgttacaattccaagattttataatttctccaacaaaaaacatttgtattttcttcccagtttaagttcaatgttaatttgagaaataattctactctcaaacttcatgttatgctgacagttcaactgatgctgtcaaaatgtgaattactaacttcagtattctctattcatctgatttttcttaaaatgtttgcgtgttaatatactcactagctttaatgctctactcttatactggcaccttaattatggtgaaaggtaaaaggttaagttaaaattcccaatcctagttatttggtcaaacagaagattaacagaactccatggcttaccacaggaatatttatcaagagaaaaagaagatacctatttgaatttacatgacactttctgtgaaatatctggattaccagattagtccgaaacaaatgccttccaaattctacagcgcatgcccaaggcactctttacagtacctgttcgggtcttttcttctaattttaagcacctacccaaacgtcttcccaggcttgtcataataagcaaataacctcagagcagacaaagtgattcaatctaagaaccttgaatttctctccttttcacctcaaaatttctattctcacactttctttttgtttctctttccaagaagtggttctccatcagcaaataccaactgttttctgtcctctattatttattccatctcttcctcctgatccctgccccatgttgaacccccattgccccactttgatccttcagtctcttcctcacatccagaactgtaccagatttactcccttagcacactgattaaaatttatttccatttccttatggaggaggtattagagactgatcccagacctctacaaatttcattgtggcagggtaatgttatgtgtccataaaccttgttccttttctttcagcctgcagttaggtagagccatgtcatttatttgtaactattagaatatgggtatatgggttgaagtaatgtaggccatttccagacatggcccataacacttctcaagagattcttcatattctatctcttcccctccaacatgcacccttcaaggttgaagatggcaccacacaagatagaaggagccagtgttccaaatgactaggcagagcagaatgctcccctccctacaccctagcaccaattggtttggatgtgatagttgaataatacacttttattgttttaagacattaatattttgagattaatctgcaagtctagttagtaaaactcgaactctgagctgtctaatgcagtagcctctagccacatgtagctatttaaattttaattttaattttaattaatcaaaattcaactcagatatactagccacatttcaattgctcagtagccacactaattaaatttaaatttaaatagctacatgtggcttatagcaccataccagatagcacagatgtagactgtttccatcatcacagaaaattctattggatagtgctgccttaactaataagacacaaatgttcttattttttaaatagtccctaaaacaaacgaaaaacaaagaactcccttctctaatggcaaatttcagtttgcctaaaagaagactcagaatgcttttcttatattgttacctctgactgccactaaatgaataaatttcctgtcttgctccttctgccaaacttcttgaatgggtgatctttaactccttgcaatcctggcttttttccccagtgctcacctgtaatcagtgttggccacaactcccacccagatgtctcctaaatagttctctgaacccacctctgtcctgatctacagacattcattccaatgctttagcatttcaaggtcatcaaatgactcagtgacatctcagacagtcagacagaccaggtcaactatgaactatttatgccaaaccttacatggttcatgttatccttgctatcccatcaaaataaccacaggctttttttttttttttttaaatttttgagatggagtctcactctgtcaccccgactagagtgcagtggtgcgatctcggctctgctcactgcaacctccgtctcctgggttcaaacagtgctcattcctcaactcccaagtagctgagattacaggcatgcaccatcacgcctggctaatttttctatttttagcagagatggggtttcgccatgttggccaggctggtctcgaactcctgacctcaagtgatctgcccgcctccacctcacaaagctttgggattacaggcatgagccacggtgcctggcctgcagcctcctttattttacaaaaggcattaccacttaaacactgaagatagcacgaatctctgatgtttgcaagttcagaataaaatggaaatgaaaattcattatgtggcagtctcagtactgagcacaaaggcttttaaccacaagcaaattactgtgctagccagaccgtgtgagagaactccaggccagcttgctaaaactgagcaggagaatttggagagagtccagaggagagccacagaaacaactgaagcatgacaagaataattgcagttctgttatagagaggtcatctatatcaggcttttatggagtaccatgtggaatgttaccacgcagagcatggggaacagctgttgtgactcaacaagagacaggacagaagaaatgagaacaggtggaagatcaataatttaggtttgatatggggaaagatggaacagtcaaagggattcacactgatttttggctgagcagaaggcagagtctcctccaacgggcaatgtaagtgcccccactcatctacaccccgagaagagccatcaaactgtattaaacttggaaaaagctatttaacttcaagtgtgctgcgagaaaacttcataatagttcctaagatgtgctaaaaagtaaagtccaaaaagatcataaagtctgtagagaagttctaagagtgcagtcagctataaaaacctagcaatttaatttcttagaaaaatgtagctggagttcaaactgtagtaacaaaggcaagtaaattaagttgtgggcaggtgtaattaagttaataggaatggcagggatgaatataaatcagaacaggactaacagtttgaaacattagatattcaaatgctcagagctgatgagccgagc

SEQ ID NO: 95530 - DNA, 18242 bp, Homo sapiens
  misc_feature (1)...(18242): n = A,T,C or G
ctcagggtgggaggggggtgtgagcgctgctggcagtaacagttgcgggaggatggagcctggcactgcaaggtggggctgcgaggacaccgaggccagtgtggatgtgtgctgcaggggtgaccttcctgggggtgcctgttggatccgggacgggtctgagcctgggcctgctgggtgggtctctgggatgcagaggctggctctgtccgctgacagcgctccggcccctcccacagttacctggtgatgccgttcatgggcaccgacctgggcaagctcatgaaacatgagaagctaggcgaggaccggatccagttcctcgtgtaccagatgctgaaggggctgagggtacgggcccygggggaggctgcagggaggcaggcagggcctcggggctgggcagaggagggccctgtggctctgagagggtgcgctgaagcctgccaaatcctctgccccccgcagtatatccacgctgccggcatcatccacagagtgagtcccggtggagaagccgctcatcagccctcccccagtgcaatccccccgcctccacgtcccacctgtgaggatgtgatggggtctgggggctgagccacgccctatgcacagcccctggtgggaacctgcctgggtgcccaggtaccttggtctgcccttgaagggctgcagagagcaagggggccaggtccggtggccccatctttaggtgccacccaggctcttggctgtgcccatgcttgggagggtggggcacagtggccacctttcctctgcccccaggacctgaagcccggcaacctggctgtgaacgaagactgtgagctgaaggtgtgtgctgcctggcagggggccctgaggtggggcaggggccccctctggatctgcccatctatccacctgtcaggcctgggcagggggccaaggtcccaggctctgggcagtggctgaggagctggtgggtgggtgagcccaagaggcagtggtacacaacatgccgtacccagggcacctgctccgtcccgagggctgctgggcttggtgcactggccagagggaggagctcggggcagtttggggtccgagggcgtggcctcaagtccttgaaggttgtcaggaggccccagcttgggagcttcaagtccaaccccccggggtctcctggaccgtgggtggcctgtccgctccttgggagtcccctagaacccacctccccaattcttcccacagatcctggacttcggcctggccaggcaggcagacagtgagatgactgggtacgtggtgacccggtggtaccgggctcccgaggtcatcttgaattggatgygctacacgcagacgggtgagaagctgcccagagatctgggcctctcaggctgcaccatctgcttctccacttcttcacggacagccctgtggtggctgctcccagggaggctgttgagctggggtgggagccgggcaggtgggctgtgttggtgtctcctccctccccgtctcatcctgtccccctgcccacggagctgaccagggcttctatctcagtggacatctggtcygtgggctgcatcatggcggagatgatcacaggcaagacgctgttcaagggcagcgaccgtatcctccagccgcagggcggcaccaggggcgggtggggatggctcctgcccaggtgggggcagtgggggccctgatctctggcccccgagctgtgttcctgacctcggtgcagacctggaccagctgaaggagatcatgaaggtgacggggaygcctccggctgagtttgtrcagcggctgcagagcgatgaggtaaggggtgagtggggagctgggtgggggtgggggcggacctgggccttggtgttggcccctcaccctttcttcccacacaggccaagaactacatgaagggcctccccgaattggagaagaaggattttgcctctatcctgaccaatgcaagycctctgggtacggctggctagtgtgggggccaccgggtgctggagtgtggggcctcccgtggtctggcctgatgcaccttcccccgcagctgtgaacctcctggagaagatgctggtgctggacgcggagcagcgggtgacggcaggcgaggcgctggcccatccctacttcgagtccctgcaygacacggaagatgagccccaggtccagaagtatgatgactcctttgacgacgttgaccgcacactggatgaatggaagcgtgagtggggggctcctggcacggcctgtgtggacccaagtggggggctctgggcagggcctgtgtggacccgtgagttgggggctctgggcagggcctgtgtgaacccgtgagttgggggctccgggtagggcctgtgtggaccccgtgggccctgtgcaggtggccaggctcagagtcctagatccccatccctgggatgcaggtcaggtgaggaggatgggaggtcagggcagcatggggccgtgtggcctggtggagatgacctctggctggagctggaagatgaagggaagggtgttcctggcaggctcagcacagaggctggcacagaaggagccgggagtggtgaaaggcagctgtgagtcagggaaccagggcccacttagcccctcctggcccccagacctgctgcccttccgccatgtccaggccagagacctgggccaccctgacaccctcaccacgtccgcttgtccctaaggcctctctgctcacacctcctgaatctgtccttgcctctccttgccccatttttgttttttgagacggagtctcactctgatgcccaggctggagggcagtggcacgatcttgactcactgcaagctccgtctcccgggtacacaccgttctcctgcctcagcctcccgagtagctgggactacaggcgcccgccaccaggcctggctaattttttgtatttttagtagagacagggtttcaccgtgttagccaggatggtcttgatctcctgacctcgtgatccacctgccttggcctcccaaagtgctgggattacaggcgtgagccaccgcgcccagccctctccttgccccactttaggatccctcccccctggacaactgtatacccaagacagtccccagggcctcgcctgtctcccccagcccccgctaagcagtccagactccaaccccaactgctggggtccatcatcccctataccaggggctatcccctcaacttggagggctggccaaagcctgtgcagcctcaggctggactcagagaagcctccccagctcccgcagctatgctgtggcctgaggctgtgctggacctggcttcatttctgctccaggatggcaggctgtgtcttcttcatggctgcatgaccagcctggggtgggtgtgcccggggaaagtaggtgtacactgggagccgtgccatgtttcaggccctgtcctggctctgcctcgggtgcgggaccttggtcctccacactggctgggtggggctggatgggttgagattcacatgtgctccttacgaccacgggtccctgggtgcccgcagcagggcctccacccttcgctgtgtgcatattcgtgtgcttatgagtttggctttgtttgattaaaggtttctgctgctagaaagataacttgaaagccatgggccataggatcctctctgtagtccccacccacacaactgtggctgaggcctcagctcttaggacagaccgtggtggacatgtggccaagccctggccacctcccctttccctggaaaatccagatctagagcaatggcctcttcacacaaaccttctctcagtggttcagaccacattaggattagagaagggccccacgaggcaccgccaggcgtgtctgtgagcgactcccaggatggaaggcaaaggctgacccccctctctgttgtgcccgcccccccacccccgccaggtgttacttacaaagaggtgctcagcttcaagcctccccggcagctgggggccagggtctccaaggagacgcctctgtgaagatctctgggctccggggtggcagtgaggaccaccttcaccttccacctgagaggggactctcgttgccaccttgaccttggctggggcttgcatcccaaggcatccatcagagcagacgcccgggttccatggaccctcctccccacggccatgcctctgctcttgggcgcccatcatggaggagcacctgaactttctggacaagacctctggccgacctggggatggcctctgatccctggagcagtggcccacttgcccggtgctctcagaaacctcagagctggtggggctccagatcaggccttggcctctgagccctgcctgctctgggccatgcagaggaaggacagagggtgggcgcagggcaccaactcagggacatcccctctcctgggcgacgtcagtggaccttcctgcacccccagcctggaatgtaaatcagctgtgtggtgcccgcgtggctggaaggaaatagacccttttgtagctccctgttctggctgtgcgtcctcatgccgggtcccaccttaagacctccgggcccttggcctgcatgtagaggaggctggcctgatagctcagacccttagagccaggaggggggcctgagcatcccatctctcccaggccacaaagctggtgcccacttcccccaggcctgtgccagtgatcttcgaacccccacgttagggcttggcccctccccttttacggggtgacctgctaatggcttagactctaagccactgtgtgtggatcctgaagccagacccaggggcagggcctgatggggaggagtgttaggatctaccctagctctctgcatcctccaatgccagcaggtccctgsggggagggggcacgctgggcacgttgagacccctgtggtgaagtggtgagcgccagccagtccctggggggacggggcacattggacatgttgagacccctctggcccctgtggtggattggtgagcgcagagggctgggttttattcttgatcaaacctctagcccctactaccctgctccagtggtatcttcgtgcccaggccgccctctgcaggccactcggtgtttccaagggtggcggctggaacacaggccatgggcacctccaaacctgtcccagggcaggggttacagcagagagaccagtgaggggcagggcagggcaggccaggtgtcctcggtggacatgcccacagctggcccagccaaagtggacctgatgagctgccacgacagatgggccttctctgcccagcgaccctcatgcctctccagggcatccgggcctgggggacgtgatcgccatcagttccggagccacgctgacttgtggcatggctgctgtccacactgggcccaaagtgtgggcccataggtggcctgaggactgggggccccaaaattctgtgacccagctggatgtgaactcccgcgggggcagggtgtcccctgggctccagggggcctcaggtttcctctcgggcatcttgctccgtggctgtgcccgtgcctcctatcttcctcagtcccccaccatgctaccgcaaccccggtccagtgtccccacctccaccgaccttgactctgctcttgggccaggggtcttcttggagctagaaccggactcactccctccttaaacctcgggggcggtgctgcgcctccatgcagccacgaccaccgccctgagccggccgcagcgccacctgcctccccgcgggctcctcccgcctcgtggcctttgccctgcagacccctcgcccccctcgcctttcaccccaggtcttcctgcgcccgggccgggtgggccttggggctgcgctggaccctgacccagctggtgcagaacggggctctcatgggcaggctcggccacgggcgttcgggtggggctgcggcgaccactcgcctaaggccgggggaccccgcccctcttggaggggatcggggcggggccaatggggaggcggagccgcagcgcagctccgagggctggcggctcggggcgccgaggcttccgcgcccgctggttcctcgctccggggcggagctcgcgatagcgaccgggagcagggcgcggggcgggacccaggtccgaggcgaggaagccggaagccaggcgcggggagcctcccccttcgactgcagcctcgctccgtgccttctgcgcgcctgggatcccggagcctgcctaggttctgtgcgctcccgcccaggccggtgcccgccgcccgcctgcgccccaggcaggtcccaggcctccggctgctcccggccgaaggtggggacaggcagtggcaggcaccactagcgagggcgtttgggaacccagggtgaccacggcgcagccatggggaccgcgcttgtgtaccatgaggacatgacggccacccggctgctctgggacgagtaagtgggacctggccgaggtggggtgcggggagggacctctgaactgagctcctcatctgccccagccccgagtgcgagatcgagcgtcctgagcgcctgaccgcagccctggatcgcctgcggcagcgcggcctggaacagaggtgtctgcggttgtcagcccgcgaggcctcggaagaggagctgggcctggtgcacaggtcaggacgggggcaggccccacgatggggggcggggcgggcagcccagctagaaacctaagaacctgggcctaccccgagcctgccagcctcgaatacagagcctctccctatgcacctcgggtgggctcacaggcttgaggaagtgacagggtggccactcccaccangaatcccaggtccccgcctcccgcccccctgctcctgctggtgaccctgcctctcctgcctgcccatctgcatgcagcccagagtatgtatccctggtcagggagacccaggtcctaggcaaggaggagctgcaggcgctgtccggacagttcgacgccatctacttccacccggtgcgtgtccccggacacactcacctgtgcagacacacatgcacgtgcctttgagcgttcacagccacggccgccaaccccagccagtgtcccctggtccatacacatgacattgccctgcacacctgcctgctggcactgccagagcctggggctggcctgttctgctcagcagctggtgtcttgcagcctggcacaagtgtgggtatggcctgcaaagggcagcagggaaggcagggggctcatctgcgcccctgcgcccacagagtacctttcactgcgcgcggctggccgcaggggctggactgcagctggtggacgctgtgctcactggagctgtgcaaaatgggcttgccctggtgaggtgagagctgccccttcccctggctgctcctccgtgggtggccctgtgaggggccagggcgaccctgacgtgacccaaatcctactctcacgccgtaggcctcccgggcaccatggccagagggcggctgccaacgggttctgygtgttcaacaacgtggccatagcagctgcacatgccaagcagaaacacgggctacacaggtgtgtgccaggctggctgcaggggggtgggcccaggccacacagcaaggggyrgcgcaggaggcgagagaacccagccagcaccttcccatccctggccgggctcctggaggtgggaggccctgcccctttgccaccagcgctgtctgtacccaggatcctcgtcgtggactgggatgtgcaccatggccaggggatccagtatctctttgagratgaccccaggtgagcaggggtgsggaaaccacccttccctgcagccccagtttttgggtgcacagcctggcctgggaaaatccaggggtgagatacagacatgtgctcaggggtcagcgttctacagggagctgtagagctgttgagggtcctgacctttgacctctggccctggctggctgttggcagcgtcctttacttctcctggcaccgctatgagcatgggcgcttctggcctttcctgcgagagtcagatgcagacgcagtggggcggggacagggcctcggcttcactgtcaacctgccctggaaccaggtgcccaccctcaagccccaggtccccacccagccccctccccctgggcccctcccctcccccacagttcaccctcaagccccaggtccccacccaccccctcccccgggcccctcccctgccccacagttcaggatgtagcctgggatgtcctgccaggttgggatgggaaacgctgactacgtggctgccttcctgcacctgctgctcccactggcctttgaggtgactgcacggagggctcccccagggcagccgggtgggagggggaccttgtgcctggagtgcgccagtgaaggcaggaggagggttatgagctgtcccactcctgtgtggctggggaaggtgctcaggaggggatgggatgggcctggctcgccctcacctgggctccagcccctctctgtcgaccctccccactccggcctkgcctgtagtttgaccctgagctggtgctggtctcggcaggatttgactcagccatcggggaccctgaggtgagggccttgccttgccagggagggcttctggggtcctggggcccaggtcccccatcacacatggctctggttccagggrcaaatgcaggccacgccagagtgcttcgcccacctcacacagctgctgcaggtgctggccggcggccgggtctgtgccgtgctggaggtgactggggagggcacacagggagggtctctgggccagaggcctgggggtcaggagcatgggagccaggtgcccacggggtatttgggaggggcgtcctgcccgggatagagccaggcaggggctctcccggtgacatcccatcccagtgatatctctgccccaatcatgtctccaccctcctcccagggcggctaccacctggagtcactggcggagtcagtgtgcatgacagtacagacgctgctgggtgacccggcyccacccctgtcagggccaatggcgccatgtcagaggtgcgaggggaggtagggcgggcagggccggggtgtgagaccaggtgtcacgactgttgtgtctccctcacagtgccctagagtccatccagagtgcccgtgctgcccaggccccgcactggaagagcctccagcagcaaggtcagtgtggccgggtgctaggctgcaggatcccacctcgggctccygtgcagtggctatgactccgaactgtccctagatgtgaccgctgtgccgatgagccccagcagccactccccagaggggaggcctccacctctgctgcctgggggwccagtgtgtaaggcagctgcatctgcaccgagctccctcctggaccagccgtgcctctgccccgcaccctctgtccgcaccgctgttgccctgacaacgccggatakcacattggttctgccccctgacrtcatccaacaggaagcgtcagccctgagggaggagacagaagcctgggccaggtgggcagggctggcctggggagaaggatggggccgcatctacacctgtgcctgtgtgtgcctgacctgcggtcactccgtgtctgtgtgtccctctggtctgtccaccacaggccacacgagtccctggcccgggaggaggccctcactgcacttgggaagctcctgtacctcttagatgggatgctggatgggcaggtgggagcacctgggaggggttggggatgctgtggacctaggggcagggaccaggacctgccaacgagatgtggcctgtccagaggagggctgggtggtgcagaaccacatggatgtgaacattgccttgtgccaggaactgttcccagaacagccccaggggtggggatcactagtgtgtctgacctctgacctcagcttcttcagttaaatgctctttggcagagaggtgaagggggtgatttaaagtatacatttaggcagggtgcagtggctcatgcctgtaataacggcagtttggggggccaaggtgggagaaacgcttgagcccaggagttcaagaccagcctagagaacatatggagaccctgtcttcacaaaaaataaaaaagtcagccaagcgtggtggtgtgtgcctgtagttacttaggaggctgaggcaggacgatcgcttaagcccaggagtttgaggctgtggtgagctacaattgcgccactgcacgccagcctggctacagaacgagaccctgcctctctaaaaaaaaaaaaaaaaaattatagacgtaagcatcttatttacagaaatggagtgattgaccttagtgtaagaagacgtgtggctgacagtagccgcagagacacaccgaatgaagggaactgtggatctgtttacctggcttgggagttggttggtgcctcattctccactgtttattcatcccacaggtgaacagtggtatagcagccactccagcctctgctgcagcagccaccctggatgtggctgttcggagaggcctgtcccacggagcccagaggtaagcctcacttrgccatcctgagcctctgacggcaggacctgtgggcacccctatcctggctggccaagcacagagagttctgggaatggactctggacaacatgaacacctgtcctgaggccagctcttcttccaggctgctgtgcgtggccctgggacagctggaccggcctccagacctcgcccatgacgggtaggactctcaggtcttgcatatgtccagccatgcatrtggacgggcatgtgatggacgtgtgcctgggccccagggtgacgggtgggtggggcactgtgtggtactgaatggagccttcctcagctggggtgtgggasaagggctgctggaggcaatgccaggtgggtctccagcacagaggctcagcagtcacagcacccctrcccatggccccgtgaatgctcttccacctctgcctctgcggtttgggctcaggagggtgagcagggccttacacttatgcacctgtgtcctggaaggaggagtctgtggctgaacatcaggggcaaggaggcggctgccctatccatgttccatgtctccacgccactgccagtggtgagtgaccatgccacgnggcaaggcaggtgctggggagcccatggatgtgtacagctgctgtttgctggyattgtcatgatagcaggcctctggtccttcctgtctccctgctcctactccaggggccctgagattgggaggttgggaggccagagccagcaggtgtccgtagatgaggagctgggytctgctgtccccacagatgaccggtggtttcctgagctgcatcttgggcttggtgctgcccctggcstatggcttccagcctgacctggtgctggtggcgctggggcctggccatggcctgcagggcccccacgctgcactcctggctgcaatgcttcgggggctggcagggggccgagtcctggccctcctggaggaggtaagctgggcagggtggaggtgctgyggggtgggacgagggraaggaccagtgactgcttccgtcttcgcccctggtccagractccacaccccagctagcagggatcctggcccgggtgctgaatggagaggcacctcctagcctaggcccttcctctgtggcctccccagaggacgtccaggccctgatgtacctgagagggcagctggagcctcagtggaagatgttgcaggtgaggctgactgcggaggcatggccctgccctggggcctggctctgccgcacagatcggtggggagggcagggcaggggagtgccctgaaccagctccagcgccggaggccaactgcgcgcctcttctcggctyctcctgtagtgccatcctcacctggtggcttgaaatcggccaaggtgggagcatttacaccgcagaaatgacaccgcacgccagcgccccgcggccgcgatccggaccccaagcccacggctccctcgactctggggcacggaaccccgcccactcccaatccccgcgccccgccccctcccacccgtgcttcccccgctccacccctcacctcacctcgcccccgccccacccatcgcgccccggcccgtcccatcgaggcccatgcaacccacgctcggtcccgttccggcccctgcgccccgctgcgcttcgctccccgcccttgcgccgttagtaaacatcgctcaaacgaaacgctggctctgcctcctttactgagcacgctcggcctcggtctctcacccgcggtgccggactcaggccggaagtatgccgcggcccaggcctcaccaacttcacgcgctgccggcgttcccgtgacgtatttccggcgcgcccgccctagtgctcttcacactggcgcggctgtgacgcgacggaggcggcgagagcggcagccgtgggcactttccacgggtgaggcctggagaacgggtggacgtgcaggccagaacccgggacccacccggctgagcccccagactctccgctgcccacgaccctcggagtggcaccctctcctggccgtctcctctcgtgggtcccgaagaacgggtgcaaagccgagttcgtccgctgtactgcgcgggcgcgcgtttcgttcttcggttttgccacggttctgtgactccctaaaggttgagggctactgaattagaagaaacgccgagctggcttctggtgggctgccgggcgccgggcagcgtgcttggactggggagggcagggcgtgtttactctgagtagagcaaccgcaagacctcctttaaaaaataccagttctgagcttcggcattggagaggccgcctgtcattcagcctcttcggaccctctctcactccctgtcttccggagcgtgagtgaagcccgggtgaggtgttttcccacacgccgggggcccggagctgagaaggggcatggccagcrtcacgcagctgttygacgacctgtgtgaggccctcctgccggctgccaagactcacctgggccagcgcagtgtgaaccggaagagggcaaagcggagcctcaagaaggtggcstacaatgctcttttcacaaatctttttcaagatgagactcaacagctgcagcctgacatgtcaaaactaccagcgagaaacaagatcctcatgttgtcctttgacttgagagtgggtggcctgggccccaaggccgaccgtttggaggagcttgtggaggagctggaagcagccccttgctgtccgcytttggaggtggggtctgttttggacctcctggttcagctggcagggagtggtccccctcaagttctgccgagaaaacgagactacttccttaacaacaagcatgtggggagaaacgttccgtacagcggctatgattgcgacgacctgagtgtgtttgagatggacgttcagtctctgatctccagagaagagtgtttgtgtcacagcatgatccaggaaacacttcaggttatggaggctgctccaggcactggcctgcccaccgtcgggctcttctcatttggtgacccttgtggtgacaggttcgagagagacacccgggtctcgctcttcggggcccttgtgcacagccgcacttatgacatggacgtccgactgggcctgccccccgtgccagacaatgcggacctctctgggctggctattaaggtagaatgtttagtttttcctctttcatctctctcggggtttggaaaatgcttcctgtgacctttcttcttcttcttcttctttttttttttttttttttttttgagacagtgtctcactctgtcacccaggctggagtgcagtggcgcgatcttggctcaccttaacctccactttctgggctcaagcaattctcgtacctcagcctcccgagtagctgaaattacaggcacctgccaccacgcccggcttaatttttttttttttttgagatggagtcttgctctgttgcccaggctggagtgccgtggcgcgatctcggctcactgtaaccgccgcctcccggggtcaagtgattctcctacctcagcctcccgagtagctgtagctgggatttaggtgcatgccaccacgcccagctaagttttgtatttttagtagagatggggtttcaccatgctggctaggctggtcttgaactcctgacctcttgatccgcctgcctcggcctcccaaagtgctgggattacaggcgtgagccaccatgcccaactaatttttgtatttttagtagaggcggggtttcaccatgttggccaggctggtctccaactcctgacctcaaatgatccacccgtctcggcctcccaaagtgctgggattacaggcatgagccactgtgcccggcccggtgaccttccttttatcatggtaaaaggggggatagtctggtggctgcattgtcctgaggtggggctgctggagtgggcttactggcggccaccctcctctgcagcgacagtgctgcccacctgccggccaaagcaacatgctgcttttcatctttacctaatggggtatatcgttaagccacctctgccttctagagctgccgtttaaattgaagttaattaaaacaaaataaaatactcagttcctcagccccacaagccacatttcaagtgctcagtagccacgtgtggcaaaagtgttcatgttctgtaattcgtgcaattggatatgtttttgctgtctgtcgcctgaggctttaccatggtacgctgtagctcctcatttgagttttgtattttattgctttatcagtgttgccaaaaggatacattgttactagtcgttctattcttatgcgatagctagatgatttagaaacatacataatgctacagcaaatgtcttggtgtacagcagttttgttttttgtttttgagacaagtcttgctctgtcgcccaggctggagtgcagtggtgtggtctcggctcactgcaacctccatctcctgggttcaagcgattctcctgcctcagcctcctaagtatctgggactacaggtgtgcgtcaccacacacagctaatttttgtattttatatgtttgtatttttatttttttattttatttgatttttttttttgacacagtctcgctctgtcgcccaggctcgagtgcggtggcacaatcttggctcactgcaagctctgcctcccaggttcacgccattctcccgcctcagcctcctgagtagctgggactacaggtgcctgccaccacgccctgcgaattttttgtatatttagtagagacggggtttcaccgtgttagccaggatggtctctatctcctcacctcgtgatctgcccgcctcggcctcccaaagtgctgggattacaggcgtgagcccggcctgattgttcttttttttttttttttttttttttttgagatggagtcttgtgtagggaccagccctacagggtctgtgggtttttctctccatatgcggagaccagagatggtagaaataaagacacaagacagagatagaagaaaaaacagctgggcccgggggatcactaccaccaacacgtggagaccagtagtggccccaaatgccaggctgcgctgttatttattggatacaaggcaaaaggggcagggtaaggagtgtgagtcatctccaatgataggtaaggtcacgtgggtcacgtgtcaactggacagggggcccttccctgtttggcagccgaagcagagagagaggagacagcttacaccattatttctgcatttcagagacttttagtactttcactaatttgctactgctatctagaaggcagagccaggtgtacaggatggaacatgaaagtggactaggagtgtgactgctgaagcacagcatcacagggagacgtttaggcctctggataactgcgggtgggcctgagtcatgtcaggccctccacaagaggtggtggagcagagtcttctctaactcccccagggaaagggagactccctttcctggtctgctaagtagtgggtgcttttcctaggcactgacgctaccgctagaccaaggtccgctaggtaacgggcgtcttcccaggtgctgccattaccactagactaaggagccctctagtggccctgtctgggcatgacagaaggctcacactcttgtcttctggtcacttctcaccttgccccttcagctcctgtctctgtatggcctggtttctcgtaagttacaattgtagagcgaagattattataatcttggaataaagagcaattgctacaaactaatgattaataacgttcatatataatcatatttatgatctatagtgtaactattcttgttctatatattttattatactagaacagctcgtgccctcggtctcttgcctcggcacctgggtggcttgctgcccacagtcttgctctgtcgcccagactggagtgtggtggcgcaatctcggctcactgcaacctccgcttcccgggttcaagcaattcttctgcctcagcctcccgagtagctgggaccacaggtgcccaccaccacgcctggccgatttttatatttttagtagagacggggtttcacatgctggccaggctggtctcaaactcctgacctcaggtgatccacctgcctcagcctcccatagtgctgggattacaggcgtgagccactgcgcctggccccggtgtacagtagtgttttaatgttgagtgtgatttttttaattctgggttccccacattggaatttccaggtctgaggcatctcaaaaagtttcactctaagttccactgaggcttatgtgttacatggaattggaaattggcagccttgacgacttattttgtttaattccttaaatggctcattggtgggaaacattgtatggtacacatgcgcttgagaaaaacagaagaaacattttgttaggtctttgcataaagttcctgaaattctcatcgcccttggatgaaacgtggacacagcaataagtggcggtttgcccttccctgtgtctccaggtcccaccgagtgtggatcagtgggaagacgaaggattccagtcagcgtccaacttgactcctgattcccagtctgagcccagcgtgaccccagaygtggacctgtgggaagccgcacttacctatgaggccagcaagcggaggtgctgggagcgagttggctggtgtgtgcccttctttgccttggcatgcagtgcccctacccctgcatgagcgtggccttggatggggtgtgtggggggcgttgtgtactcaggggtccaggcagttgtgatgggttagtaacctaagctagtgtccaaaattgactgagtcctgggagttaagagagatgcagaggggaaagcactaacagcctttaaggaggcctcacctccccatccagtaaccagatcacacctgtcgggcagaactcccctccctgtgccagtaaccagatcacacctgtcgggcagagctcccctccccgtgccagtaaccagatcacacctgccaggcagagcagttggggcagctaagttatgtccttaagagcaagagagctgcctggcaggctgtgtgattagtgccaggaagaaatgctcrctgggcatggggtgctgatgaaggagccttttccattcatgtctagaggaattggggtgctgatgaacacggaaccttttccgtccgtgtctggaggagttgggaggggcagtctgggtgatgagaagctccagctgcagcagctttttcctgactggtaccagcagcttgctctctggatgcggtagccactcactccctggctcacctgggtccagaggcctctgcactcagcacctctcagagtctttaatgtggtggtatcttttgataactcccagaacccaggcagagaatatgcatttcgcctgggcgcggtggctcacatctgtaatcccagcactttgggaggctgaggcgggcagatcacttgaagtcaggattttgagactggcctgggcaacatggtgaaaccccgtctctactaaaaatacaaaaattagctgggcgtggtggtgctcgcttataatcccagctactcaggaggttgaggcacaagaatcacttgaacctgggaggtggagtttgcagtgagccgagattgcaccactgcactccagcctgggtgacagagtgagattgtctcaa

SEQ ID NO: 95531 - DNA, 125628 bp, Homo sapiens
aataatgactttcaagtgtctttaagaaacatgaagttacaaaaacacttctgtaggaatgctgccacaattccaaatggatcaatgaaagttttgctgattcagcagtggcagaattataccagtgtaggtgatgaataacaatcacagtaatgatcgtggctatcatgaatggcctaggctctgtaaggcacttcggtgaagtaggaaacattatcctcattttaggatactgtagacactgagaaactgaaatgacctggtcaagccccaccatcatgattctacagtgcaaagatacaaactctgatctgttgaatccccaatccttgcatttaaccaccatatttcacagacacactcttatgtacttttcttagtaattgttatagttattctcagggaatttgaatattttgaaacgtcctctgattttatagactcatggatttatacttaacaatgtgtatttttatgattaacacatatagtaaacaatccaatattcacagatgtgaaaacagaccaggcagtgatgaatctgagtttttgtgagttggaacccagtgatgggaagaaaacccgggacctacttagattagtcattctcttttcctgatcacatattttctaatgcagattttcccaatgctttactatttatgaagcattttataaatataagccttttcaacatctttgcatagttaagattcattcacccaattttagagatgagcaaactgagactcagagagactaagtaattgccaggtttacacagtaaacattatcagcatgttccaattaacttttgctaacttaataatttaaaaatgttatgttcacataagagtgtccccttacatattagttaagtatttcatttctttcccagccttaatattttattttattttagctcttttcacctggtccattaatttcacatctgtaccttcggtgaaatataactagattctctaataaaatatacgttctgtttgtgataactgtgttaaaagtgaaaacttaaaatactggaaatgtagaacagaataagctataatacagtcgcagagtaaggcattttaaagacatctcagcggtcccaagataaatacgacttgtccaggtcagatgcatctggcctttgagataaatatcccataacaactggaaactcaaagacagacactccaattactaccctagctgtttttcttcctgtttgcttaagaaagcagctacaacctaaattaagcactggaaatcattttgtgaggatatagtaccgtatgatgtcaatatgaagaggtcaagggtgtaatcccaaatgttcctaccttttcaaatttgcctttcagaattttgtatctttgaatttatgtgaatgtctttaagcacacatttcttgagttaaccagattctacatcttatttctcttattcaagcttcaggggcattcctcacatcaagtagtctgggagttagtagactagtgtatttgttcattctccagattcagtccagtaaaaagctgctagatactgccttttgtaggcttttaaataattttagaataaaataccagatactcttacttattctgaaagcagttacctggtctattaaaaatatctctttccaaattttcccctatgagatcttccaccaatctatatgttaatatttgaagttcctcattagttcatactcatctaactttgtgcacccttgaatctccttaactatctctagctcaggtttgacattatgaatacaggttttgttgctgttgttgttgttgtttaaaggagaaatctattcttttggagatgcttcccgtttgtcttatgtaaaactgtctcaatccttcatattacaccatctcagctaaaatttttttctctgtttttgcatatggaatgagaacatttcaggaaaatggcttggcttatgtactatttacccgaaacacatggaaatcaacatttaacattctgtattttttttttggaaatgctcaggtatgtctttgccaacaacattatgtctataaaccaatgaaggtcaaatccttggcccttagaggaaaatctcaatctagctctctcaacaataaaagatttgttgtatagaaccaaactgataataatcttgaggagccaggtacagatgtactgtacttttctagcagacaccttaggttttcgaagttaaataggaagaatacactcacttatctaagccatccacaaatattcaatgctcgcccattcaaggactattcagtttgtccttgtacttcctacgaagatagaggtctcctccaccttgactttttgtacatccatcttctgtctgtgaaagaagaattataaaccttatggatgaggactatatcttcccatgctagttgagcaccttactagtttttttttttttttttagttgctgttcatcagtttattatctatatctgaaaaatcatcatagaaaattgtttggtttggctctcagcagcccgctcctaagctctgaggaagcttgccttcttttgagctacccaatccttcttctgagcaagggacattttggaacggttccacctcttctttttaacttctttcttgggcttcttttcatagaccggattctctggtacagcagcatgagctttcttatacatctcctccatcatgtctggagttacactgttctttatgtattgagagaactgtttcttgtaagcatcttcatcttcttccaagagcatacagtattggggtggagagaggtattggaattgataaatgtttctcccaagatttgtcttaacatttaccatggttcatgttttatggcggagaaacaaagtgggagtgggagtggttaagtcatgcacatctaactataatatgaatgatgagaaattggaaaataaaagttatgaattccacatttttaatctagattattcacgttggtagcagctgagatagggacagtttgaaggacaagacagtgttttgctaagactgacagctataatacatttgaaagcacaatgatgtgcctaagaatgaaattaaggattcaggcaggattgtaaaggattaaatatcagtagtgctgtttttcatctagaaagagccagaaacttaagtaaaaattgaggcaggattccaagggattctttgcagttggaaagatatattttggaaaagaattagcttaagtgacttaatagaaaataaagtgaagaaacatctaaataagtgcctactttggaccaggtagctcacatattctcatttaattgccaaaataaacccaaacgttaaaaaaattacttcattttgcccccgaagcagctcaggcttaggaaggtaaaggaattagcccaagggcacataactcatgctctttcatccaccctgaaccacttctatgaatacctagtctgctcaaatattcatggaaggtgaatttaatactggtatccttataacatgtgttaagattcaatattaactttgaatttcagcactggattgttatccaaccatgaatcagtcaacgacattctttcaccatctaaaacagacaaataatgggggatattagaattctgaaggaatataatatcttattcctgagatggatagcatttaaaggagaagacagaaggtgcacaaatctataaaaatatttgcacacttacaaaaatatgggttcaaccagaatcattctgtaagcaataaaatgagaagaaagtgactggtgatggctgttgaaatgccctgagttacttaaggtaggttagatacatttatgtagaaattaaattttacaaaatgtgccagacataataagcttagcatcatttaatcattatagccaccttgtaaattaggtactagtattatctcaattttactggtgatgaaactaaggcagaaagagttcggacatcatgcccaggcttccagaggtggtaagtggcagagctagcatttgcactgaggcaataccagagtcactgctcttatgctgaacttacaccttttacttcagtgtgaccatgtaagtatgtgggctgtgtttatccggattctgactccttaacccttgacaaattttgtacgtgaaaacagtttcccattgtacttagaggagtcagttcgtttatttactcgacaaatttttcttaagtaaccataatgtgcaatacagtgcagtgctcatgctggggacacagcagtgaacaggtcagacaaggactctgctgtgttgcatgtactgtgctgggcactccatacacattaacaacgcaatacaatgagtcttaattgtgaaaataatgctcactttcattagactgaagaaatgagttgcccttaaaaattaacatcattcttccaaaaattggaaaaatgtctataaacaagacttcaggggcattcctcagcgaatgagatagtttggggggattcctacttagaaccagagtaccagtttaaatacccttacagtctcagaatgattttcttaatgaagccttaaaacatgtatctttgtagtagttatattttcataatataagctgctcatgtccattttggaacagcttactcccactgcccaaaactgcttgttatacacattgcttagtgttgtctatcttgtagctctaagtaattagttgtggaattatgtttacgacaatgcggagggtgaggtatgtatgatactacattaaagaaactcacactgcctttactatcccatcccaaaactaccaatcatttgccaaatttcaacagatttttaagccaacagtgttttgttttgtttttcctgatgataaaggcccacctctaaaattcatcaagctacagcctattacaatgaaccaacattctagaaccctgctaaggtgattccaggttttaatgagcagggcagggctctaaaaatattttcctcctcttgcttgtattcatgcttcctcacctgctcactggagtagaggagtgtcagcctgaggctcaaagaaagaccccttgagagtctgctgactaagcttgcagcagggacccacatggcatgacagaacgggctccttgcacatatgcagttccatagttagttacatacccacgcataggcgtggatagccatggacggatgaatttttgtatgcatgtgctgtgagccagcattggtctccctctcctttatcccgacccctgaggaatccctgcagttccctggaattcagggaataaagaacgagatgaggcaaatagtcctttttcctaccctggtggctgggaccgctcagtgcctggaatctgcaatgcctcctctcacaagcagctaataaagacagactgaaaagatgagcaagagaatgcatggatccaggaaggggccgctgtacaagagatgatgcttcgggagctactgggctatgatttctattattatttgtatatacatatatatatacacaaagccctaggaagctgcagaggaggcaaagaaacctcgctgagatttttctaacagcgcctagaaaccaccgccaggctccagcccygggctgggtcaaggaattcgagggatgcaggctgaacgcaccggttgaaactctgggcgccgcatcggcactttgcgccttggtgggctttgcgctcggaagacgcgtccacgcaccattttcccaggcgttgtgcgggtttcttaaacctctcagctggtgcctcggaagagtttctggaagctccatctctactgcctcccctcccccscttttgattttacccccgccaggagcttctccagccccacagcgtccgccctgtgaggggtacaggtgccgctgtcccgccggctgccgccccgtccgcccacgcagcgcctcctccgggctagcctgggggattgacccagcgccgctgcttctcgaatggtctcgtgcaggggcgcagcggccgctgcccgtcgcccgggactccccgccctccctcgcgaccccgcgccggggcgggcggcgcttgcggcgggcagggggcgggcaggggagagggggctcgtccgggggtagccgcctcctctgcagcctgccggcgcctcgaagcccggacctgcctccgcctcttcctccagcggctccatcccgcctcccgtgcctcgtcctcccgccgcctccgccgccgcgcccccggtggctgcctcggcggaccggggagggggcccaccgcgtcgaccgcccgctcggctcggctcggcccggcccgggaggcgtgcatgcccctgctgcccgcggcgctcaccagcagcatgctctatttccagatggtgatcatggcagggacggtgatgctggcgtactacttcgagtatacggacacgttcaccgtgaacgtgcagggcttcttctgccacgacagcgcctaccgcaaaccctacccgggcccggaggacagcagcgccgtgccccccgtgctcctctactcgctggccgccggggtccccgtgctcgtggtaagcccgggggcgctcgccctcgtcgccgagtccctgatctcgcccctcgccttcggggttgaggcccctctaagggttggggcgcagtaggttttgccttctaagttcctccaagttatgggcagccccttccccagaggacattctagggcgcgtgagggtgggtgcgaaggaagcccccagctcttcccacacgtcacccccccacaccccgcggtggcttcagcgttgggtgactgggcggggatggaagggaagaggggccgtaggtggtgaggagtggggatccgggttgcaaaggaggtgagctttgggggtgaaccttgattccatccactctgtggccttgactcgctcactgcctcctcttcgattgtgcctggaagaagagcagcggcgggcgggccggcgaggagagaggggatcaattgctggggtgtgaaagggactcccacttcccgagtcggggcacgtatttctatttcgccacctccctccttttcaggtgaaagtgccaatgggactaagctgaccagggaacaaatatctgaaaaaagaatttgagaatttctaaatgaagaggcctcagcaccagtgctttgctgaaaagcaggagctgtacctcaattacaagagcacttcagatttatttaaaggctgctccgctccctgggcaatttaagtccttttctcttagaacctcacagagcatgccttttggatttattgagtgtatgtgtgtgtgagagaaagaatgactatacagatacactcacgtgtatacacacacctcacatatatacatatgaaattattggggataaattacacataataatattaattttattatagtaatttacatatgtgaatatgctacatatttattcttaggagaattgttggtgtttctttagaaaacctgatattttatggttcctttaatattgacaaagtattggaggttcccttcctgtgatgcgcgctctctctctccctcaacagataacaaacgggaaataagaaaatgaaggggaaaggaagaatgaagttttattttcagtagctaaatgtgtaaattgaatgttaagaatgtctgttgaatccattaagtttggatgttcatctttttttttaattttaggagcaatgacttactaatttgtaaaataatgaaaagttcctaacacataagatagaaatcagtgaacaaatcaagtaatttcttgataaccttaaagtaactttatcacatgtcctgtgatagttgacttcaaattgcctctgtcataatggtttgaaatgtgttagaccttgccccagataatgttttacatatatatatatatatatatatatatatatatatatatatatgtaaaataagttgctaaaatgtgttagaagccccaaatccagccttcatgtttgtgttctcttttctccatttgacaagctggcagagaaaaaaaaaaaggtcgatttttgggggccctttttactttctggagatcggggtttcccatgtacagttttccaggagactaaatagctcagatatttttcaaggattgttttaaagaaaaaggaagagcctgtcactttcagctcattggtttggtcatagctataatcaataatgtctgtaactcatcctttaattcccattctatgtcttatttaaataagatagcacttttcagtcctaaccatccaatcatggtggcaggtgctagttagagacgagagcacactcacccaatgatttggatgattctccacttaggaggaatgtaggacggagaaaaagaatgaattagtcactatttagtgcctactctattttgggtaccgaatagtcatagtcacgtatatttctcagagcagctctttcaggagatattatctccaattaatatttgaagaaagtgaggttcagataataaggaatatctgaaaacaaaaaaaaaggtgggtatggcatttgtatgcctataggacggatgcctgaatgccatgcgacttacattgcttccaaagagcttgttctctgaaagaaggtggaagctggctggtcaggcaggcattgagaatataagtggatagatttttctgaagtcagaatccaacttgatttcgatgttttggcttttagttcttttaggtacaagagaatgggtttgggaatcagtttagaagagaaggaagtggtaggtttgggaggatggctgtgctgctggcatttgttttcccttctgcttctaggaatagtgcactctgtcaccatgtgaggagctgggagcagtaagggcagctctgcctctccactcttctcaagaacgctgggttagcatgctcacttgggcatcaaaataataataataatattaacagtacccatcatttgttgagttactactttcttccatatactctaataaactttctacataccttatatccttctaatatttgcattatctctgaaagcaataattattattcttatctaacatttgggaacatgatggcttaraaagattaagtatcttctccaaggaccaaggctaagaatgttacacccagaattctccccctactctgtcatactctcaagtgtggtttttctattacaggatgaaaattcaattcgctcatgaatcgttcttctaaataaatgcctcaaatagtctcttttacattttttgtcctgtagtaataaagcttcatatatatatatatatatatatatatatatatatctttaactttcaaactcatttctagttcttgagagtaattttgaaaagtcgttctcctcactaccacagtctacagatttgtttcatacttgctaaattcatttatgtaaaaattaaaaacaatatatattttgaattttatcacttttatataatgctgactagggctcaggttccgagtctagtaaatttggatttaaatccaaagcacactctgctgcattgttaagagttgggggtcggttgcggtgactcacgcctgtaatctgagcactttgggaggctgaggcgggtggatcacaaggtcaggagatcaagaccatcctggctaatatggtgaaaccccgtctctactaaaaagtacaaaaaattagcccagcatggtggcgggcgcctgtagtcccagctactgaggaggctgaggcaggagaatggcgtgaacccaggaggtggagcttgcagtgagcagagatcatgccactgcactccagcctgggtgacagtgcaagactctgtctcaaaaaaaaaaaaaaaaaaagagttgggaactctacttgctgtgtaatcttgaacaatctatttaagctctttaagcctcaattcccttattgacaaggttttgamtatcaaattagttacaatatgtaaatgtcatctttggcccatagttgatactccataagagttcactacatcattaacattattgttattaagaaaataataattcagtaaaaatttattgaattcatgtgttccaagcattatatctggctgagtagaggttataaaggcaacttcagaagtaaaccatagtaactgatcctaaggcatttacagtctaatttgtgaaattagataaacataccgcagatcataatataagtaattatgacagaagttatacatatgtatgtatatatgcatatccatgcatctgtatataccacaaagacctctagtggttcagaagaggaggagatagatcacttttgtttggagacatgaggaaaggcttcatggagaagatggtggtatttaaggtgtgtcttgaaggagagactgaaatggaatttgagttaggacatcactccgtgaacaaccccttggaggcagcaaatggagactgcactcttgaaacagcagttggtttgtttgtttctaagagtggtgtgtggggaaaatggcgtatacatctgaaggtgaaggctggggtcacattgataagacctgaaatgccatgccaggctgagagattttctcagtttggtaggaatttagcagagataaagtttgatgggtggtggtttaggacatttttttaggtagcagtgtatagtactctaatgttatcaaagtacataatttcaaactcttcatctccaagtttattttgcattgtctaatattacttcaattgcattttcagaaaacgcctgtaatttgggcttatttacagagatgatatagtttatatactctttgaaaataggtactgttcagtttgttctgtatagcatttgccagagcactggacattgcttgtacagatacaggtttagttagtgatccttggtgttcattgatgaaaagaactggtgatgacagtggtttctgctccccaaatttggatacagtggccgctagcagctattgttccttagatctctgagcaacatagatgatttaaaggaaatgaagctagatcaccatcttcacaaagctagaataaagataaagaaaaccagcaccaaccaaggcagccctggacactgagcacggcaggtttgaacattaaggtacatctcagattatttatatctgccactccaggaagctccctctggacccggagactcagatttgagaaatgtagctactgctgctatcccaagggtgctggcgtcattgtatgtggtacagatagatgatagaaagtcatctcatacctagagctccccattggatcaacctgcctaaagctttcccatagacctcttttcccccaaaccctgccttgggcatcactgcccatccccattcctggaacattcccgtggtgtggtgtaggagaaaaagcacagacatgggtttcagatgtgtctggattcttatcctggtttctcccacttactagccatgtaacctcagtcaaaatgttctcattcataaactgaacataaaaacacccacctcttggagactcagtacatgcacaggttaagatcacagactctggagccttcttgggtttgaaggccagatctgctactttccagctgtgagaatttgagccagttagcctctccatgcctccgttttctctattgtaaaattgaggtaaatataagtactggcctcacaggattactgagtatgaaatgggttaacatgtgtaagtatcagagcagtgcycagctgtatacgtgttagctcctattaggctttccaaggctgtgttgattaatcaggaaacctctttaaagcacctagcaaactacttttgtttgttagtggattccaaggctggtaagaaattaaatgtggatagaaaccacctagtttagtctactgaccctcacaaattgggagtctgaataggaagaaaagcaaaacttaagcagaattcagttcttagaatgaaattaatgattcctatctttggtgactcctctgtttgtccaagtgggctaacattagctaaaattggtcatgcatttcttatacaccagccactgtgttaggtgcatttaacccattgctycatttaatactccccaggatagtactttccttaatcatattggggactaacattaaatatatttattttataaatgagaaatagaagtttagtgagattactgtatgtcagactctaattatttaaattcattaatgtaatcaattttcacaacaaatttatgaaagagatttggaagaggttagatgaccaatctggagtcccgtgatggcaatggcagaatcaccaaaggctgtgcatttcattttttgttatatacttttatcctaacatgttaattagtctttaaagattttactcatagtgattcartaccaggagtcaaaattttctcaaaccttttatcctcgatttcaatgttcctgcttcgatggaaaacttcgtgttctatcgtagatgatgatttcaatgggtggtgtaggaaatcgtttgtttcctattaagcttggaaatgttgtagaggagtaggtggcagcagaagggattcaaagatatttctattgttttgatttaaaggcatgtgtctcatctcagtaacacacactactacagtgctataagcaccacctttatgtggaaccaccctctggttctagatctgcaaaccgtggtatatggagaggtggaggtacttctgtttctaaggcatgctttttaaaatgagacctggcactagatttgggggtgcagtgactccttcttgtgcctcttaggattttggttcacttagatactttcactcatactgatttttctcccttctttcctgtttccctccctttctttttccctttctctcttcattcctctttgtctctttttccacttattttctctcctttgcatactgctaaggagatggtgatgctgagggaaaagcaaagaaccataacaccagttagtgtttttttctcccttcacctcttccacccttctctctctttcctgttcctgtctctccctctgtctttcattgctcactatccatgtggcttctcttgccagttccttatctgaaaaatattgacttatttcttcctacttttcagtgctgttgtgagaatgaaatggttgagaaaacactgtggagacaataaaccacttcatacatataaggaaaatataatgtgagcaggttacatgggttatgtagctacctggtcattggagatggttagcactgcttgcagcactactttgccagccttagtctgtggtgtggaaaaatgagtaagatttttatactttttttcctgattttcctatagaaagaatagcaaagattaaaaaaatgtaaaatggtctcctaactaattattaatgcaatacccaaggctgttttcaaaatatttcaataagctctgagtattgtcaacatgattagaaagaatcatctcgttcattttgtactttgaaataaataatgtttctagggagcatagctgataccatgtattaagtatgtcgtgtatcatattaatttttaaattggtactgtgccacaaacacattatttgcaaaagttttgaaagacgacaatgtatctactatgtaataggtatagtgctattgcctgggcttctaaagtaagtaaggcatatctctgcccttcggaagttcagacacaaatacttaaaattacatatccaagcctcagtttttttaatctgtaaaattgaaataatacttaacctgatacctgataagagttaaatgtttacatgcactaagtgcttgataagtgatagctagtttgttttacataaatgctaataatttttattgataatgcagagcaaatgacattatgtgtacttaatcatttttgttgaatgaatgaggtaaaccatttactctttaatcctttcagatagcatatgtaggaacatatgcagggagctttagtaatttgctccagttggtaaatgacatatctaggatctgaacctattacttcaggtccaatgctctgttggctgcagttgcccactgatttgatttatagcataaatgatggcattcctagcaggcaagggagagttaaaacatattragtatacatcaatatgttcttacaatatccacatgcttgttaatatataagtttagttacaaccaaacataaaaagaagaaaataatctatgtttaaagataaaagtttattgattcctaagaccagtggaatagccagtagaactaaattttcccagctcatcattcccatttatacaggttgagaaggtaagttctgaggtcagagttaggatcttaacctatagttagcagcacccttataacagactttggaaaatcctaaggagtatcattattatgaaagatattttaacatatgtgaagtggagttctatattcagtactatttaaactttttgtgagaatgccagttttcactcagcaggctggttacttttttagtcttattatgacagatgtagtttaagaatcactgtcagtaaaatcaccatttttttttggtggcaaaaacaggactctagagttttattctccaggccaggtacatttgaaactctgtagataatttattatgggattttctcactgatacaacatgtaagagttaagcatgtgtatgtatgtgtgggtgrgggtagtgtatgtgtgtgtataatacatttgtagtttcttgtatgaattcatttttatgttcctttcttctcacctctattatgcttccctcacccccacaaaaccaaaaaacaacttcctggaatattctgatatattcttccaagctagcaccaatgcctttatgtaggtctcttggactctgtcagttgaataactgcattctcttctatgatcctttcatcatttaaacaagttgtgaaactcaaataactttatattatactttataktgtattttatttacatttccataactagacttgagcatctcaaagtcatgtggtgttatctgattcaagccaatttggtcatgcccagcttttaggttatttttactagataaggtatccagacaccaactgaagttcatggtgatgatgttataatgaattaaattcaagtgtcagaacaaattctgctgtgcatagttatttaataacaacttattaagcaacagtttacatattccattctctaagttctctaagttcagtgaattcccatctctccgtccttgagaagtttttagttcatgaaatcctgtatgaaagtgtgggcacagccacagtgggattctgggtccccaagttgacatgctccaagcagaaactgttttaaaccaagggctggactctaaatccattaagaataagccactgggggagagggtgcaggccttactagagtcctgtaccctactcattcaagagtgggaagtatctccaagctattttagttaacccacatagcttgaaagtctctttttaaacttttattctaggttcaggaggtacatatgcaggtttgttataagtaaatcgcatgtcacagtggtttggtgtacagattatttcatcacccaggtaataagaataatatcccataggtagttttttgatcgtgaccctcctctcacccttcacctttaagtaggccccagtgtctattgtttccttctttgtgtccatatatactcagtgtttaagttgattccgtttctttgctattgtgaatagtgctgggatgaacatacatgtgcatatgtctttatgatagagtgatttatattcttttgggtgtatatccaacaatgggattgctgggtcaaatgacaattctgttttaagttcttggagaaatcaccaaaatgctttccacaatggttaaactaatttacattctaactagcagaatataagcattcccttttttctgcaaccttgccagcatctgttattttttgactttttaataatagycattctgactgatgtgagatggtatctcattgtggttttcatttggatttctctaatgattagtgatgttgagctttttttcatattgttggctgcaagtatatcttcttttgaaaatctttgattttaccaatgagttcatctttagcattcatcatgcgaattcagtcattactttcatcaatgaaaaattcttttttacatccacaatgctaattaaatcattggtaattaacatgcagatagcaaaaagactttggagtgggacctttctgataaaatgctggtgactatgtaggacttggcattttgatagcattttagctgactactccttaaatcagaatataaacaaactggtacatacatatcagacagattatgatgaagtgttttaaagtaaattacagacttcataacttaggaacgaggtcttctttgtcctcattatttctagaatagacatacaaaatttgttagctaatgggtaacttaataattgtggaagtgattgaattttatttgccatattgccacaattacatttgctagtctattgaatttttcaagttttcattaatttgttgatgacctgttttgtgtttggcatggcatggaaatatctaaaacacttggaattgaaacagtgtggaaagaatggaagtacaaaaagaggagagtaaaggagggaactttttctgcttccattcttgctgccctctcccctccctccttccatttttttccttctctcccttcatttcccccttctttcctttctccctccctctctcatccttcctttctccagacaaatatttggtgagcaccttctatgtgcaccataccttgagattaaggcttaaagaggttaagtgacttgttccaaatcctaaaactaggataaagcccagcccccaccactccttcaaatctttcaaagaaatatgtggaaataaaatacttatgaaattatagagcagttatgtacaaatgtacccctgacatatctgcataacactaaaataacgtggcatttcctctctaaggaaaattgaatttgtgttgatatgaccagaacctctgtgctgagtaaattgtgttctagtgcagtgatcccttttataaagggtgcttttgatagtaccagcagaaactgtactttctaatatccatttcatatttagcattttctcacattggggttcatagaagcactttttacactccgaaacatcttgtatttccagatatctcatcaaagcagaacactatgttctcacacacaccaaaattgagcagtcctggatagagataatgcacttggggattcatcttgtaatttaaaatgaacccctaaaatttccaattaaaaaaatactagacagtatttttgggttggtgacaatgtcctcttccttcacatgtgtcttcacagtgttgggcttgctcagttactaaattgaatgaagagacttagtcaaaactatatgacaatctttttggtctttcacaaagagatctttatttcctcttctctctggctccttatcacatgaatacttggggttccctttttatttttcctgggctaaatctagaatacagatatgagaatccagtagacacttttttcaagccacactatcaggctctttctgtcatcccatttttggaaaagattcgtgaatccagtgtgaaagagaacatgcttcttcataactggaactttttagtcgtgaagaagggcttagagattatatagttttatctcataattgtcaaatcaatgcctagagagactaaatgacttggccaaggttatgcaactaatgagttaacacaaatacacaagtagctgacgtatatagagcacttactgtgtagcagacattgttcaactactttatacatattaactaacatagtgcttacatcagcattatgagaccctattgttatttcagcttacagatgaggacactgaggcacagaaagattaagtggctaacctatgaccccacataaaggaagtgacatacctcgacagaatggttccatatgtgcttttaatacagggatggcccttctcactaatactgttattttttgccatttcctacagatgttaaggccatctgcaatgaatctttctttatggcagtattaattggaagatagatgaagagtatgtgactactatgagagtttttttctgagtgactatactgttgtcccaaaagattttactgaatattgtatttatagttaaatactgtgatagtgaagaggtagcaaaagacagggaaaaagagcatttaacacccatgtcatttggcttgatatgatgcttttttgtttctaacatcaaatcttttcagacaaaaagtaacactacatttgaaacttgctacaagtggatataaccaaaatctacccatttttgatgcacagattttgaattcttacagtgtgattttcacatagcataatataacagtataagtaacatatagaatatctattgcacctgagacatagtcattagtttggcaactgcttagaggcagaagagatattcagtggtataaatttaagagaaaagcatagacatttatatatttatattttgaactcatatttatttttgaagggacacaatctgttcttaggagtactctcaaaataatagcaaacataatagcaggactggttcagtcctggtaccatttcctgggaagcaccagtgacttgagaaagtagttctatgagctactgtacttgatgttgttttctgtgttcttaatttggatttatttaaacactttccatcctttaatttagacagctccaatactatctctttcataactctttccttaatgcttctactcaacagtaatccatcttttctataaactcctgtatttttcccttatcttatatattctgcataagataaaagggtacctgtgggtatgggatggattgctggagagaaagcaagacaaatgaaatgaacagtgactcactggcctgacaggcaggcaagtacgtgttcctccttgctctgctgcttactagctataagcccttgagaaagtctagtccttttttttgggcctctgtatcattagctatctggttagcaaaggtttgaactccaactgggacaggatactgactcattgcttcccsaggcagctgtttctatgtaaaaatcaagtctgactattgggatgctccgccttccagtgaaataaagtctgtctttctgaatctcctcactgacctcaactcaaccttttgaagttatttggaacaacttaggtggtttcatagtgtttgaagttacttttcagttctctgactgttcttttcttgaactgagaatctttaacttcatataacatggacatgagccctttctactaytctggctgcccatatctgactgtacacaagatgtcttatgttcttaactgttgtcaccactactgaatgatgtattttgagtgtaccttgcaaatggagtagaaagtgtacttattttgcaaatggagtagaaaatggagtagaaagtgtacctattttgcatgctatttttttttctcaatgcattagacttggggcgggtgtaacgacaccttgtggtcaatttgtttcatccttagagtagattcatcttttttttttttcaaataggcaaaacacagtatggtgacactgtcctgcttcatgaacacagtaaatgttgctgagagatcatggcattttctctcctgctgagactaagctgggcttctaaaccttaagagaacactccaggaaacttcatctaattgggtttactgtcttggaatcagatgattattaaaatgcttccaattgtatgtagtatatatgatgtagtatactacatggttgtgcattatagttaattacatacacacatattttggctgtcaaaagattataaattcctatagactagcatatttgtcttgcgtatttttgcttcttgctcaccacatcctgactaccataatgcctttaaaatggtagatataaataacgctaatatttgtgtatttaaaaaaataaaattaatagaaattaaaattagtttagacactcttgtttctttaagactgttaataatttcctgggcacttgaatgaaagaaaatttttatgagaaaatatatttaggcgtactgcccatccatagaggcctaggttataaagtccaaattatttttccaaaactcaagtctttagttttactttatttcctaatcatcactgatttctaatattttcttcatgtatattcatttcattttttgtttaatcaaagctgtataagacagtccaaaataaatctcacttacttcaaatggagaatatttcacacactcatcattttgttttaaaaatctttaacatagtcacattttgcctctgtaattactatttcacattcctatatctttaatagtmcatagcacatatattcataactttaaattttcactacttaagcatttmtatagtatggtatgtgctttttctttttttgttttttgttttgttttgttttattttgggatgagcctccttactctgtcacccagggggaagtatagtggcgcgatctcagctcactgtaacctccrcctcttgggttcaagcgattctcctgcctcagcctcctgagaagctgggattactggcgtgcaccaccakgcctggctaatttttgtatttttagtagagatggggtttcaccatgttggccaggctggtctcaaactcctgatctcaggtaatccacccaccttggcctcccaaagtgctggtgtgagctaccatgcctggcctgctctttctttatcaagggtgatattttatatactttgtacactttttaacaatttttttctgaaattaatcagatgacttaagatcatctttctttcacttttataaatcaaaccactgtcaaaaaattacaacaaatttggtttaaatatcttaattggcttttatttgkgattctagaattggrtaacacttcattctataaaacagagtgagttccaatgagctgagcagaggagtctggttatatagacataaaagggctgaggaaagaagamacagaaaacaaaaagcagattggttatttcacagtcacttctcttacacaggtcaaagcagagtggacttccttatcatgccagccagaactggcttgtttggggttttggctattgtctcttattctgatttcttggaagggcagataaataacttagttttggcttggtgacatggaactttagcatggatgattacatttagtttggttccttaggcctagtgcaggagctcagtccaagcccgtgttctgtacattttatttaacagttctcctcttttgatcacactcttacttttggtagattggagcattaccacaactctgttactgttattctgagtttctagtgttaacacaccatttgtgggttacagtgtcctcatgattaagcatttctttgagttctttttctattccagccaaagagaccatttgacattccatgaatagttgaaagcaaacatttaaaacttgagataatacagtataccaaggagagtactattatgattattaggagaataattccaagagtttggaatatgtttcttagccagggtccccatgaaccaaaccaactaaaattgaacagatcaaagaatgagcatatgatgattctgcccattttaaccaaataggctgtttattaactttttgcaactgagttcctacagtgcttcatgtgtttattcatgtgcaacgagaagtgtcagcaactgcacagactcctccctgttcagttagtaggtaatctgacaacccatgactctgttaaattaaagaggagtgagaacaagcagatctagaagtcttactctataaaagggatcactggtacaacttgaacagcagttgtgttagggatgttgctaaagttacgtgctgggtggactaaaggattccttagttcatataatgatctgagtttggcatgtcaaatccaatatttcatcaagttacccacagaaggcaccgattgagaaattacaactatagcatgatcctgccaagggaaaaatagaggcataagcaaggaaaacttaagagaagcaagaatcttattatgatatgtccaaatatcttgagaaaagtagtatactacatgaagtcatcaacttcttgtcctaatttatagtgtcaatatctgtggttatggtattgggtgtttggtgagctctcagtatggcccacacatcaggcatgagatttgttccttgaaatttaaattgagttgtccagttttagcttacagggcttcaggaacaaagcagatcttgttcttagagagttgtagcccaatattggaggaaactagataattcaggatatagtctagcctacaagttgataataaatcttaaaaacaatgaatagggctacaacctaataacaggtatagtatattttttcttcataaacataagctttttctctacagttatcccatttataataaagataattagagtaagaccaatttgtttacaacataggtctaatctcattaaacttggcctgaatacataaatgaaacaatagagattgaccacataggctctttgcaagtttgctttgctgcaacttttgacaaagaatttcagatttgactttttaaaacctctcaaggctgggaagtcaaatcaaagtggactttagacttgacctgcagtacatacagattcattctaggtcttttctcagataccacattccagtcaaagttttggtaatataaccaatatttctgactctatactgttataagcagaacatactcttactgcacttgtgcaaataactttatttccataaaaataagaatgcccatgaatagtttccaaattctggagagatcggttatggagaaaaagtaaatatttcaatttttgttcatgaaagtatactataccaaattgctataaattttcggtagcttaagagaaaaaacatattttcttaaacctagaaaaacaaatcaaaagaatcagcaatgttaaaaaaaagtgtaaaatgcataattctttattagtttatttcatctaattaatttttattctgcttgcctttggttaacagtttcrtgaacccactggtttcttcattagagtgatagaaattcttacccagtcccatggtgtgatctaaagttatcagaaaacagtatttgtcagagtcttttccatgaatttatttgaatgcatcacacattaggattacagttgcttgcaaaaggctttcagaaaagcattagaataaagcaattaactgtggacaaaaggacttaaaatgaccatagttaaagatctgatttgagttcactatgataatggcacaactcatagggaaatatggtatttctgttgtgtaccatgttttaaaataaaaaccaamattatgactaataacagatcagatttttaggaatttcatacagtattttaggacactcattagtaatatacccataaatatcacttaaagaaaaatcacttaatatttgaaagtgcttcccatataatttaacatatcaaataagcctaattattttaatacctctcttatactacataagagacatatccttagaagtttttccggggcttaagtggaaaaatcccaaagttaacttgagatcaggaagacttaatttagcatttgattttgggaagtttgtcagtatcaaagtagttaaaacacttgatcaaaacaatattacatatcactgtaaagtaatagtcatttatttatccagagtgataattgaaagactttaagaggcaaatacaggaagttatatagatgtcggaaaaccttagctctttcagtatggagaagaatcaattttcttaagtaatcaaagaactaataaagaaaatttgaagcatagggaatcatcttgatagcagagaatccctgtttcctaggccaattacctaaaaggttaaaaaaaacacccatttcactattttctattaagagcagatcaactctccaagaaaaccttgtcattgtaacagaggaccaaattttaattttgcatcagtgtacttttgatgtgtaatgttccctatttagaaaaacataaagagttaccttctaattttagccagctttatcacgcataaaattcttttcacaagattcgtcttccacaaatattctacagttttcttatccattcagtttttggcctatacttttcctattttctcattttggaataaccactctactttggaacaaagattattcccttattcctttaacaaaaatatatccttatactttacaacttcttttattaaaaaaagccttacttttctcacatccagagttgttccccttattatttctacttttagttaccatatgttaattagaattttaaattcctagtaaccttaagttttagtgaaaacctgggaattaagcaattttgaactccgtgtcttatactaacattttatgaatgttagtacattttataatttttaaaattatgtgtttcctctagaacaattttttcatgtttactaacatacctaaatatatttagcttctccataccatataaaaataagatgccaaagtatatatactttaaacatatgttcagcaattaatgttttagtattatagctaacttagaaatgactcagatgtttcataaatatccattacttaatttaatataatgtgactttaagatttcaagttactgaaaaaatatttttgaaacggtgacaagtgcatttgtaaacttttatcccattaacattctccaaatttactcattcttaacaattatacttcagttgttccttaaacaaactagccattgaaggaattcaggaaatgccacctcaaaatatgttgcattgtatacagtcatatgtcccttaacaacagggatactttctgacaaatgtattgttaggtgattttgtcattgtgcaaacatcatgaagtgtacttacacaaacctaaatggcataatgtgtatacaatgaggctatatggaataatctgttgttcctaggctatgtaccaatgtgtacagcttgttactatactcaaaactgtgacagttgtaacrcagtggtatttgtgtatataaacatatttaaacagaggaggtacagtaaaaatatggtataatagattaaaaaatggtacacctgtatagggcaattatcatgaaaggggtttgcaggactggaaattgctctggtgattcagagagtgwgacgagtgaatgtgaaggcctaggacattactgtacactattgtagacttcataaacactgtacatttaggctacactaaatttattttaaaaaataaagtagttgtgctacaatgttatgatggtataatatcactaaggaatttttcagctccaccaaaaaggttttgaaaccgcagtcatctgtgtagtcaatcaatgaccacaatgttattatgcagcacgtgactctgttgattagtttgagggcacctgaaaaacagcataatgcaaggtggagctttctgaattccccttatctgcctaaagacagatcatcccagaggaactcagttattatcaatcctctccctaggatgttccagcaatcagggacaattaacttttattaaaggagaggagacttcaccaaacctagacagccgtcatctattgttctaagagctccttcatcccaaacaagaaaaggtgtaggtaggaagccaagttaagacaaaatggtcaaaggtcaggcttgttgagaccaatgagcttttctgttgtaaggattttgagtggtttttcttatagatacaaatttttatgaagagtttttacatagccagctcaatacaagaaagatatattttggagacaaatttagttagctaggtagttttttttcaacttagcttgtttccttactagattaccaacttcagggtggaacctattaacaaatagatcaaagaaagtattttctttgcctggactcagcatggatacctctgaaaaagaaggaaacctgctctacctgaggtcctaacctttataaacatcttagatttcttttcacttttgggataggatagtaactaagggaaaaggttaatagattcaaattttcttatcaattagtcacttaagatttttattcacctttgcaaaagaatatttttaaagagtcaataaaatgttttgaartctttttagaagcttctgcacaagataggtgttcctgagtgggcttaatttgagagtcctcaattttagatgcactctgtaaagttctgtgttgttcacctggaacattctacataatggccactttaattctaaattacctttggtaagatttcaccatttttgtaagcgtttgaagcttccagggacaaatacttatacatgtaaaaggcaagcatagctggaagggggtgtactcagttctttagaaattaaggatcccatttttacattgaatcttggttcccttagaacaaatataagatcctaggagggaaagactgcagggttgggtcatgtaatgctttggcagggtatctcattgcatagacactctcttgatgctggcgggcactgccctgttccatgtccagcttatcctaacataatagtcttattttctgttgccaggctgctttagtagttcttaagttcctgaactgagcccaccagtcaagttgtggctttggctttgagatacacttgagcagcttagctagtgatattccagtttctgtctgactcaggaacctgaggcctcccttacctaagtgcacaagaaaaagaaattaagagaatagaattcaaattacatgtgaatttcaaaaaaaaaaaaagaaaaaaacaacccatcaaaaagtgggcgaaggacatgaacagacacttctcaaaagaagacatttatgcaaccaaaaaatcacatgaaaaaatgttcatcatcactggccatcagggaaatgcaaatcaaaaccacaatgagattatcccatctcacaccagttagaatggtaatcattaaaaagtcaggaaacaacaggtgctggagaggatgtggagaaataggaacacttttacactgttggtgggactgtaaactagttcaaccattgtggaagtcagtgtggcgattcctcagggatctagaactacaaataccatttgacccagccatcccattactgggtatatacccaaaggactataaatcatgctgctataaagacacatgcacacatatgtttattgcagcattattcacaatagcaaagacttggaaccaacccaaatgtccaacaatgatagactggattaagaaaatgtggcacatatacaccatggaatactatgcagccataaaaaatgatgagttcatgtcctttgtagggacatggatgaaattggaaatcatcattctcagtaaactatcgcaagaacaaaaaaccaaacaccgcatattctcactcataggtgggaattgaacaatgagatcacatggacacaggaaggggaatatcacactctggggactgttgtggggtggggggaggggggagggatagcattgggagatatacctaatgctagatgacgagttagtgggtgcagcgcaccagcatggcacatgttgacatatgtaactaacctgcacaatgtgcacatgtaccctaaaacttaaagtataataaaaaaaaaatggagtttatgccctctgcagtaataagcacttactgcaacagctatcagttagctttaaaactgcagctcttaccagtgactcctcagccaccccaaacccaaaggttatgcgctctctcgcagcacaaactaactcttggtacctaatccaaggtcaaatgtcttctcacagaacaaactaagtctggcttcaaaagcccataaaaacagcgggttgatgcaaaaagatcagagtcctacctaagaggaacttacaacccttggggctccatgaggaagacaggggacctcaaaagggtcagcagtgcctctcctgctttcctcaagagatctctggagttgtcagcagtgatattcaggtcccttaggttgcaagaactgtcaaaagacaaaattacaacacatttaattcaaagatcttaattggcttttacttgtgattctggaatctggcaacactttattctataaaatagaatgagtgttccaacgagctaggcagaggaggttggttttatggaaagaaaagggccgaagaaagcagaaatagaaaacaaaaagcagattggttgtttcaaagctactttctgtataaaggttaaagcagaagggacttccttatcctgccagctaaaactggcttgtttgaggaattggccattaactcttctggctattaattggctattaacttctgatttcttggaaggtcagataaacaacttagtttctgtttgatgacatggaatgttagtatgagtgactccattttggtttggttcactgggcctagtgcaggagctcagtccaaaccattggcatcctataaattttacctaacaccgccagtaaaatttacatctgaaaacgtgtatatatgataaaattagaacacttttttggatgttgttctcatggtgcattcagatagctggcagagtttctaaatgagatgagtcatgattttattgtcactcaggatctctgaatcatactctgtacattttcatcagtaatcatagagtaagagttgaaacatttgactcaatacatggaactatttttgagaaaagtttctttccttggagagtgataaaaattagtggtactttagagattgacattaatgagtaaaggaagattcggtgctgcttgggcaggcaatcacttacaacttcaattaacttcaggcagaacagataaaataatattaggattttgttgtttatagatactgttcattgaaattcaggatttcctaatttgtgaaatatcaaacaagtgcaaattagcttctccccttatcatatgggttcaaaatgaaatggcctattagcaatcgtgttaaagcacaatgacttaagcatgcttaagttagtattcagtaattcattccttcatatagttattaaaaacatttaccaagtgtttcttggacaagtctgtctgtgtgtaatgggttctagatagtcagagatagaagaaaggatccctgtattagtatatttttaactaatcctgatggaggtatgcataactggaagtggaatgaggtggagtggagtgagaaaaatggaagaggcaatcatgaaagagaaggtttctgagaggaggtgatgttgctagtcacggaagtgaaggacgagtgttctcagcaaacagcatgcaaagttgtttaggctgaaraaagcttggtaggttgaaggaactacaacaatgcctagactgggaaggtgtatagcacagaggtagctaggttcaraacataaagctgttgagtcaaaaatgtattacaatgatactgagaggttgaagtcaagattcctttaccagcttgaagaggtaaacctgtaatacacaatttaacatcttaccctcactttctttatctgcaaaatggggcctytaaatctacctctctcgcacaagtaattctatttctgtgaccaattttagtttagtaaactaaagagaaaaaatataatattggtttagagttttaaggaatctagggcaatatttagcacatggatctcagctgctaagtgtgttgcagaattcttgggtttttctcactttgaaataaaaattaatactgtgaaatgcatttttgattagatggttactaagaagttaacttttgtcacaaacatgctacctgatgttaaactgttatttgcatcatggacaatgctaaaagataaatatttgtgcaattatgaaagtttgtgttggaaatatagaattaaaattcaacttggcaagtttatttttatttctctttctatgttttgcttctataattaattcaccttgacttgtattttctaaattgcataacaggtgtgttcacctgtataatacatgtcttcaatcttctcactataaattgaaaattaaagtgtaacatatacmcctatatattgctctataaatttgaggatatgatactgcagttctttcagaaaaacactgattgtaattaatgtgaagtcgaacagtactattcctggtaggtaaaactcaggtttttccagtttatactattaaggattaaatgtgcttggttttcttgcaagatgcactatccttytaaatttagtcatctaattaagatttccattcatgggaaatgacttcaaagagcacataagacaggcttttacacaaataagttttgattggattaattggatttgcataagttttatgrtatgagtgtactagagtcttgacttctttcgcttatgagagagaacttaaaggagtttgaaagagaaaacacataaaagtttgcaaaggaagcaggtaaaagcagtcatgttaatggcatggcaagaacacactatgaggaacaaaagtagtaaaagctttggcagtatataggcaggtcaagccacaaaacctgggcataggaagaaggaaactgaagattcagacagatcacaatattttgttgcttctttcaggagaaaaagggtctagagcatscctgatgcctgaggtgggtttggttatagagactgccacagaaaccagtagtgcatttaggaccaggaaaaccaagataaagatggcttcttggattatgggcaggcagtcaggcatcagaaagatagctctaatagagggtcacttagacatgagagagcagtgctgagccagagttacggatatgagggcagcctggaaccaggatgctgagaggcaaggcagagcatggcagtctggaagaagcaaagatgtggtgaatttgagaaaagataccttagtaagatgaggcaggctggtcagattcaaagtcaagagagggaaaagtatagaacatggtggtgagatgagatcccaggcacacgatctgggttgcagagcttggcagccccacatcagattaccagcagttggaggccagaaatccatcgcaggaggcagaaatctgcaacctgggaccagaaattgattctaaggagagtctgagcaacagatgtgaggtaatataattatgaaagccttgatatggaaccaaacaatctgaccttacatttgctaatacagaagctaagtgcagaacattcatcctagcattcatatattaaataataatgtgatgtctataatagcaacaacatagccccttacgtttgtataggctctatcacttagagaatagctcacaataatcaaatggcatggatattgcagtcatttagagatgataaaactgaggcttaaaaaattagacttgctcacagtcatgcaaccaaaacagtagcagagcttaaattagaacataaccctggcatttttaaacctttgttaagtactttgcagtgagtaaagaacaagaaaactgctctgaagaaattagaagggctcttctgacctcaggaagtttacagtcaacataaaaatcatacagaaataacctaaatgagaagctaaactttcaaaaattcactccagtacctagaagaatgcctgggacctgggaggtactcagtcactgttttacgtataaatgagtatcaggtgaaatgctgggtagcccagtgaagaaaataatcaatttgaactcaggatatagagaagccttctctgagaacatgcgttttagcaactcaatgacaggatgttttcatgtcatcctgtcaggtgtatttggatttggttgggaaggaaagataactaataattcattgagagagatttagaatcagacatgcctgtgtttgagtcttggttctactaattcttgtaatatggaatgaattatttgacctcattgattctcagtttccttatgrtatgtgttcattgtatagaagctaatgcttttgaacatcttaatttttctggtggggggagctgatttaattttcacaacagatctgtcattttgcattatcattacccttttgcagaagaagaaacagattaaaaaaccatcatgtaatctgcataaagttaagtaatttgaaaccagttttgcctggcttcaaaattcattctctttctctcactctccagtaatggcaaaagatgtgttccaggggtccatggggagttttgaagacaaggagcatgtttcttctacttagtctgttttatagtattgaggaatttgtagaaagagaaagagagttatgaacacgtgaagagagcaataatttacatgtagctgaaacaaatcccaatgcaacatcgaaccatcattaatggagaagaagattgaagatgggataaaaattctatgtgaaaatcaaagactgcgagaccaattgaaaatgtagcattatttgaacaattgaaatatacaattgaaaatgtagcacccctccctccctgtcttccttcattccttctttccttctttagcaatcattagttgattttcttctctatgtgaggaactgggcagaggtctagtgatacaaagatagagtcaagaattcattgtcaaatgtaatcattgtcgatgccagaggaattaaaaatcatttctacttttctcctcttgcatttgacagacaaaatttggagcaagtaaaagattttacgacttttatctaaagtcacattcatgattatttcatagctataccaccagaggtagtttgatttgattaygcatggacattttgaaaaagttagcattcttgatattctaccatgccattattatttgttttctttggttactggtttgtaagactgattgaaaaccttcttttctaaagcgccatttactatagtatatgtatttactatagatgatgtgaatgctccttaagagccttctctgggtcagaggctagttctctaccagaagataaacctttcttccaagcaaatgttaggttcaccatgtatagagaaattaacctgaataaaaacataccaggaagaaggtatgttcaaatgtcagcatgaggaaccagataaggttcaatacattcacagggaagaatgtattgaacttgctgccttcaaataacttgtgtcaataaaaacatgatggtcttttttgcttattatctaagcatcatagcatcctagatcaaaagcmaatagtcataataagaaaaacaggttagaaattctagatatattagcatacattyatagaaccaatgagaacattgctttggggcaggaagatgggagaaaaaaataaggaacaaattttgtgagttgactccattgtgatctgtttgttttagttattacagaatatatgggaataatggatcatgaattgttacagattagacctcagatgtgattgacatgtttaagctgcatctaattcaggaacatgaaaaatattaggacaattgattaaaatgcccatcgaatacactagagtttcacatgtatttatttaatccatccacaaatgtatgcccagttgcctggtggagtctccatcatatggcattttatcttttaaagaccaagtcactggaataaagaaacaagatgaaatttatctaaaagttctgctcatatttatatttcaactagaatatcaatcagatgtgcctgccaaaagaggcctcaaaaatctatatccatgatacctatgcagctgtctcctccactctggctctttttaaacctgggacctattgagcaattattattgtggagcaattatctgctgctatgatgggccaggggacatgagaagagaatctggacacacgatactcaatagaaatacaatgtgaaccatattttaaattttctagtagccacattttaaaaaagaaataggtgaaattaattttgataatttattttactaactctatatatgcaaaatattctaacatgtaatcaatatacacacttattaataagttattttttatttttattaataagttatcgtttttgtactaagtcttcgaaatctagtctgaattttgcacttacagcacacctcaatctggattagccacctttctggtgctcagtcaccaagtgttcaaggcaattggcagtttcatcagacagggcagatctagattttttttctggctaattaaagaaacttggtggtttcctagtctactttttctgtgggtttaggaaataccattgaattgatatgcactattttgatctgtactttagaagatatatctgaatagatttttaaagccattttctcaaatgcttggtttacagtacctgtttcaaacatgatttttacatcacctttttgtaaaaacactttttcatcaatgttaggacatagagaaggatgtgaaaatattagaacatttttgaagcttaaacttgaatcaagrcatattacagatttccctttcatgtatctcactgtgagaggaaaagattcattactatgtgtggattctctccccaactcctcttccttttgttagctcattttatatgttaaaaaaaaagttgtttgagaaaggttattcatggcatcatttaggcttttttttttttttttttttttactttttagtaggatgatctcatcttcagcacgtgccttacagattgcagggcctgtctattccctggaaccacaactgccttgactctatcacagtccatttaacatatgtattcattaataaactcttagtatatatatattacatgccaggcagcttgctaggcgtgggatccaataatgaaaaggaagtcctcaacgatctcacattagtgggaaaattgtgcaagaagattacaaatattaacatatgttgttcaccactaccctcaacaggacatattatttattccttgttggttcggtagagcttgggtcgagatatcccgatttgctggaaatcgggaagtgtccccctcttccttgacttttcttaaaggtacaaagtatgttcatgtgtatgggtcccagccgaccctttttccaggtaaatactcctatcaggggaagcttatgtctgtatttatgcataattgtcagaggcatcagatcaggtaggatagatattgaaagaagtcagtgctttgcaatctccaaataacatgtaggttatatttgtacttctgttgacaactttatttgtactgcaaatattggcaacaaatattccgctgaaacctcaaaaggcttcatctgtatgcatggatcagtgcttctccctgcttcctgtacatctccaaggacatgaatcacatgccgtgatttctgtcaatggaagagaacaatgcaaaatctgttttcctctggttccaatttacaagtgttaccacatgcctgaatactttatgcaaagaagggattggacacaaaaacctattatgcatcaggacagggtgaggcagagtcctactctataaaccaatgagatgaattaagtcagcaagaactagggtgtggaaacatttgaggcacggacgcagtcaaggcatagaagggtagactctcctgacgattctctgggcatctggtcctgcaacagaacatgatctctgaaaggaatagttacaaaagaggctgcatcagggaggtcttgtggggagcagtgacatgtcctcgtaggtgggtagaacatagctcccaggaatctaggagcagatgggtgttaagaaaacctgttgctaagtaagagaacagtgccttagccaccatatagggtttagcagcaaaacttcactgcctgtaagacagacaggaatcacagtcccagacagtcccagccttagagcaactgaggtgcaaagtaagtgatcaaagcgaaaactcaggaatagggatctgctaatggaattcaggtacaaagtagaaattgcatttcaggaataatgcatacatcttgttatcaaatataggccagaatatacaacctgaattagcagaggagacttgatactgaatcacagcttggattatagctctataactttctcctgcctcagwtcagagttttcagagatcagagagagtttagggagcaagggaaaagaaatatatttaagcacctatgacttcgtgaagagagtggggatggtgggacagagctaagaatgaaacaggatgaaggacctgtgatccatttcagagtttcttctattttctactcctcacctaattgatttcatcatttaagtcaaacccattgccaggtcatataatgtcagatttgctgtgtgtgtggagaattcttccattgacttaactaacaaagttttctgaaaggcaaagscaatgtgaaaaagttttgtgctttcattactgtcaagctttttctcagaggtcaccaatgacaacctccttgcttgaacatttacttctcttacttctttgtgacactgaatgtggctgatcgaggacccctgtcttgaaagtctgtcccctctggttttcatggcatgataattttcttctctacttgctgacacttctgcccagtgtcctttgtttgcttctctttattgcccactccccaagtgtaagtgatctaaaaatggactttggagccttcctttccctttgctcttttctcctcattatttgcatgtgcccttttgctttcccgcggctttaagcatggttcactacccggaaaggatttactacaccagacgcttcctgggctttctacctcctctctccagtctccgctgcctttttcgggattgattttcctgcagcataggtctgaccccacccctcccctgcccagaaattttatggcctcccactgtgaacaaaattaagtaccggcacctcacttggatcttaaaccatttacatcatggtcccaggataatgtcccattaggcccctgtatctagtctgcatgccagccaagtgggcccacttgctgttcttcaagtacattctatacttcccctcctctgagactccatttatattcttctttgcactataattgtgtcaaccctatgtcctggtttccctgggtcagttctggattatttcttttgtcttggtattaatattattaatcctcccatttcacattcaaaaatagtagtttgaatgataaattacatgatggccctacctgtaaagctcttccacttgttgcttctctgagtcttattcccagtgtccactctgtttagctttgcttgtgatcaacataaccctgtcctttcaagccatgtgccatgtgaaaacatcaacttttgtaagactttcttcctctctccccatcctactgtccctaatttaaggtattctcttcctactgtcaatccctacatttacggtattctcttcctactgtcaatccctacatttaccaacatggcattgcaattatttgtatttatagatagttatttgtatattttaaattttatcttctatggtacttcacaggttcagggtctttgtaacgattaaattgctttcatctgcaaataacagaaaactcggacttagatatttaaacaattaggaaaatttattctgtcacataacaagcagtgttaagttaggatggctcagaaatgactaattcaatatctgaacaataggtcaaagatccaggtgtctcttctctgtccactctgctacagtatgtgtctgttctaccctgggctgactcccctcgtgattgcacaacgattgccctttttctaaacttcacatccaaacataaggatgtctagctttaaaaaaagtattctgtgagtccctttaaaagaaataaactcctatttcagaagcatccatccctaccagaagtctcttcatgcttcattgggcagaatctcacgccatgcccaggcctacactagccccagatcagggccatcaggacctgacaaatcattcatcacttgaggcaaaagatggccctgactcccctgaagatcatagccattcagtaaggttggtaactgaacaaaattaaggctgtttgagaaggaaagataattaacattgattaggccaacaacattgctacttataagtttaagttcaattaataattattaaatagagctttagtttgacttcagaatgtaaaggattttgatttacctcaatattctaatggtatcataaattataaaaactgatgttaaataggctttaaacagtatcagtactgcacataacaggttcactttcatattgttttacttaagttcatacggggagattataattaagattttgaaagaaaacttgattgagattttaatagccatctaaaactgctggccagcaaactgtgttcagaattgctcattaagtagaattgttttctgttgctttttgaggcaatgtctaagtatttgttcatagaatttcaaatatatattgcaaattcaccatttggtattggattgcagaattctcagatatctgccagctgtgaaatgtgacaaacaattggttaaaaaattgtgattttgaaatgtcttatagtaccaaggggagcttgggaagagaggctgctaaatgaggatccctgcctctcacaccctttatgaattctttcttctcattgagggttcgtttgggcccaacaccactcatgatcctccatagttaagtcagaggtggcagctggagaatgtagcacagaagttagtatgtattctgcaaatgggggctcattcaagcctctgaattgttgtcaccagtcagaaacacagatggtcccagtggtgagaccatggggggagccttgcctgttctgtgtcaacatgagaactcttaacatgaaaatattcatcacaatgaaggggtcagaaagactaattctgtttttgaatgaaatggaaagaacagaacagagagagtctgcttctaaaaatttcactgggcattgctgctcagagttgtagaccttggtgccagggggcttgcagctggcattttatgttctcagcaacactcatgctaactgctgggatgtgatgactctcaatattttagcagcccacaataggactcagtagaaaagcagaatctaagattgtgcatgatttggacatttggacaaatattcacaaggatgaaggggctggataggatagattgccttacaagtataaaagtcaaggattcctatctcagagttcaaaaaaaatggaaatgctaatctgaatcttgaagggaggggaaatcagataaaaactgagtaagttatatgtgaaagagatagtgtagtcatacttttttttttccttaacatttataatcaataggaaagcttacataccacttctatgggcttctgctatgctgtgcaacatctgcaaataaatatataatcattattgctttgagatgtaatatgaatatgtaactcttctccaaagtttatttttcataaatgaacttcctgttaatattatctgaaatcatgttattttcttcacctctcaccaaactgccccatcaccaatatttcaaaagacattttggagtagcaggctgcttctaaaaataagatgtagtagtctgggaaaacactgcagaaatgaacattccaggcctcatcacactgcccaccaatacacactttgttctctactcctcgtttgaataaatgtcactgtttattagagcatcttattggtttatcaagcattttttacgctttatgcagaaaagcttattggaagaaattatactgataagtgcagaagttcagataaaaagttttaacttttcttcctaaaataaaacaaaataataaaatattataatgtcaagtttgacattgagtgataaagtaggttaatatgtatctcataaagtgctttgactccattcctacaaaaatctcttatgatgaatataatattaaaattgaagtcagactgtcagatctgtcatttactagctgtgagaccttgggaaaattacttaacctctttgtgcctcagtttccttacctgtaaaatgaggtaataatatcaacctcataggggagttgtgaggaccaagtcaagttaatatatgtaagatgtttacaacagtacttggcctagggtaaatgctgtttgtcactttttaaaatgacaaggaaagggaatatatttatgaatttatataataaatatacatatatattataaactgaaattaaaggcatttggaataataatctgatttctaaatatatttcccattgtgtattagaaacccttaaattggcttgcataataaattcaacccattccaagctgttagagtttcacatttaaattataattgcaccttttcctagtacatgtgagcagtaagctggaaagctgcatttatcccaagcacaaatgagaccagactgcaaaatgagtttatgttccaagactcattcatttatttttgggtttcaatcatgcttttctttgtgtattctcatcaaacatttttaatggcttggtaaaatataaggatttcctatgtaatcaacatttactcttcctgtgaaagtgttttaaaaataaagtccttcaaatgtctagttctttttcagtaaaaatgagtggccttaaaagacatttgttctggcagtctgtttaaagatgggagagatgaaagccaagaaacccagaagaagatggcctcaagggaatgatctgtatgatgaatttgaaattgcaaggaatactgtttctgctttcttaggcagagctgtcacctcaaaagcctattttcttgaaaaggagagtgttactcagagtatcacggtttagtcaattgaatatatattccctgaatgcagtggcagggcacttacaggtgaccactgtacaacagaaacatgtaytttggaactgaagacatctcaaccatatgacaacatagattttttctgaactagcaaaaagaaagaaargaaggaaggaaggaraggaaaaagaggtagaatttactgtttgctaccagacattggcaaagagccaccccactgattcaggtccctgataattctccccagatacagttgtcagagacamtctaaggaagtccagtgaggaaaagtataggtcttccatactgtaagaaaaagaatgtcattctttctaagccatagatccaaaaggtcaggtaaatccttatatcctcccctagccacttctgctgcgcataaatctcaaaactctacttaaatgcctttttagtttcctacctgggttaccttttagaatcatattttttctctcccattgtgtgaattaatatttgctctcttttattttaaacttccctctcttctttttctaataaccagggaagtggtgaatgagtttttcactttctaaagacagcatttctcagctttacttttgccttctgaagacctctaattcttttctctgtcatataatagctacactagactatctttcctaaatttaagtttctgtcctctagaaaggaagacttttacttttgcgtgttccctgtagtgtttctgagatgctagctctaccagatatttaggattgtccctggaatatatatttytaagctcaaataagtttggaaaacactggacaataaagttaacaattttctttaacagattgtcatgcttttggttcatacagggaaagtagttgggaggaaactatactcataaattcagaatttcatacgagaaagcttaagctactcggcctttcttcctaaaatgaagcaaaataatcaaatattataatgtcaagttgaactccaaaactagactgcatgggattgggtctggctttgtatcttagtagctaatgaccttacacaagtcatataatctctctgtgccattgtgtccttatctatatgctgaatacaataaaatratgccatcatggggctgctggaaattatgaatctttttacattttttaaatttttttttcacttttatgggtacatagtagatttatatatttatggggtacatgaagtattttgatacaggcatacagtgccaagtaatataatttataaatgttgatgaacaagtaaggttttagctgatgttttttcaccagaattttttttcctagaaaatatcacttaacatcctgctacataaatattatttgagaaacattgacctagggacagttaaattttgcttgtgcttaaaaggtttatttctaaaatctccatcatctttaagtcccagagagtatttaaattttatcatattgcttttttgttgttgataaagaagaggggaaaatgattctaatgggtattttagaaaaactggaaagcttactaataacccacatactaattttttattaattataagctcgctcttttgaggaatgataggtacattataacagtactggccaacagtagatctgtgaacatggagacattgactttatatattaaaattaaaaacaaactataagtatataacatgagtgtattcattttccttagagcttatgtttgctacctttatgtgagtggtttggcaaagcataaacatcatgtaaagtttaatcagcagcatttgtttttgctagggaagtgtttgttaatggtttcaccagctttttgtcatttaaaaagaatgctcgtagcttgtgaatcttggtgttcttgttcagcaaactgaatctcctttttctgtatcttcccactgaccctcatctacatgtgcagtgaaagattagtgtcaggacttttactttatcccaaatgatcaaacaactctattaccctattctaggcatcccagactcctttactcccttaccaaaaacactaatccatcgcagatacgacttagaaagagccttcagggctacctaataatgactaaaatttacgtagtgcttactctgtgccagcccctttactatgaatgttataacaataacctcatttctatgaatgttataacaataacctcacaacagccccatgatggcattatttctattgtttccattttgtatgataacattgaggtgaagggaagttatatgacttaattaattaattaattaagatcattcagctaataagaggctgaaaaagattggataactttctgccagattgtttcaaaaaggggcactgagtttctttttgtgcaagttttggtgagttgcacactcagttgtcagttatcacttacccctaatctcatcccttcttcatttatttactagtatttttacatgtgtctgtactggcacatgcatgcataaataagtgcaagctaagttgtaagtttctttgatggcctccccattttaaacatagtgagccatgcagtagactcgcagaggatgtgagtggccttcctgggtgctgagcattggttaagtgagccatccttctcaggacagttcatctcttcatatttcacttaaaatatctagaaagtgagagtgttggatttgtttttactttaggatttatttaacctctctttctatagtcccatccttttattgcaatacctagaatagctctttgcacagtacaagtacataataattatttgtttgaatcagtatctaaaaatcccttttaacataatcttgacaaatttacaatgtaataaaaaggagttttagacaccttgaaatatcttatagagcttagagaacttgttgaaacacagatggccagacccccacccccagagttcttgagtcagtaggggtggggcccgagaatgtgcatttctgtcaagttcccagattgctgatactgttggttcagggaccacatttgagagctactgtctgtagagctctcaaaatagacatatatctttcccagttgaaaagtgagttaataagctcatcccacccagtgggtgggatggcagcttcatgtgtttcttatcctctggtatctgcattttaacaggggtctcctaaagactgcgaatcttaactcaaaggttcagatccgcaactcaaaggatcaaatccaattcttgacctcatatccttccatcaaagcggcctttgtccctccacttcccttaactgtcctctccccagaatattagggcttcctggttgccacatccccacaattataaccacggctagtaacatatataggttactttattctttattttcttcttctgtaactggattttaataatagcatctacctcatcagattgctttgaaaattaaattggccaatatttggaaagcacttagaacagtgcctaaaacctaagccctatttacatgaacagtgtaaatgagcttttattatatgttaaatgtttcccaaattttcctctcaggacatcaccttcatgacttaaatcatagctgcataccaactcagctagcattcattttttcttgaaatcagttcactttactaacaaattattataaaagaatacattctattattactacaaatggaaaaccagtatcacttggtaagtagaagggaaccataaaataaatacaaaaaagcctacattgttttaaaaattctagccaggcattgttttctggaaaagaccctgagactgatacttgctctctctctttttaaaaacagggaaattagcaagttccagtttctgtaacaaataaaaccccacatttcactggattcacacattcagagtttaaagtttaggtgtgtcccatgactgtacttctgtggattcattttgctttttggatattatttcacacatctctgaaggatgtgaaacacatgccaaatactatcacactgattacataacttctgtttcactgcattacatctgaaatggttttcttgtaccaatttcaaatcaatgatgcatggatatctttgagttaccaccagttagaggggagaggaatttctaattgtgtgcttataaatgaaaacatagagctatttggagtttgacatttgatgaaaatctacagcgattttctcttcctagtaaaacttcagtattttgtcatcaaggactgtagatcacaaagttggactatgcataacaaaggttgaggtatgagaacaaagtgatgtgcacatcctggagacatttatgattcacacctgcattcttgtaggttgctattcatcagcagaatggggctttttactcattaccaaagacggtaattgattaaaataaaaaaaagggctagataccagacctgtcctcaaagacatgatggagacttagttgcgtcattaggaaggagcagacagtgtgtagatccagcttgttaggcagggcaagattcgaggagcttcatagtgttcaacactgggattaataaagcataatgtaatgtccagcaaggggatgaggtgtaataaggaatgtgatactcaagtttgagaaggtctgtcagtggggtgcaaggcttctatcaggttggggttcaggagcagatctcttcctcccaatgaggtaaactgtcagattgcaatagggaggggactgtgactaagaaacaccacaattgctcagacccagctctgagtgcatagataaagtagtgaggccaggtgcagtggttcatgcctgtaatcccagcactttgggaggctgaggcgggcggactgcataagcccaagaattcaagaccagcctgggcaacatgatgaaatcccatctctaccaaaaaaaaaaaaaaaaaaatcaaaaattaactgggcatggttgcacatgcctgtagtctcatctactcaggaggctgaggcaggaggattgagtccaggaggtcgaggctgcagtgagctgtgattgcaccatggcactccaccctgggcaacagaacaagatcctgcttccaaaataaataaataaagcagtgaaagcccttcagtattagtttctgagcccttggtgggcatctcatcacattctatatcagattgataaggactatgaacagtcactaatcttccttggaggttgtttgagggcttcctgtacaactgggaacagacaggtgctttgcctctcttggcagagtaggagtagggatgggttgagtttagtgagcccagatgaggggagctggaaggcagatgtaagagaaacgaggtaagggttgacagctctgcacttactgtgccagcctgccctctgtctaccagcagagtccttttttccctcctttttctttcatgtcccaagcaatggagagtttttgctgaggtgggggaggagtacctccgtgaaaggctgatccatgggaggcccgttgatccttcccactgggaccacaggtgtccttcccaaggttctgcttctttctcctcctctatagacagctggtgcctgtgggaggcaggaggggccctgctgcttctcagtcgatctcagttaacactgttcatcatctcaactctgtctagaaacagctttcattggttrgttcacagaagaaaggaagttttatcaaagaaaactgtgaagtgacaaagcttttagcatctccatctctggcttctgtgacctggaaatctcatattttccactcccagcggggaaagcaaaccagttatgctcgttgccccagggatgctttgggaatctagtgaaaatggtagcgcgtgattccagaattaagaaccccttcttgataaaggtgagaaaacgaccaaaacaccagatcctcaatggcacctaagaaccaaggatatgcaaagaagacatgaagacatttcagtgaaaagagtgtctcaaaaaattgcaatggagttagaaagggtgatgtgaatgtttttggtatttgttggaagactggcttgtgtgttaataggatcaggaaaatctttttttctatactcggctttcttatacctggacagcagaggagtccagaggtccttatgaggtgctttgtgccctatctcctatcttttgaaactgtagagatgctaggaatgtggtaggactccagggtgtgacctgtaagtgggcagcagggactgacctatcttaacttggaaaagctggaggagaggctcacaagttcccaggcagaggctgtggtcaaaataaaactctgaacttggattcagactctggctgtgccggttaccatgtgactcaggcatgttcaatctctctctctctctgtctctctctggaggtttccttatctatggagatgggaagattgaactgcattctcttcattcatacagtattcatatttattgtcagtcactgtgctataatagtagaagtttaaagataaatgttatgcaatccttacctcagagaggctctcaactgagtggaagacacagatgttactgatacttataaacgcatatgcaaattatcataataaatgtacaacgtgccattggaacacagagaagggaatgatgaactgcaccaggaatagaataaagttgcaatagaataggcaatatgtaaatcatgtctcaagcacagaaccatgcactgcctaccaagatatactaagccatggaccaagcataaaaacctggatgtatggaaatactggatatgttggagaatgaaaatgcttagctgtgactagagcacagagtgtctgaaggctatgtaggaattgctgaagctgtaaaagataggtttaggctcagcagtaaatgatctcttatgaaattttagttaatccacaagctatgaggacacactgaaaattgtaaatagaaaatgtggggctgggtgtggtggctcatgcctgtaatcccagtgctttgggagggtcgcttcaggccaggagttcaagaccggcaacatagcaagacctgatctctctacaaaaactaaaaataaaaaataaaagaaattaattgggcatggtggcacatgcctctagtagttagtcttagctacccaggaggctgaggtgggaggatggcttgagtccaggaatttaaggttgcagtgagccataactgcacccctgcactccagcctgggtgacagagggagaccctgtctccagaaaaagaaaagaaaatttggattatacaaaatttgctttcaataaaccaatctgacagtaacagtttgaagagcagagaaaatggaagcacaaaggcaagttctgagtatgctttaatgcaggaaaaaagtgaagagggactggattttaaaatggaggtagtgataaaagtggtcttatttgaaatagaattaagatatataatcaacaggatttagcaattgatggagattcagttagaaggaataagatctcttgtgcaacatggtgactatagttaataagaatgtagtgtatacttaaaaattgttaacagagtagattctaagtgttttcaccacaaaaaatgctaattatgtgaggtaatgcatatgttaaatagcttgatttaaccattacataattcacatatttcacaacattatgttgcacaccataaatatatataattttgtgtcaattaaaaataatataaataaaagcaattgatgaaaagagacaaatgaaggaactggaggtgtcagcatgatatgtaaatgtatgagagttttagcttgagtccaagtagaaattgaatrgattaattgagatggtgacacrgaagagcaggaggaacacatggattttattttggatgtaaaggctgtgtggccttccaataggtagatatgagcatgttgagatgtcactgtttaataggtggatggagacctgcatctggggtttaggggaaatatgcagatttaggattccttagtggagcaggggatggtaaagtcttaggaggaatgaagtccaccagggagagcttctgtcaggaaaagagagccaaaataaaatgccagataatatagaacttaggtctgtaactcactgacgagagcctctgattcaaaatcaagaggaaaaagagaaatatataccttagagtcaatatgacctggtattaaattagccataaggacagacatatagggcagtagaaaatgaaaattccctactttgtgcctagtactgtgctaagcttaggaagaaagaatagatatgaatatcaattattaatggaaatataaactgcatacaattacatatatattagactgtttactaatgccattggctttaatagcgacattgctattgttaatgatgctcttgttgccaataattttttcaacagttatgacagtggttaacatttaccaagtgctacctactgtgcctctgccttcaaggcaaactcaatctactttagcctctgttgaggtcaagctgagagctaataggaaaaaggttacctcctcctctccaaatgcgttctagttggagttgtttttgaattctgtatatttatctaataacaagctttaagtgtagtaaggattgcaccctatctttgatgctgtgtatgtttatattctcctagaagcaattatcaagtgagattagaagtacaagagttgttagaaaaaacatctgtgaaaaacagaagttgaggggtaagccagagacagcaaggagagccttcagactgtgatggaggtctgtcccctgtgcgtgagagggagaaagaaggaagactgggtgggaaacacttcaractaggttaggtagtctcattggggtagtgggattgtataggaaacatggctccaacaaggatttggtcaggctcatggagaatctttgaaccaaaattgcaaattggaggtatcccatgtttcagaagattaggytcactcccaccatgcttagtcattggctaggaggagcctgtagaagtgtggcctcagcatggatacagtattggatccagaggagcgcagcagccggggccatctgtgtgtaaacatctctgcagtgggagatttgagtgatgtgtttcattgccaccacagattctctcagtgactcagtgacacttcttcctaagtgttctcctagcatgtattgtccaaaccagtcaaataaagctcagcctatgcaaccttgtagcattattaatcaatttgcttgtgtctaccctgttagattataaacctttcttcaaacattagtgtctagcactgtgcccttaactcagaaggcatttacataaatacattcatcataattataattattttattttcattatttgaatttatctgaragcaggctgggcacggtagctcgtgcctgtaatcctagcacgtcgggaggcagacgcgggtggatcacctgaggtgaggaattcgagaccagcctggccaacatggkgaaaccccatctctactaaaaatacaaaaattaacctggtgtggtggcatgtgcctatagtcccacctacttgggaggctgagacaggagaattgcttgaacctggaaggaggargttgcagtgagccaagagtgcgccactgyactccagcctgggtgacagagtgagacttcatctcaaaataataataataattattattattatctgagagcagtaaacaattggagttttaactcaggaagttgggtgggggaagttaagagagaatatggttttgatgaggggttccrtggatatcacagtgagctgtgggggaaacagaactagggtgtgtgaattagacatacccttggaggaaagcagacacctaggcatatgcatttgatgagatgaagtccaagtaggtggacagaatacagtatccagagaacatgctggaaagagctagtctagaccaagaactggccggagggtccagcaagatgtgatggacaggcatttgacatcggcgtctaatgacagcaactctctgtttgaaaactaccttctctacccacagtgacattttcatgtaccataacataccttcttaaccttggctcatcggactgagggagatgccttatctcaacctaaacctcctgggaatttggaattgaggtttggaaaatcttatcagttgaactgtttccttggaccgagctgacaaattcaagataagcttcttgaagacaactggggaaatcatgtatgctcggaatcaggagcactggctggcagaaaggcatacaaagagaaactgagatgaaagacagtatgactccagggaaagagggagaatgaaatggtgacagctgttgcctggattcctgaggactttccrttcatgggcctaatccccaagctccctgcccttcaattctgaggaaactaactgtagaataaacttactattttagttaacatagttcaagtgggtttcttatagtagcagccaaatgacagtgactgagaaactgttytggcagaaatgctcaggacacaaatcggaaattccgcaaggtgaaatgtgctgagatgcaggcaagcaagaggtcagcattagaaagccactgggaagagagccccgggaaaagtggccccagcaaggcagttcttggtctgttaagaccctggtaactaaaaagaattatcaagtcagggacttcatatacaggctccagttttaggaactaggtacaggatagatccttcatcataggaacaagccagaagttggtttttagaagtcaggcaaaagattaatagcagactaggacattctgatctattgaagctgacggttttttgaaaatgtgattcctttatgcattaaataagaattattgggtacctactacattctagggagtttagcatggtagcctgagttggggtgcagtgtaccatgggttggggcctgccaggggatggagaccccgtggaagctgcagtggagaagaggaggctgagagggcagccatcatgtgcagagccggtcagctcatgaagtggagtggatgatgcattgttagaatttgaaacattctgtggtaaaacagacccagaagaagttgaatctgaaaacccagaaagcatcatcatggtaatctctttcaaggtgcactgaagaggaggtaggacatgagaaaaacgttattcagaaagagagataaggtatcaaacacacagttcatctacttatcagattctccagatactcatgaaaaataattcttgtgcatcctttggctggatgaactgtttcatcacacatccgctctacttcaccaatgccagagttaaaattcaggaggaagttggaagttcttatctctcccaactcaatccactctcaccaaataggcaagactagtctcttttaatttagttccactcaatgtcttctgatttaacattgaaccctggcttacttgaaaaaaaagtatagttaaaaaaaraaagaggaaaagggggtagaaagaaggatgaaagtgaagaggtatctcataatcttttattcacactggggtaaaagtaggtcaaacacctaatctcctgtaacctccttctctacctcacactttctattttgaatatcttgtaatcatagatactacttttcatagagatcccaaaagcatttccccagggaatgtcagggactccctgtatagcatgttaattaagcttgacaagacataataaaagcaaacttcacaatgacaaattagtagacacactgttagctccagtttcttttaatcttatttctcatgctgttgttcayagtattagagagaaatttcttcttggcttctgactggccttaaaaagaacacattatttaacttccctaaatctccatttcctcatttgtaaaatggaatattaatacttcctgtaataccttactaggtgattttgaggaccatgtataaaaatcactaccaatggtacaaatatggttgtaagatagccaggtcctttaataagtcaacagagtagagcaaagcatctgtaacagaaccttgttcttgggcaactcacttgtgttccaagtcttggtgtttctttacttgtaaaagggtaggatgctattcctagtttcatatggttttaatgaagatcaaaataacatttatactaaagtataagtagtatattatgacaattcctagtaatgtctcagaacaggaggctctcaaagtcaaaggtgtgcagatttattttttcttatttataaaagtattaatatgattttaaattagtatgtgtgtatcagatgccttaaaaatatttgcatggagaatctgttgtgaattctgtagcagagtcaaawttaaataagacacagtaacttaaaaaaataaaacatggaatttaattacacataaaaataaatgagtgcttccttacatatcttttgtatattttatttttttaattaagacttttaggaaacaaaaatgttgtctatttttgttcataatttttctttttatttatttatttattattattatactttaagttttagggcacatgtgcacaatgtgcaggttagttacatatgtatacatgtgccatgctggtgcrctgctcccactaactcgtcatctagcattaggtatatctcccaatgcyatccctcccccctcccccaaccccacaacagtccccagagtgtgatgttccccttcctgtgtccatgtgttctcattgttcacttcccacctatgagtgagaatatgtggtgtttggttttttgttcttgcgatagtttactgagaatgatgatttccaatttcatccatgtccctacaaaggacatgaactcatcattttttatggctgcatagtattccatggtgtatatgtgccacattttcttaatccagtctatcattgttggacatttgggttgagaaaaatatggtttacatacatacggacaaggctataatcaaaggatctaggaaatcgattatggctctgttttacattgagattattaccattcaaaggggctccattttacatttttaaaataaaaatattttacatttatactggttaaattctaatattccttaatcttttattttctttcaagataatagttggagaaactgctgtcttttgcctacaactagccacaagggattttgaaaaccaggaaaaaactattttaactggagactgttgctatataaacccgctggtgcgccgaactgtccgatttcttggtatgtgttcattaaattatttttaatatttctgaaacagtgtctatgtgtaagctaaaccttaaaataacccacatgttaactgtttgcaaatattaggggtttttttctttgaaatgtttcaatttgcttttaaaaataaacattacacactgcttgggtgatgsttgtatcaaaatcgcagacatcaccactaaagaacttactcatgtaaccaaacaccacctgttcccctaaaatctactgaaataaaaaataaattaaaaaatttaaaaataaacattacatactaccttctctttaatatagcaagatcccactttaggatgtcatttccacattcttttaaggaaaaaagaacaccacctttggatgtttaatattctttaagagccaaaaattacgtgattactgtgtttatgaaaatctttgaacggtacttagtgggagggtggtgataatccaggtaggttgtcgaacatcacgaaggataagaaaaacaacttggaaaatagaagaaatgtagcactccatgcactacttctaagttgatttttatataaacaaaaaagtattggggattttattagaggacaagattcactaataatttaactttcaatctcaaatactagcaataataaatatatgcatgaatgaattattgaaaatcattttaattcaggacttagcctagacccattttttaactgacgcaatacaatttaatataaataattgtttcctggatttatcagataaaaataagtgtatatgctaaatgccatttaagataaatttttattagtattaagagatgcactaaagataatgtaactcttcaacatagttctcatattgaagggaactcttccacatatttctcatattgaaggattcaggatgaagactttgaagatattatgcatagatcacctaatctatctataaacccattaaagactagccaaatgttatcaggcttttggatctctckgaagacgaaaggccktcatatccaagattgttatttttactgacatcaagttatgtatctccaaagccctcatttatcctgttgaagggacaacttttatatgaaaccttaaaagttattttttcacatgtatcaatactgtgttcttgactaatttctttttgtataagtyatttaataaaaaaagcaatatgcaacaatatgcttagaattaaaactatttaaagaaattgatgctttcctaaatactgttaagcaaattacattgtacctatttaagtaaaatatttttctgcatttgcacacatatttctaaagaatatttggctcaaagtacagtatgcttttaagtctctgcatgcttcttcttatatgattttataaaatatgaaagcccatttgtttcttgttcccttatggtttggatgtttctagctgtaataagtggaagcatgtaagcgaagcatcactgtataatagtacatcattctgtatagtgactttattctttaggtcagtgcttactttaggtaagcactttaggtaagtgtagatacacttacaggatctcactttaataattttctttgtagtcaactacagtattagccttgggctgatgcactgacattttaattccaaaacacatttgggaactttaaagtgtcaagagacatttccacattcttatcaaatatttctctctgttataaacaggaaaacccgttacaccaaacagcctagatttcaaaggtgtacaaatgaagaagacttgtgatttaggttcccatgcttggccakgagattttggaagaagttttattgagctcagttctctttaatttctcttcctctttcaaatttctgattttgataacctttactttgtatgattcaaacaatgctggtgagatgttaagaaagggcttcttactgtttgctttttagataaagagtgaactaatatctttgtttcattcccatttgtgtacacatagagttttgctgtgtgggggtttttgtatgtaaactttttgtaatcttatataatatttcaaaaatttaaaagaacagctatgcatctaatactggaaaattatttgatctggtacaacttttatggtgatatactatacaacagccaataatgatgaaaagkcttgggaaacaaataatccagaaatatatgactaaaaagaaaaacatmtaactattgtaacctaagtatatgacattttaataaatcagtacttttagaagtattactttgggatagttttaaaaggtcctgttggattttattcccaaaattataaaaggatgaatttcctttcattggtaccacatccttgaagattgtagctctaagtttaattgaaattaatgccaaaaattattttgcccgtataatagaaaaataagttttaacaataataaccaatgactttgaatttagaaaatgtttttggtattcaagtaaattggcaagttcyttagcaaaggaggaaaaaatatctacacacttagttctataccttcaggtaaccaaagcaaataaattttaaaactgtaaaaatcattaataacctataattttgattgccttgtttactaaatagcccacattggatcaattggaagccagtccatataagataaggtggaaataaattactagctgttctatgactttaaaaaaaatgtgtttytgaaggcaatgtagagattactctgaaagcattctggtttacttaagattttccatatttaaatgaaaactgatggyactggatttactgctaattggcacctccagcagcgttaacatcagtctgaatgggagtaacagcataatcaaagagagacaactgctttgcttcgttagtgagataaaaaaattttcaaaaaatgggggaraaaaggaaattgctaacattagtagagcatgatagactataccctctcaaggaacacatgactccatgaacaattgcattacccggagtctgagaatacatgttcttattttatcttatgtcttataaacctgccatgcccaaaaaccagtagtagacagagcaatatttaccactttcaccactccagaaagccaaggaaagaactggagagggatgaaataaaaggaactatgtatatgcatggaatattttatagtttctaaaatatttccattttggtttattgtaaactgaaattcacacacacacacacacacacacacacacacacacacacacacaagcaagaagttaaaattatttgttttcttccccaggaatttatacatttggactgtttgctacagatatctttgtaaatgctggacaagtagtcacaggaaatctggccccacatttccttgccctgtgtaagcccaattatacagcacttggatgtcagcagtatacacaattcatcagtggggaagaggcctgtactggcaacccagatctcatcatgagagcccgaaaaacctttccatccaaagaagcagctctcagtgtstatgcagctatgtatctgaccgtaagtaaggattataaatttgttgtcttagtctgtattattgttaatttttccaatgtagaaattctttttctctgccataatgaaagtcacttaaagcacattcatatctttctgtaggccatttaatctatttttaataatagctgtttgtactctgaacaaaattaagtcagttgactctcatgagattatgtgtgggtagttggttgtattaaaaaatgtagccattagcatttctatttgagaatatgtttgtctttatattaaacaggacttagtggaaacaaatttgttgtagcattccccatgaacttgtaatagcacgatgaagagaactacctaggcctcttagctgcctacccaagctctcatagtccctgctggggatgaaagggacactctttttttctagaaagcactattattacaggcaactatatcttcatcatatctcaattagcgtttaacgttttctcatagaactaaccaaagtgtccttagaaattctattttttcctttagtcttgagagtattggccaccatcttagtggcaagagccaggcccccakgcagctatcctaggacctttagttggaagtgagtgagtgcattacccatatgcagaaggawaaagaagggcagctttggcaggcagctcttgtccccaacaatggtaccatcarcctctccctcctcacaaggatgtaccttgcagctcaggaggtggactcctaacgcgttccctgtaggcttttccacaaaccccaataaggtcagagatttttttttttttttttttttttgagacggagtctcgctctgtcacccaggctggagtgcagtggcgcaatctcagctcactgcaagctccgcctcccaggttcaccccattctcctgcctcagccttccgagtagctgggactacaggtgtgtgccaccacacccgactgatttttgtatttttagtagagatggggtttcaccatgttggccaggctggcctcaaacttcagacctcaagtgatctgcccaccttggcctcccaaagtgctggcattacaggcgtgagctgctgcacccggccagatcagagaattaaatgtcttctggggttctccttcccagtggtgccaaatctacttccttccaatttcagctcattaacaagagatctgtaaaatctcaggaccaattcgaaaccaaatttgattatttctaatgacttggaaaaacttggaattattyttttaccctcagagagctatttgataatggaaatgttttcaatacaatcatgttatttctaaaagcagaaagaatatatggaataccttgtgacatctctacttgagattcaaataaagattactgaataaaaggacaatttaggaaggaaatacagcattacacgtaacatttacaatggcaggataattttagaaccatagagtatgcattttaacattttttaaagtttttaagccaagttaattctatccctcactgcctggacattttaaaaatcccatccagaaactttttatggagtcaaggattctttcctttatcctatcttatttattttctctttcactgcttcctaacttttctgaagtttgtctgttayaactctctccttgccatctcactgtgtccccaaactctattcttctaatttcccctgttttctttagcccatcagcattgctttttcttgcacattctaaggtacctttgggcctgatatgaggtatggtagcccatgcatattctttcctattcaagaaatctcttggctacatgtttcacctctactagaatatgaagcactcagccttaaaacagggattgaaacttgagtgaatcagaagtcacaaartacttttcactcattgccatcacgtctaaatttgatgttcatatttgtatctgggtatgaattgcaaatatatctgcatataaatacgtgacctagccaatgatgggagacaaattccagaatgctctctgaccccaaatattcttatacaaatattttaatactaatagacattagattcagatggggcgtggtggctcatgcctgtaatactagaaccttgggagaccaaaaagcagaaagatcactttggagtttgagaccagcctaggcaacctaggagatcccatctttacaaaaaagagagagagaaagaaaaaaaaataagcaaaacctcagccaggtgtggtgctgcatgcctgtagtcccagctacatgagaggccaagacgggagaatctcttgagtccaggagtttgaggttacagtgagctatgatcactcaactacacttcactctgggtaacagagcaagaccctgtctctaaataaataagcaaataaaaatttaaaacacagtacatgttagattttgctgtgtaaccaatgtttgccagtggtgttgattgtgctgctataataatatacttggcctttttattctggcaaaatagtgtttcaaaggcattgctacaggagamagtattattgtttatgcactagaagaatctyaacatcttgtcttgctccagtctactggccactggcatgtatttgttttataaacttctgaattataaatcatactgttctataataaaaattgggacatattaatgataataattataacaaacatttgttgaacatttaccatgtgtcaggcaccaaytgcttcacttttactaacttagttaatactttactagttcctttgtatttttaaagttatttatcattattatttatttaataattgataatttgtgataatttattgaatcctcgtagcattttcttaaagtacgtgatattattttacccattttataaatgaggagactcaaaaagtaaagtaactttctcagatycatagaaccacaaatttttctggtggcgatgtttctgaatgttccagagaaggaaacattagattattttagccctagtgtgtgcatctgctgctgaattctttcctgcataataccagcatcsagtaaactgtaaagccaagggtgcagatggtagattcatttagagcaaaatcccttaatagacactccagcactgggaagtgttgtactgttaaacattggttcagactacaaactaggattcctgcttgtaattacattgatgggtacttctgtctttttaacaatagattctgttctctgctgtttctctgtcttaccccaccacccctttgtgtgtgtgtgtgagtgtgggtggctgctatggcaactctgaatataactcctgctgcaaatgtaagccttataggcaggctttgctgttatatttgaacttacatacaaatatattttttcccactttcactagagacaccttgggaaaasttgataataggaatgttggggtgtttcaaactaatgcagtctcatgaaatgcttgccagaattttgatgggtagtaaatagaaaacagccatatattcaatatcctctgtggaaatggtcttatggctgtatttagttaaaggcatattgatttaatttagtgttggtgttataaacatacataaatgcataaataaaaatcaatgagccctgttatggagtaygtaaataataactgagaaatatgtttctgatgcctctttgtgtggattaggaaataaaactgaggaatttgaactctcccttaacatctgactttaattaaggctttggtgctaagttgatcatggaggtttattttgctttactgaaaattttcaggaataataaaaaaaaaaagctctattcctatttttgtaagtaccattgkttctccgggaaaaaaaaaattgkgagagttatttaactctcagtcatcaaatttataattcagtgttcagtgacattagaatgtttaaatttacctttgkggtatttcttttcatataaatgggtaaagtttttttcaattaaaagcaaatgaacttcaaggttgaraatgaataattatgtttggtgaatttccagttaacctcatataaattgttgaaacagacagacatgaaatgacctcctcgggtcacttccaattctgaccttagatttttgaaaatgtcarggaaaaagggtcagttacatttattggcctctgtttccgctaygtgttgctgcwttataaaccaccctagaccttaaaacaacaacaatctgttactgtcaggatacgtagggttgacttgcagttttcctgctagtcaatccttgcttctttcacatgacacattcagctaattcagagatctggggtttgggctcagccgagacagcacaaatagctgggcctctctccttctcaacaggtctttctcacaagggtcatcttccctgatggcatctcaragccgccttccaatagggtaatgacccaagctgcagggtatcttragacttaggttcctaagcttgttacacatctctgtcactgtattttattgtccagagaaatcacaaggccagcccagattgttgggggtagagaaatagattccacctagagatgggaggtgcagcraagtcacactgtaatgaggagaatttactgggatgggaagaatttgtggcattaaacgatttatcccagtcttttcccagaatactggtggaaactctaaaatatcattccctctctccccttcctcattggtggccaatcgttggcattatcccactctcacttcccacacagccatcttttataataagctcacaaagtcccatgcacaacaatcactgctcacaggctgctgagacaagggttaaataaacacaacccactagtgtctgtttgcccctctcttcttttgagacttattacctaattctgtacaggagcatgagcyagccctcacttggaggtataaggattcagggagtgcatgtccgtttacttgtagcaggtgatttcatgagactggtcagggattgtgtytggagtagaaacaatagggtgagccaaatgaaaagctccaggctgccatcatgtacttcttttcactggcaaatgagatatagctgccatcagaaggccattcctctaaagctccctgcttaggcgtaatgtaatgctgaaacgtataaggtccctgtgctctaaatgtcaaacaagcaaatttgatgaagcatctgctatgtaatacatcaaaaatatttactgagcatgcactcatactgtgactgctatactattattatgacwactggtgccatgaccactattattagtcgattgatgtttcacctattagccttcagctaagtgttattgatgtagttgggggagagtacaaaagacatttgtgaggtatctactgggttccaatattttcactaccatggacccctttcattattaaccctgtctccctttccccacactactccatgaactgcgtgttttaaaatctttaaaacactttttaaatctttaaaatactttcccattgtatcttaggcccagatattaaataattgctcataatcataaaatataataatgctgttttgcagttacacacatacagctattaaaatggcttggatgataataaacagttaagtaaatgactaaagacctagagatactctgcatccttaccttaattttacttggcttctgtaaaagacacttacatttgggtattctgtgattgacatgtggctttataatggttttctggttcttcagtcacatcacagaaattcccatgtcttcaacaaccactaagcagcatgagatcaccagtgttgccaaatgacttagtgtactcccagccaaaagcaaagaacattgacgttttggttaatgcatgtgggcttatgatggataaatatactatttgattaggctgtttgaaatattgaaaaatatgtcagaattatatttatgtgtctggggtttcttatgttagcaaacgtcggcttggggactgctgatagcctcttgaacattctaattaagaaaagaggactttctattctaggacattataagatagggctgtattatgacttccatggaccctaggtacttttgccttcatgggccccttccaccataaataaaattaaaaatgatattttacaagtgtagttctataaaaataatatataaatgttatacattaaacattttcttttcacctaaaaattcacatttaccttccgcttctaaaaaaaagttatgatattttcacgcgtccttcaaagtgtcatgggccctaggtactgtgcttactgtaatgctggattagtctgccctgagtagggggtctaataaagttctctatggaatatgattgtaagagtatctggtaatgatgagtcccacccaatgtccaggagggatgaggtcctgctggcaagcatcacgggaagtgcttcaraggtgagtggtacttggggtgagtcttggagatggacatgatttgaacagggggagaagaagtgtcccagggaagggcaatagcagaagcaaaggcaaagaacaagaaacactgaaacaatcagaaacaggtaagggggaacctcagcacgagggtgtacatttggaactgtgggatttaaggattagcaagggtgaataaatcaggaagactttgtaaaccaacctgaggctttatgacttgaattaaaaagcaatgtggaactgagaaatgacattacagaagcagtgcttcagaatggytgtgtttgattcaattccataaatatatattgaatacctagaatgcataaagtctctacatactgttataaactcctttggcagcttaaaaatggtctggtagagagtaaagagagaattaaaattgaaagaaactaaaggcragggaaagcttttaagaagatcaacacagaatcttgggcataaaatcaaaatccctagacagagtctcaggatttggatttggatttggatttagctggtttccttaagattgagagcccttatactgatgtgaccaagaccagatgaaatgaaatgaaagtcatagtttctgaggaatggagtaagctgggactctgagctgccaagcctgagccatggcagggtgagtacagattggagctgctagggaatctctaagcactttctcctaaagcacaggaataggcaagtcagatctagacctagagccagtactgcattgtccacctcagagtttctaaaccatcaccagcttacttacactatggctaaatgtggccgagttcatggtccaattgttctgctgttttatttcaaacctatgtcccagttaccatttactgaaaagtgactattggcctactatcgtactagttactttaccttacctctttatatggctaattctttagagtggctgaaatgaaagtatggctgtatttatttcacaggtaacaaaattgagactatgagaagctagttgacttgtccagggttattcagctagtctgttttacagccaggaatgtgacccaggccactgtgactccaaagtcgatatttggtcttttacatcacactacctcctggaaggtacccccattgaaaagaaggcagccaaattttgagttatccccagagtgcagtgcctcacacacagtaagtgaaggaaacttgytagttgattttaattaaatgatgcataatatgaattaggaagatagttgaaaacgtgtgtgctccagaaattcctgtcttatgtcctattttccaggtgaccaggtagctcaagcactaaaagccatatagatagtcttgattattggattttaattgttctttaattttaagtgaatgcatattttataatttttatatgttctgctctacatatcatctaaggtgttaaagagctttgctttttaaagtgacaacttctaagtatttttaacttcttttccatatgcaacaattgactgcctaacaacaaaactaacactggcagtgcttatagctgggtagaactccatggtaggtaatatcactttgacaaggtggaacagaaaaacaacaacaacttataatgagcagctctgaatacatggtcatttgatgtcaggcccagtaacatgctcgagtctgcttttcaaacgacacaattatctgctgcaggtgacatggccttactcctggacccctggggcatacattgcgatgctcccactggagcctgccataagctccagactctatgttttcccaccactgacacatcaatccctagaatgtctgctggatccatggcccaggtaccagagctgctttccccacagcctgtacctgctgctgcagagccctttcttgcttcaggttctattcaaagttggcagctttgtatgccacccagtatcttagtccattcagatagctctaacaaaatatcacaaactgggtatagcatataaacaaaagaaattcatttctcacagctttggagactagaaagtccaagatcaaggctctggtaatttagtgtctggcaagggcctgctttctggttcatacatggtgtctagtcattgtgccctcacatggtggaaagtatgagctagctctrtgggctctgmcctcaaaacctaagcactccacctcttaataccatcactttgcgagttaggatctcaacatataaatttgtgagggggatacacacattcagataatagtatttagtatatggggcagagcaatacttactgatatgggaggtatttttcccaaaacccaaagtgatctacaaagtattgtgcgtccttctttgtggtaggggtacgagatgcagtaattgtcttttactttggagggaatgtctagcatgccactgaccactggatccctaaaatctttattgatgtcattaggccctgagtattgtaggatttatctccccaaatctggaatgcatgtgtcttaccaaggcctacagtgtgctagccaactcttgtttatcttgtcagcatgatgtcttgtatataagtgatcaatgactaaactgggggacatccaaactatctctatctccttagtytaagttatggcagagagtgggagggttaatatagcactgacatcaactgtgatgtaaggaattgcctgtaccaggtgaatgtgaactgttcctcatcctctttttggaatggaattggaaacaacccattaaacaaatcaatggccaatattagttggttgaagattcagtggtctacacttatccttcaggatctgaacagtcttgtgaattacatggaaatagaagaaccagcactcctgcattattgagatcttgagaggtgacattaaatcttcactatcctcccttcaataatgtagtagtattttttatttattatcttggagtttccgaatatttcaattaaattcccctaataagtagttactcctcttgtcaagtattgtgcatccccatttatgcactcatggactgaggaaatgacccctgcatatgctcagagacttaatagatccactttcagccagactttggcctggacttatttattacctaggctcatatgtccctactctaacaggggaccgtgatgacactaattcaggtctccatgtatcattgtctacacagaccctgtgtccagtcatcctcaaaatatctggatatttttttttctccagtgtatggaaacctgagtaaatgactgtgggtctttttgaagaaggactggggaaatcattacaatgtatacctcctacagagtttcagggtccttccctctggggacctgatgcctcttcaggcaatgaagtcattcagtgttgtaactgtgcaaagggttgaagattttccctggggcacccaccctcatgtcatacattcccattttcttgggatgatatatattaggtagtctcgtggctccccgtctattttgcccctaagggatgctatgttctataaaccacctctataactttctgtgtattaagtccctttggctgtcactctggctttgtgcattgttatgacaattgggacccactggcttgtggtggttaagcccagcacctggcttctctttcttcagggatgctgtaatccccatggatattaagacacccagctttgtgacagcttcccctaccatcagccctgacctgcagaggaaaggtatcactgaacttctgggtgatgctggtgtccctctcaccagtacactctgatgcctcagtgaatgaggtgtccacccctcaaggctaatatcatctggtgggccttcagttctcacatgatgtgtacattccagcaatgcccacttcctggagccttttaattccttctacccatttgccaagacaattcaggaaattcaccctcattcagatagagctatcactttctccatgcttgtaggggccagcccagcagggagtttttaccatccagtgcactagaggtggaaactcagctcactggtctccttacagcacaatgacacagtatttcttgaaatagagattagagaaatttacctctgtggctgccacactgctttcacctagttctaatgcagacaggatctaacaagctaatgcacagccagagattaatagcgtgatatagtatcttctctgatcctccctgtgtcaaatatatttacattttaagtgccttaacatataggaaaaaatatatagcactgtagtccgggtgcagtggctcatgcctgtaatcccagagctttgggaggccaaggcgggcagatcacttgagggtgaaactccatctctactaaaaatacaaaaaaatattagccaggcagtggtgcatgtctgtaattctagctattcgggaggctgaggccggagaatcgcttgaattcaggaggcagaggttgcagtgagccgagattgcgccactgcactccagcctgggcgacagagcgagacttcctctctctctctctctctctctttcttcctctctctctctatctctcatatatacgtatatgtgtatatatatatgtatacgtatatgtgtatatatatatatatacgtatacatatatgtatctgtaattgcagttatcaaactccttctaaattgaggatgcatttaaatcgaggagatttcttggtacttcttctgttgtattacaagaaaggttaccttcttcttataagcacagtctgctttgagctatttgtttgtttatggcatttaaagaaactcttggaaggagaacaaaagyctccaaagaacaaatagaaatctctctataataatacagcaatttgaggtataaaaataattattgagttcttactgtgctaaatactttatgtacagtgtatttactgctttgttctgtcaaatacattaatcaggcatctttctattatagagacttatgctattaacttctatacattatagggaaatattttctccttggacattctaaaacttccactatcaaaaaaaaaaaatcccacaaccacacaaataaattccgttaattcaagctaccgtcgcatctttgaaagaaatttctagaaagactattttacactttctcaccttataaaccggttacatggggtttgccccttccacctccacaacacacacacaaacacacatatgcacactcactctcctgaaaccactcctcagacctcatcccccagatcttatcaagagcctcttcagatccttgtcttgctggccttctcagtagcatagatactcttaattattccctctatttgagcttttctctttttaatatgttggaaacattatattcttcaaatttgcttttcttctcattaagtgcttcattgcaatgtcagaaaactgttaccagcaattaccgagtttctgttctagatcttttcttccctctgttatcccttccaacagtgatcccatctattcccacctccacgcctttcaagtgaaccccacaactccttcattggccttaacctctctcttcagctccagactttacgcctaacttgaacatatctctggagtgtctcatcagcaccttacttgcagaatttcaaaaaccgaaaccatgatcttgccactgctcccagccatctcctgcttttgtgtcttctgatttgattattgacattcctaccctcgttacccaagcctgaaatctctgagtcattctcagctcctccctyttccacacccccgcatccagatgtctgattaattctgttggttccacatttgaaatacctctgaaatccagactcttcatatatgttattctactggttgaatttaccttctttgtgttgtttgccttgactattgcaggatcatctccaataagcttcctaacataattcttttctcatccttgtccattctgcactttgccactggagtaacacccctaaagcatgagttataagcgcttatccctttgcataaaagctctccatagcctgccctcccagtgaaagccctttcaagcgttacactcctacgtgtgctatacaaggccctcttagccctggctaaaagctgtcttccctccagttatggactaaattttttcctcccttgattcatatgttgaagccctaacccctaagtgataatatttggagatgaagcctttgggaactgattagggttagatgagatcatgaaggggtaaggccctcatgatgggattgtgtccttataagaagagacagcagagagcttgcttcctagctctctccaccatgtgaggacacagcaagagggcagcatctgcaagccacatagagcccacaccagtactcaagtatgccagcaccctcatcttggacttccagtctctagatctatgagaaaattaaattctgtcttttatgccactcggcctatggcattttgtcctggtgcccaacctgaaccccctcccttactgcataatgccctctctcacttcatgtgaacccagtccatattagactacatttgatcactctattccactcgtttacactagactatttctgctattctctcagcctacatttccagtgcctccaacctccataatcacccgtcaaaattatattcacctttttgtgtgtccattagcgttctctacgataaataatagaaaatgagtcaagttgatttaagcaaaatgaggtgaaaggagaggctcgaaaatgaggctcagggaatgagcaggaactgatagaacctaagcagccagaaccacagccaagaccagacaacaggaagggtacgctgaggatacacacggctgtgactgcaggacccaggtatcgctggcaccaccacttytccatgcctccacctgcactgccaccactgtggctgccagtggtggggatgtttcacttcacccacttctttgcatcatttgcagagcatctggttgagtgtggatcacgtgccagtggcctgcctgccaaggctttgaggaaggccacactcagatttttgtttagttttggtggtggcatagaatatatgcttcccacacaggagacaatacatgtggagaatttcccaatcacaagaaaggggttagatgctaagtagtgggaaaaaaattctttttaccttwgcaacctggattaaggctggtccyctttttaaggctttatctcatctttttatttaaaattaatctgcacatcttcagtggtgcacctagcatatttgacacaaaagcaaatcacttttagcatcccttcctctatatggaaaaattattttcagtaataactatgtgataataatcattattttattgatttattttttatttttaagataagaataggtaaagtatatttttaaaatatactatatatgcatggttaaatttaaaaaatttaatatatatttaatttttwaattttattttaatttcaggggttcatgtgcaggtttactatataggtaaacatgtgtcatggggtttgttgtctaaattatttcatcacccaagtgttaagcctaggacccattagttgtttttcctgatcttctctctcctcccaccctccactctccaataggccccagtgtgtgttgttcctctgtatgtgttctcatcacttaggtcccacttgtaagtgagaacatgtggtatttggttttggttttctgttcctgcatgagtttgctaaggataatgaccaccagctcyatccatgttcctttagaggacatgatctcatttatttttacagctgcatagtattccatggtatatatgtgctacatattctttatccagtctaccattgatgggaatttagacttcaagcaccagtgttccagtgaaccgggcagaacttcatcttcttttatgagcccatagttgattccatgtgtttgctattgtgagtagtggtacagtgaatatacatgtgtctttgtgatagaatgatatatattactttgaatatataataagtaatttaaataaatatatttatatttatataaatatataaatgtattttaattttaaagctataaatattcaatatgctattttatgtatcgactaaaatttgcacttacccagtaaaaatactatactttttttttttttttttgagacratcttgccctgtttctcaggctgcttaattatttgtacattcctcactgcagccctgaactcctgggctcaggcagttctcccacttcagcctcccaaataaaatactatactttgcattcacactagtttattattttaagttttaracatgaataaaaactccaggtggtcacatagattggaagaattgaaatagctcaagttctctttcttcattkttacaattactatgctatcatgtctttttttttcctttttctttttgctttttttcaaaactactgkttaaatgcatcaccacaggggctggagacactaaatggagcaaaagccacaaatgattcccaccctctatgagcttactctccagatgaatatgagtagatgagtccacatgtctgctagggggcaaatgtatataggtgggcattctttgaattaatttccatgtgtaatgcagtatttattacagattatgtaacaaaagtatgcttatttaaagcttacatacatatttttaatattcaacaataactgcaacagttatttcaacttatatcaatgttctgtttactattgctccttaacaagccaccccaaacttagcataaaacaaccattttactatgctcacagactctgtaggtcagatatgtgaaaaaggcaaaatgtggctatcttttctcttctccatggkgtttccaaccttaactgggaagaktcaaaggctgacttcaaaggtgacttgatagccaggacatgcagttatccraaggattgttcattcaccttactgcacctgggctaggagaaggtgaagaccacaacagcctacccataatcttctcacatgccttggcttccacacagtgaggcagctccagggagtgcagcttcctacagaactccaagcaccagtgttccagtgaaccaggcagaaatgtgtcttatgagctcaatcttatgagctcatagtgtcacatctactgcattttcttgatacaagcaaattgctaaggctgctcagattcagagggaggggaattggactctacctcttgatagggaagattcaagaatgcaaggggttagagactgttatagccatctttggagaatacagtgtgccacaatcaacaagagatttagaaggcaggagtatgttatcactgacactgcttagaattgctagagcatggcaacaataaagagcagatagacatttagtaggttttactgttgcatcccctcactgcctgcacctgggcagactgctgctatgcccacccttagtttgccactgcccatgttctgatctctgcaggccttggtaatgtggctcttaaaaaggttagagattacccttgtccagttatcatgtgtgtattcctacctcatgtagcctataacatctctgaggctacagactgtttctctatagctgtcacaatgccagccggggcataaatacaacccagacttagaaaaataggttgattggttcaaacaacaacagccatatattcagtgctcattatttggaagtaagactttctaatagatgacttgcccttgtcctctaataaatctattgtctcaatgtattctgatgcaggaaaaatacccaagacttagaggctgtgcctacacaaagcataggatcgattgttctgaataaataggtctaattccttaaataaagtaaccatttgcattttctctggcaattctgttaaaaccaacaragactgtctgatacaccttggcatttatagaagaccccacacgtcctcctactaagtagcctcttcaccactccagtctcaactgggaaaacttttaagcaatcccatagttggagatactgcctgaaggggatccatgcacatcctgaggatcaggaaattttgttacacaccagtaaacaattctgagtacttytaacatgcctgtagatgtggaaacaactgggttgggtttggagatgctggctggaggactccttgtctctagctgagtctatggctgcttatggccrtgtcagcatctgcacagcacaggacccttcagcagcccacttcagaatgctctttacacactctaaaaagccctaaaacttaggaccttttaactcttattttttcacagaagggtacactgtatttgtgtgaataataagtaatgtccttctattatttatgccagtactgtgctaagtgctttacatagattatctcatttaatccttatagtcaaattccataggtactattataattctcaaattaaagatgagaaaactgaggctcaaagaaattcattaacttgcccacagtcacacagctggtatatgctggagacaggatctgaatccagaacgtcccccgtgtctgttctcagaactacttcattccattgcctcccccttgcagccagtaaacccaggtgcacgttgaggtggctgaccatgcagaattccaggtcccttaccctgggcacttcgttctgggtggcgaatgtctctgtagttttttggaagagagtgggattttgatttccagcatggttctttgctactcacatggccatggcataaagcagtgttctggcactgctggcttctcagtaaagagtgagcaagtaatcaacatgcacctgccagataaggaacacgaaaggaaccactgcacataaagcaagcatatttcttatatttaactgttcttaatggcccttgtgttctcatattccttgcttttaagtttaacttacttacagtgacacccactaattcagtggggctatttttaacatagaatcatagggacgtttgacttgttcttataattggtttttcttatcccattaaagttttcttattgggtactttctattgcatgaagctctatggtgttgatatcataaattgggggttattacaaatataatgaagaaaattaaatagtaaaggtgaacagtcgtattacctaggatgataaaactgctctcctctcccacttgtacagacttagttcaggccctcattatggcttacctggattgctaataaaaatttcctaatagcccctactcttgctggttgaaattattcattctttatataattgcctacacaactttctaaaatggagattatgatgtgcggacctggcttcaaggatgtgtgacctgattcaggtcctgtctccagcacttggcttaatgctctgctgtcactatcttgtaatttgtaatgatttttgaaaaacaggtctgtcattcaytttcattttgcactggaccctacaaattatatacccagtcctataacatgcaatcatgtaatccacccccaactccatagaggctccagaagcccctctgtgaattacctaagaattcatgaatgtggtttagaagcccctggattttctgtaaacttccttccactttatttttttttaattctatgaaccataaagtgtttcacagatggagggatgtcacagacttaatgtttatacaaacacctcaaaaatgatcctcactcttcttctcctgttccctcatttttaaatctctcataaaaatggcccctacaggaagttttgcctaacactcccctcacgtccgggttggtggttgcttccattttgcttgagggaaagagtctttttatacttgagacttagaagaaactgttgatcaacgtgacttctatttcctgtgaattatttctgtgatttgtgctcttcaacatacacctcagttattcttacttgtcttttatatgtctctcctttctcttggactaagagctccttgaggtcagcagcaacagacttccctatctctatattgctagcccaagctcattatccaggacatgggaaagacaccataaatagtatttgaaactggataaatgagtgtgggaatgaatgaatgtattctgtacactctttctttctcatgaagcctcaagctgtttttaaacttttaattaatagctttttctatatactatatgttcagtggtattctaggaaatcttttcttatctgccataaacacacagtctgcatccactcttcctttctgtgttttgcccagggatgacaagcttgcatccattggctcctacctatcagcaagcacatgcctgctctgctccctcactatatgtcctattgccacccaagctccagktcccagaaaagcaagagttgggagaaaaagcctgtgaaataatttatcctctgtcccacattcccatggacatttatcccagaagcatagctaaacttctctgccttctggttccaacttctatgtctcctgatgctgccaatgagagcctaggatccctgtgttgtcttcctcccctggtgcccatgctgcaccacctgccagaaacatcttcctctagcccctcaagcacctaggacactaccccctctccttttgcgtaagtaacaaattccttcacccagctttcaaggccaagctagttttcccaccatgattctccagctttagccagatacatctgctcacgttgcccaaatcttgcctgacttcatgccccgtggtgcctttcctcacatcactacatgcatcagagacaaccccatccctggcagcccctttaccaggaaatgccttcccaaatcaaccaacattctctggctatttgaatggtcagtatgttttcagtagtttctcaggtttcggagctagatgtaaatgccttcctgccaccataattggagctgccaagtagttacagcaccagctttggttatgcaaagctcagcttttcatctctgcacttggttctttagtgtcattatctcatctggtcctcagaacagctcagtttcataatcctttattcttaattctgaaatcctttttttttttttttttttgagacggagtctcactctgtcgcccaggctggagtgcagtggcacgatctcaactcactgcaagctccgcctcccgggttcacaccattctcctgcctcagcctcctgagtagctgggactacaggcacgcgccaccacgcctggcttattttttgtatttttagtagagatggggtttcaccgtgttagccaggatggtctcgatctcctgactgtgatccacccacctcagcctcccaaagtgctgggattacaggcatgagccactgaaacctttttttttttwwwaaaaagccctctctatgcaaggcaagacaaatttttgttttgtttgtccctggatgaaaaactttatctgacctgaatttattggggttctttacttattctgcttactgtgagtagccatctgttttgaggtagaaatgtgaatgtgttttattatagggtgcagcccrgaccacactggaggtatcaatgggcggtacatagatcatattaccccaaatctgaaaatgttctgaatgctgaaatacttctctacttgagggctcagataaaggagtgtggagctgtagtaaagcagaccttgctgctttccagatttgaccaatgaggagactcaatgaggataagtcatcacccacctaacatcatagccctaatgtactgaaggatcaagactggaactcagatcctctgatgctatctgggcctttatccactcattataaccaactaatgtgcatgcttactgcaggctagaggggaagtagagattcttttaccatagcctgttaagtacattagattttagaaaaatcaatagattcctggaaaataatacagtttcttagaggtcatttccaaaatatagtaactactacacacctaaaaaatagctaaagtaatgcataaggctgaaaggtcacatagattattcattgtgagagttgctgtacattttgtatatatttttgttctaattatatataagcagtgtgatatacacaagcccagctctccaaagcagtacgttcatttattcacccattgagtgaccctgtgccagggctgagtattgagtaagcggcaaaacaaacataacccctgtctccacggaggcctagatggtgttttaactcagttgtttgaaactgtgacctgatggaaatcatgtcatacacagagtttaggtatctaactcagccttcaaaagcctatttaacccatgwtgtacttaaaatatattattaatcgtggactaccatgaggtacagtgtttccacgagaaagcaggtggaacatcttgattcttgtcatatgtctggatataattgtacttccaagtggaactatagatttcctgcctagaaacttctgttggccactgaggcctgagacttgttatgttttattcctccctcaccgcactttcaccttccacccatgacctcacccagttcaaactcatgggtgcacataagcacgcatccaattaaccaacagttctggccagtttaacatcctaaatattccagtctgttcrtaactgcagctatgactctagttcaagatgtgatgatccagcactggcaactgattctcccaaagtgatattttaaaattcaagtgtactcctgtcacattctcatatcccctttatggcctcccattttccttttaatacgaatccttcacttggcacacaaagctttttgaacctggcccccgttaacctctctggcctaattcctgctacttccctctgtactcacccccgtcccgacccacacaacctccagactgacacactgagtcattttcagctcctccttcaggcatgctcttgaaggtaagtagtcttacctctgcttgaagactactccagccccgccttcctccccaaggctgagggagaaaggatccttgactcctgtactgcatgtattaatagcatctttgttagagcatgggctctgtaactgaactgcttgartttgaatcccagcttcatcaccttttagccttaagtccatygataagttacttaacctttctgtgtctcagttacctctgttgttgagtaccaatgtcatggaattgtttggattacctgattgagtgcatgtaaagcaccgagcacagttcttgacacatagtaagcattcatgaaattttaacttttattatgattagctgttactgagagtgagccaagaaccataccaggcgctgaggttacaaagagaaaaggatattcctatcccatataagctagcatgggagaaaaagataaatatttttatttaaaaataactctttttataataattatgaacagaataytgggtagcaaagtgagaaagagtcatcctgctcctccaacagctgagactaaggctgaggatgtgatttgaggtgcaagcagrcactaagcaaagagatgtgttttgacacctttgataacttaacatgccttaaacgaagtttttgttgtgaatggtagaatctggtaggcgtgggagaagagaggtcacagaggttcatccccatcaccttcctccttcttgaaagggtgtaaagtgagagttggaagctgggtggggactcagtgggaatggatgtaggaagcttttggttgaatgaaaattaaaggagttggggagggtaatcgcaagccttgagagggggaaagaagagcacttcctgaggacccaacctggaaaatttctcccctgccctttacttactcactaatgagggttagaaatgaggtcagaaatacgttataagcacactcttaaattttaggacatcctttgaaatgtcacactgtcattaatattagttatatgtattgaaattagtgtggagctgataaagtattttgttgctgatcacaaacctataatgtgctgcaatattatctttctaaggtatgatgagtctttttctgttattatataatttaagatagtatttcaacagtatctcataatctagaatctaattgtgacttaatatttaaaattttctggttctagatgatatatgtatattatgtacatagtagatcatacaaagatcagacatatagattatcacattatcattaattatagtttctctccttatctgaagaaatcctgagaaatattttgagtcctaaagatttaagtacttcagacagctttaaggactattcagagatacttgaaatatgcttttattgttatactattaatttcttgtccctgacagtaaacttaaattttttatttatgtattttaagttttgcaggttctacttcatttttgtttaaggtataccaaatctaacccttcaattcrcccaaatgtcttgtgcatatttttgtagtatttaaaatttccagatttgtcttttacatattgattttagttccttacttgctagtcagggaattttaaatcttggagatgatgggatagaattatagcaatcaaatatattttgcttgcagataattcttcagatgttacacagcttatttatttatttatttttgctcgtatcacaagctatctttatgtaaatatcatctcactttctatctggtgtatggaaaacaaatgttaagtggtgaatatgtgtggttcttgatttcatagatgataatgtcaagcaaaagtgtatttgttcttctagctgatggatgaagtgccatatgtgcagtatatttattgggtcaggggggagtcatactggagataaatagtctccatgtaatatcagccatggctgcactttagggattargtaaatgtgtctgtgatgaaggagctgttattcataaccaaaccatcaatcggcctttgtgctgagggcagcagagttactgagcatattcagatcttaacttcatgtaccagctggtcctgaacactgaggttgttgttacttacatcacatttgtgactccttagtgtttttcattcaaggacatcagctacaggataaattctgtgttcataatgacataatcttttgttaggtacccattaaggatattgtaaagaaagtggatgtttactcttgattttcaaatacaataaggagctttatccccatgcccataagttagaatacattatttctcctaacacatgtatagttttaatccaaatatattgttttaatccatttaatttattctaatcacaaagcaaacaaaaattctcatggtgccatgtgacggcaatgaaacttacacttcttatgtgattgccattctaaatcctacagattatcatagttattttcattttacaagtgatataactaagagtcagagaagttcagtaatttatgtaaggtcacagagctaattggtggtagactgaacttttaaccctgactgttaaattcctaaagctgaacttttcctcaaagcttacactgactaaatacggaatctcctaagtctctaaaggtatcaataaaatacaaaacaactggttaactttgatgaagtaacatatttaaaaagtagccattatgataattagaatctgaaaaaataggctatatatatattagtttaacttagaaaaccctaaataattccatgatattatcattttattgcactgtttaccatttgacatggtaatatattaacaaatatttaaaaataaatgtagataaaaatatgcaggtaaatgttgcctaacgcagctcaggcagcctggaaaatggttttaggatcagtgcccaactcgaagcaatataataaataaaaataataaagtagcagtaactgctgaagcgggtataatcttttttggaatattcactgatcattttgcgtaccctttaaattatgatgctcttgtctaggtcagcattgttcaatagaaatagaaagtgaaccatatatatatatatatatatatatgatttaaaactttctaatagttttttaaaagtaaaaaaggtgatattaatatttaatattttgtttaacccagtgtatccaaactattaccatttcaacgtgtatcaatataagttagtaataagatagtttgcatttttctttttcaaaattttctaaatccagtgtatgtttgacacttgcaaaatacatttcagttcagacactaaattttcatctgaaatccttattctgtatttagatataaaatttacagtgtaaaaagtagatgtgaagcccaatttgtttcaaacatatattaacattttctaataatctagttgagtaccatttttgaaatccttttcattaaaaccaagtaaattgaaaatttagtactatagttggcctcatcatatttcaagtgctaatggctacagtagctactggctaccacattggttcagtgcctcagagaaagacctcaagataagaagaaaaagaagtgtttagcttcagtagttaaatgaggctatctttgtcaagagagaacaggaatttccaaataccacagctttacatatcaaaagcaaaatttgaatatctgaatattttattatgagcataaaatataattataattatatataatgaaagtcttattattatattttattatctgagtattttatagagaaaacacaaattataaagggtgataccaccaacctaggggaagggaaggaagtacttcctgtcctaaraagtggagggttggaggaragggaagggctgaatggcaaatgtgtccatgtaggtgagcacccttacgtcagaaacccaaagaaggcagttgatcactggataacagaaactccagagaggttgtggagataacagaaagtagaagggcttgtacttcatttctggcttgaaactgggagaacaatttctcttagtacacctgcagcaggtaagtcaggctgcagagaagacagtgggagcccagggaccttgcagcagagcttgggagggcaggcagcccacctggggctataaggaaggtgtgctggagacaaaaggatctttacttcctgtgagcctagatggaccaagtcagtatggggccacaaggacgttagcagtggttgtcagtagggcaccaatgaagcagtgggatacacacctggcagtggaggccagtgaaggctggtgggttgcctccccaccttgaccttgaggtcttgcaggcctccaactagaccccactgttgtttttccagaagagagaatggtgagaaactgagaacaactaagcatttattcagaattcctcccatcccatttctattcagtgaaagatgggtgcttatgatgaagttttgatcagttatggaaactagagttactgcatgttttatacaatctagattataacaccgtatagaaaatttatgacttcaatatcccactgcttattgtaccaccattaccaaccctggcccccatcacaggtctgaattaagtgaacacaggtctgtctggcaaagtccatggtctttccaccattgcatcacaattttgttacacaccccatcagacacctttacattgctctttggcaaatttatcagtgaatcaagaatatcaagtctaggtacataaataaaactttcaggacattacacggttggcttaacaaacgaatgccccattttttaaataaaaattttatacgaaaaatgtcagtagcagtttgtaaacagatctcgggcaaagtgccatgaggctctgtccttgatgctgtcttgttattagtgatctgtgtgtagctaactagaatctgggagaaagataactaatataatatgatagatgccagcataaaagttcaaaatggtgttgacagggtaaaatattttttgaaaacaataataaatttgactttttgaacaatttcaggagcccagggtaaggggaacttgataaggcatcagttcatgtgaagaagtcatggaagattcagtggaccacaaacacagtttgaccaataatgctatgaagttattaaaacacacacacacacacacacacacacacacacacacacacacacacacactaatcaaacctagtgccctgttagattgcattaatcaaagtcatcaaaatctggaaatcggtttaaagataatccaatcctaacttgactatgagatacaaatcaatgagttaagactatagggtgcaatctggaaaaatctcaactgcactctgggctggtcagttgtagtgggcaccggtttgcttaattttgggctgtactctttgagggaagtactaacagatgtcaaaagcactagagtgtgcagagtgctgagggatctggccactgagttattcccatactgaggggaattgaggctgtttgatctgtagaaaagaggcgaacagtaaaagaatacgtataatcatctgcaaataaacaattagtggatgtctttagggctaaatagcataagaaaagggtgaaagaagcatgaaaacaagagaaagaaaaaggttytccaaaagctaggccacaatgaatagcctagacttggcttytatgtcctcactctagtgaaggaaacaatgaaaataaattataaccatacattgtggycagggttctcagatgaggaacaaggtgctttgagaacacacagaaggattgtgtatgttgtytaggacacctttcccccaccatttcccttttgcctggaactctcatgctcattcttcaggatctaaccatagatgcctcctctttgaagaaacctagcacagcctctgatgcatagtaggtgcttaataaatatttgtgtttttttatttccatttatttttgtaayagcattgttttattattaataatagttcagtgttttctcaatttacacaaaaaaggatgtatattataacaagtgagtcaatgcatattacagactaataggacattatgattatattttagtaaaagcaaacaagtaagcaaaacctttttatatgtgtgttaattattgtatatatttgtataagcaaagagaaaaagtgtagaagaatatacaccaggctcttaacagggagcaaatgatcagctttggctttctgcatcttagtgctaatggatatttgtggaatgggtgaataagctctgctaataatgattaaatggattggcctgcgagatagtgagcatctactgaccctagaggactgagtgaataccatcctgctcaaatcacacaccctgctgtttgtattttattttagctacattttgacatctggttaacctagatggtttcataagtgaattaaaaaccaagagagcataaataatcaattcctgttctgtatccaacatgcttaatagattattatgccataatttccttttctgcaaattaagaataatagactttatgtaaggrtaacacaattagactggctaaaaaggcacttatgttcataaagtactgaagagttgctgagtacaagtgaaagctctcttattttttcttttgtaacatccatgccaactgattattctgcagaaaaatttgtgcattataaagcactgctatgatctactttaaagttaaatatataacccttgaaattcacataacccttgaaattcagccactgtccactctccactctgatggagggaaaagccaaataccaggctattcctaaaatagaagctttttcatgagtttgcattgtggctagactgtctatgggctccttatgaaccttgcttgagtcattagggcaatttaacgatcaactcgacattcaagagaaacttcacagggatgtagcccaagcccrcattttactatggtctcatacaacttggacaagtaagggctggactgtatctgagatggccttcgggggtgagggaaaggcaaattttttctgaagccgtatagattctgtagggtattttgcacaaggaccacacactatttcccacttccccctaatagcagagcatagatgtagccttactcctatgattctgtggtggcctcctttctcctgtctttagtttctgactgtcttgcattcactggtactcaacttatgctcattggccatttcctccaggcaagaaatcaatgaaaaagaaaggaarattaggagatacctaagtgccttccctctactttccatttacgcctgtcttttctcgacagtgccaccacaatcatcaaattgtgtactcttcataataagctttatcttgattcagtttttaacctataaaatggaggtaacagtgatacctaacttcaatgattgttttgaagattgaataagtaatttgttaataaaatgcttagaacattgccgtgaagagcaatcactcattaaatggtagctataattgatactagcagtattartattattcaattatcatcccacatttattttgtctcaatgaggacagaatatcttgagtgttaacagatgtaaagaaatgcaaaagtaagaaataattaaccagccttatagctgtgttaaagaaaacctcacaagaagcctgaatttccctgtctattcatacgcactcgtcatacaaggagttactcaattagctgcatcactgaaacctgaagtgatgtgatagcctggccttgttattcatgtgggcagaactctttaacacattytctcagaatgrcaaaagcatcgttttctctttctcatctcttcctgttcccctctcatgtatacttaccctccataactgaaattatcaagcttttccaagcacagtyttagacacacagacccagctccgaaggtcacaggccaagatggagacagttcagctccccctgccccagagtattgagacctgggatggattgtaaaaggctagaacttggctagagagatgccttgtatcacttggactgcttacatatttatacagccccttttggcagctacaagggctgcaaactgcccagaaaaaaaaaaatagagaagataattactggatttcatagtgttctaaaatggcaggtatgaactaaaaacttaaattttcattttggtttactctcttaggcagatgtattgtttatttaaccagggacaatagttaatggtatatatgcatttctaagaatttttctgagtatattatcaataccagatacttattgacgtttataccataaaatctgattatattatcaaagtcatttcttttacaattgctctactmatgacttgaaataataattgaatacagtcaacaaatttgcttataaaataatacataaacttatgagcagttgagctatagaatacattagatgggggaaggaccaaattattcttgagcgtagtggctcatgacatttcatttgctgcaatcaattgacaccatatgttcattagcataagtccagatgccagaaatgtaggtacctattcactgttttgttttgtttttagttgacacatttcccttatcgtacttatggtttttttttkttgttgttgttgtttttgagacagagtctcgctctgtcacccaggctggagtgcagtggcacgatctcagctcactgcaagctccgccttctgggttcatgccattctcctgcctcagcctccctagtagctgggcctacaggtgcccgccaccacgcccagctgattttttgtattcttagtagagatggggtttcaccatgttagccaggatggtctcgatctcctgacctcattatctgcccgcctcggcctcccaaagtgctgggattacaggagtgagccaccgcgcccggcctacttaagtgttttattgtcctaattctggctgataaaatgtagttaaacaaagtaatttcacaatttcatttaacaacatgaaagcaacctcggcattgcattgaatcttaaagtcttccttcaaagtaacatctgtttggtagaaatctattccactttattttttctagctgtattcataatgctggtttttatcaagtatgtgtcctctaaatatggcatacacaaatggaaacattaaaaacacttaaacacttcaacagyttccccctkctaataatattgttgaggttgatctaaaatgaaaattcagataaaacaagaayggatacagtaagaataaaaagaaaaaaagacagttggactatctgtgcttggtgtttctagatgattaagaatgttatgctaagaattggccatttgtaagagattgccrtacgaggtaagtaaaacaaaataattgctactcttgaattctgcttttaagaaactgatttcaaaaacttcataaactccagttaatgatttgaatcatacaggcgtatatatgtctataaatatatgtttgtacatacacataatatgctatgctaataaaggaaataccttcatgaaaagtcattttttttattgaatgtttcagatgtacatcaccaacacaatcaaagccaagggaaccagacttgctaagccagttctatgcttgggcttaatgtgtttggcatttcttactggactcaacagagtagcagaatatcgaaatcattggtcagatgttatagcaggctttctggttggaatatctatagcagtatttctggtaagtacaaatttatttatatatcattgggtttttaattaacttgcataatcaccatgagaaaatacaagtgtgaatcactgggtttgtctaaatgtagtatatcaaacaaatcattcatttaagtatataaaacaaatcatttaagtcattcatttcttcctcctcccccatttgttctgccacaagtcaggtttggggatgaaaaaaatacaaatcctatgcttaaagttgaacaatatattttcatataaaatagagctggcctaaaaacatactgtccctcccaaatagtttttaagactgggtaaaaactgcctataatattttttaaggatttataacaaactttatataaatccttaaaaaatgttataggcgagtttcaggactggtttggatattttttaaagattcctcagggaagttggcatgctggggtattgagagaatcccaaagtcccctagtgagtccctgctgtactctccctgagcctccatgtcccagtgctagcaggtcagcctcacctgtgagatgaggcattttacatcagtaactaaaaactcatgaatagtttctaagaccataccatgtcaaatcatatttcaccgcatagtaaagagcatacacagtgacttytaatgaagtaagcattccatttatactcttattataaaatcttctaggactatttccataggttttggttgttggaaaatgtattttagtctgactttagaattcattattatttatttaaccagaggcaatagtcaagggtttgtatgcatttctaagtatttttctgacttattatcagtaccaaatacttactgatgtttataccataaaatctgattatactcttaaagtatagtataagttgtgagtgtataacattttataagtatgagtatataataaacagcctgaacttccctctattcatgtgcactaatcattatgagtatatcacattttacccaaatgaaayaatgtgtagactatgaatcaaaacatatttttgcattgacacattataatttaaaaaatactttatgtccattttgattacatttaaattgcccttacatgtaacttaactttattagcctcattttactagttaataatcagtaagcaracacttcagtgaatctttccagctaccaaatgttgaaacataatttatgtactgggcattttaaataagttatttcctctagaatctcctgcggtaaagtagtcaccatgacctcatcctgtgctkyttttttttttttttttggkgataccactctctgtgattcccaaggtccctgggagacttaractcaaccttctgtctttcctggagatatcctgtagcctcgtgagaactggggccctggcttgaaccaaaaactttttttttttttttttttgcattgactcaccacagttgaaactggttaacattcaaaaagcaaaaccaacaacaaactttacataaatccttaaaaaataktataggcaaagccaagagcatacaagtagccaaaatttcaaagcactggtgtcagatgcaactgtatttcagctytgcgggtccataacatyttcactggcatctcatcagccttyttgtttatctgtcgctattgccaccttccctatacttccagtgaacaccttaccttacaaggccaacctcaraatgctggkgccttccaagtcacttccctgtctggkgaatgttgagctgagctctggatcccccttgagctcaagaccctccaattgcacaggttgagaacgtttcatgatagccctttgaacattcccatactctcaggaaaatgacttcatgaaaggattatatgtaaaaactgmctatataataactaaaaatgcatttatgcattcattcacagccatttatgaatgtgaatgcctataggtgtgttatttaaatgtggctaaataacagcctccctaaaggatcattataaggctctataaaggttaaacaaaatagtgcatgttcagcgaatttgtgacatgaatgactggaaaaagttccataaactatagtttgcttcctctcagtyccttttaccctacgtaagatttgtgttttgaaaatgtatttgcaggacaataagacaaagttgaggatagaagagatgggttatgcagaaccagggaaacaggatggtgcaaattggccctcagtggcacaaagagggaggatatccatcatgtcctccaggatatttaggaggtggaatggtttggagcctggtggaacatggaaggtgatgtggacgaggcacagggagccttctatgatgattcccagttttctcatttgggaaactcaacacatttattctgagcagtaactccagctctggcctgtaatatgttgtaatatcctagggtgtttctaattatcttgcagtgtgtgcagaattctaaagtgattccaaaataaaattaatgctaatctactccaggtctctatgtctcagttaaaggaacccagaccacccagtcacccagactcaatgcctaacatttgcctttggctcattctcctgtttcattccacacaccagtgattcatttaggccaggttaatttccactataaaaatatttcttccatgtcttgtatctttgctctctgaccataacttttgaattgtagacattattgcttcttactaaaatagtgaggccttctctgaaccatgtttaaaatgacttctcctccttgaggattcctttccttattccttactttacttttctacaaaggatattccaacttttaatatgtaatattaactaatgtgtaataaattactgtgcagtataccatatggagcatttttggttttgctttgctatcaatcccactagaatgtaagctccctgtgaagtctttttctttgttttgttcacagcatatccccaataactagaacaaggtctggtacagaggaagtactgaataaatatatgacgaatgaattaatacatgaaggaatgattaaagaattttttatttacttcccagagttcttttaaggattaagtgaaatcacacatgtaagaagtgaagcctagtgcagacaagacactgaataccacggtcttcacgtttgatgactatattcaaaccctttacacatttgagatttggctcagacaagatccaatttccccaggaagtttccctgattggctgatttttccattttttcctgaatttctaccactctttcagtctgtcctcttataatttaataaggaattatgtgctgtgttaattgtattactcttatctcatgggcattttgtttcaggttagagcgcagaatcaccatacktagcaaaatacaaggcaaatactatttgaacactatttttagattgattatgatatttatgacagtgtcaggcagaagagctcaagtttattgagccacaaaaatagtttgtcatgttatcatatacaacaataatagttattgtgctctttactacattaatgcaattaaccctcagaacagctcagtgaaatgtttttattgtcttcattttgcaggtttaaaaaaattgaagcctgattatataaagtaacttgcccatgtttacaaagttagtaactgagagatccaggattatgatccagaccagtttgaccccaaagcccatgcacttaaccccatgcaataatgatgtttcatttgccaacaaagagtgaaaatgaacaagaatggatcagattaagttatcatcatgacaggaaaaagaaaatatatatgcagtgatgatttactcatatcatcttggtaggagagaatagaattacaagaattatacatgcggaagtcactaatgtaaaaccagaacgtctgaaagcaaagtaacattaaattatataagcacatcagaaaatttgagaatttctgtcctagatgcttgctcattcattaatctgatccctcactgtgacagtgtgaacacagcagtgagcaaaaaagagcatctttgcatttgtggaacttggaagagacacatcartcaaagtattactttaaatgatgtttaatttcatactaagtgctctgataaaaataatcacagctccatgtaagcaaaaagcaaacaaacaaaaacaaaataaaccatcccagctaggagttcaaggaaggcatccacgaggaagtgaagctgagacgagatatcatggctgagttaggtatggcatccaaagacagtggaggtgaggagtatctaaacagcaggaagtgaaaggtaacagaaagtgttttgaaaacagagaaggaaggctgcaaaagtggggctgggccagagtttacacattaagaaaaacggaaagccaagccatgaatggctttaagggggtaacataatccagtttgcatttggaaagatcattctcacattatggtggaaatagaggggccaagattagatttagagagatagtttagaaagctgtgtaggaatccaggcaacaggtggtagttgcttcgtttttggagttggtggaggagataaaatgaagcaaatataagaaatcaagatatttaggtaccaagatatttggaaagtaacattgagcagattcagtaactggtcaagtataagaggtgtaaaggattaattcaagtttttagccttgtgaatctgcaytggggcggaggtgggtgttggggagtggggtggcatgttgcctttccttgaacgtgtccagagaagagatcaagtttggagtgggtgctggagggggcagatcttgagtttagttttgagtagttgttgaattgtcatacctttgccagccaaagaaatgacgttaacttagtgatctattgcaacctcttcgttttctaattgataaaactgagactcggagaactgtctgataaygtatagactcaggcatgttcaggatcaaaaaccatgtccctcactttttcttatcaccatttttacaaacaagacctctgttccacatcgtaaatgttagcagacaagacttattaaatattggaatataactctacagaggattaggtaatttctttcctaataattaaaatactaagagtaagaagaataatcatcgttgttattgttggccaaaattcttgattatatcctttgtattttagagcagtggtcagtcagccaactgcagcccacagaccaaatttgatctgctgcctatctttgtaaagaaagttatatttgaatactgacactcccatttgtttataaactgtccgtggctatttttgcaccaaaaaggtggagttgaatagttgctgcaaaggttgtaaggctgcaaagccaaaaatatttactgtcttccttttacagacaaaatttgcttaccttatctctagaacagtcagtatctgtcagacctttgtggggtcatgaagctggtaacatcatgaggtagtagctttatcaagtatccatctccaagcccttactgtcccttactttaaagatctttaaagtggcaactacaaagttgaggtatcaaattatcaggctttgatctatatctctaatctgtagttcttctgggaagtggaaggataagaaatctataataatttgcaaaggagtatttttctgacgtaaaatctcagtaggtgttcttattttgtagatttgtaaattttatttaaaaactggaaagcaaccaagatctaattgatctaattggcctttgaagatattcagtaatgaactctatgaaagaaaaggcttttcagtgtagcatttgtgaaaatatgaaatgtaaatgtataattatatattaggtactttacaaaatgaatgttaggttatagctgcaaatgaggcctgtattttgatttgtaatagaatatgaaacacagaaaataaaactcaagaatacctttaccaagaataccttgtttattgtgtaagcaaacagtagcaaataatcttcctggtatgtttaattcattatttcttaaatatgattcacctgcattaraagcttctcgaatgcatttttgaagtgccaactcctaggccccattcttcatttactaaatcagaatctttaggggagggcttaggaatatgtatttttaacaatgccaaaaatgtatttttatgcacattaaggatgagaacctctggtttagttcaaattctgtcaccagtgagatataatccattgaaacaagggtcaattttcttttctttttttttagaacatcaggctttttatttttattttttatttttaaaattttattattattgtactttaagttttagggtacatgtgcacaacgtgcaggttacatatgtatacatgttttatgcrgagggttttctatttcagtggtagccccagtaagctattgttggattgccaagtgtatatgggacacaataatagacgataagctaggttaattaagggatgctgctaagttagagagtaccaattgtagaaggtttattatgaatataatgatactgaagcaatgaaaaacaattagcatttaaattaagttgtagaatagccatattaggaaaaggttagcttgctatgaatttttataaggttatggtgttatgattgatttgagcattgactatacttcgatgtaatgaaaattttcgaataataaaattgtcataattaagtgagctacatattaaccgatgagttttcttaaacatatctgcattggagtagctattaaaatttatacaataaactttacaataaatgaatacaataaatctggatataaattcatatacgtgtaacatttaagtaattttaatactttcttacatgcttagctttattaagctcctcaaaaggctgaaagtcacagtgagcacagtttgctttaactgtaattgtcttctgaaattttaggttgtgtgcgtggtgaataatttcaaaggragacaagcagaaaatgagcatatacacatggataatctggcacagatgccaatgatcagcattcctcgagtagaaagtcctttggaaaaggtaacatctgtacaggtgactcacaatttaaattctaaattataataactagagcaaatgaatcattattcctgtatgtatatctggagcatgtccacacagtttatgttgatttacttagtgtaatgtgatatttagcaagaatttagccactaaagagataatcatagaaaaatatatatcacatttaaaaaatctgtttgtaggccggtcacaatggctyacacctggcctgtaatcaatcccagctctttgggaggccaaggcaggcagatcacttgaaaccaggagttcaagaccagcctggccaacatggagaaacctcatctttaccaaaaaaatacaaaaattagctggacgtggtggcatgcacctgtagtcccagctacttgggaggctgaggcaccagaatcacttgaacctggaggaaaaggttgcaatgagccaagatcatgccactgcagtccagcttacgcaacagagtgagactccgtatcaaaaaataaaatatctgtttgtcttcctcatgctaaaagctgaggagtacctgtgtgtgaaatccatttagtactttgctgtagtttctaaataaggaacattgtgtactggtctcacacataggaaaaataaaatagttttacttgaggatatatgcattttttacaaaatatattccacatcttccatgctccatttatatgagaaagtactcagcacaatgcctggcacacattcacagttcaataaatatttgttgaatctcagtgcacaaaggtctgatatcaggaaaacaccagtcgtgctctcctaatcagggagattctgagactccattgggctgaatgcagccagagggtagcacttggactggtaggccaaggcctcattaggcatggcagtgagcacagaaaccaggtaaatacttttcttgagacttttgtgaaccacataggataatatttcctaaatgctggtgcagttatgtgcatttgtaactagttaaatggttgctctgagggctactactggcttctcttcggtcctgttcagttccacatttggtcaatatcttagctgaggagtcagttacacactaatcaggtgttctgattgtgtaaatctgtgagagataattaacatattcaatgaaggaataaaaattcttcagtgactgcaataagatacaattcataattaactagaaataaaggaaacattttgtatttggattttttaaaaacttcacgtgtaaagtagggtacatccaggttaattgcacaaatgaaaaaggcttggggtgtaataggcaccaagtcaacacgtgtcaacagcatgataaggctgccaaaagagttaaatgatcttaaggcccacttggggaaaatgataccctgaatgaggggattgatggtgtgcattgctaggctctggtcagaccaactytgaatattatgtactgatcttgacaacacagttttaaagtgggcattgataaaatagttgatactcaataaatatttgttaaatgagtgaattaatgtttttgggatgtactcaacatcatggattatgagggactgttgcaggaacaaaaacgtgcttaaagaaaactcatgaaagaagcaatagcttcccataagaatctgaagggctcttgtatgacagagggatgagatttgttctggagggtgtctgagataacagttaggacaaaacaaagaaaagtgagtgtaagaagataaataatggctagaaagaagaaaaaactctgaaaatgaaatggctgccataagagagataaaatttccttttactataggaattccagaatagctaaataattacttgtccatggtactttggagagaattcaagcattcaggtaaggatagaagtacttaataataataatatactaacactaataatgactaccatttaatgatcatcagtatgtgtcaagtcctgtgctgatggtttatataaattccacaaaatacttctgtgctctacaaatacaatttcagtcctcacagcaatttttaaacatgatcctcattataatggtaaaaactgctaataytyagtattccttctcaccttcttccttttagtaattgaattccctaattttagctatattcatgactgcccagctacaatctatatttcccagcttcccttgcagttaggtgtaaccatgagaccaagtttagacaaatggaatgtcagcagaagggataagttcaacctctgatttatctctttgaagactcttgccctggacattccctaccccttctcaccaaatgaaaaaggtaatgactggagcaaccttggaaatcactttgtaagatgaccaatctatcctgtagtctgggtccctggatgagcttacggagcagatttcacccagcctagatggttctgagaaagaagtgaactactttctcctctaagccattgaattgttctaatttcttttctatagtgacttagctaatatcctattataatgcatattcccattttacagttaagaaaactgaacttccaaatggttaagaaatttgcaaaagtccagatcattgataagcagctgagaaaaattatacaatgtaatgttttgagacacatacctatgtaagaaaatacatttaaaagctgaatgatctgtacaaaattaggtcttgtttaacttactaaataaagtttaaaaatagtagaatttagcccagggatagtggttcatgcttgtaatcccagcgctttgggaggctaaggtggaaggatcgcttgaggtcaggatttcgagaccaccctgggctgtaacaatagtgagactccatttctacaaaaaatacaaaataaaaattagccaggtgcggtggcatgtgcctgtagtactagagactcaggaggctgagataggaggattgcttgagcccaggagttcaaggctgcagtgcactatgatcacaccactgtactccagcctgggcaacagatggagaacccatccctgaccccatctctaaaaaaaaaaagggttgtgaaatataggaagagatcttagacatattttgaataatatggtcagggtaactattacaaccttttcattttgtatacctctgaaattaacttcaataataatcactgccatctactttttaacatttatttgcatgagtgttttttggtagctttctagtattgccaaatattcatatatatcattacatcattgtatctattaaattatttaaaaggttcttgttgatgttatgctagttcatttttatttatagtgagctttgaaatattagacagtaaaagcaaaaaaattctattcatctataaattgttacagatgagtattcattaatatatgtattcatgtacatattaggttaagtggcatgtttcttttattaatttttaggttcataacaaatttatgtgctctgttttcactccggtagctaggaaataaaaatggtttgaatctgatttggtttcccccttactcactatagtgcattggcaccacaccctgctgagctccagctttactctcccatctttttattcctgttcccaggcagaatgctgtctgcacagtgcaagttctgtcccctgcactcacacagagcatgggatgaccacaaggccaggtgctgagaatacatctcaggcttgcctttgtaactgtgctgctgagaggacatgtatttgtgttcatcaggcagaaagggaggaaggctaccacttaaggaaagcctacaatagctttctctttgtgtgtgtgataaggagcatttgggataaatacacagcaggtctttgaattacatcgtttcattcaatatcatttctttctaacmccgatgagaaaaaaaaaaaaaaaaacactctctggctagggctgctgtctgtgtggagtttgcacattctccccatatctgcatggyttttctaccctgttttcctcccacctccctaagatgtacctattaggtgaagtggcatgtttaaatggtcccagtgtgggtgagtgtratgtgcgcgtgttagtgcacctgctgtgggatggcatcctgtccggggctggttactgccttgtgccctgagtggctatgctaggatctggccatctgctaccctgaactgaaataattgggcagataattatcatgcttgtttttattaatctttcttaaatgtatgtataatcacatttattccaatgttttatactagaaacattttggtctttatttagaagtttggtgatgtctttatgaccagaaatatgccatagaaacttaattcctgtttatatcaattagcctgtggtcaaattggtttcattatacttcattctacttaaacttcatttccaagaggcctgtcaacatcactgagtactcaccttattggattcattatggctcatactagtaaacaagtaaatgcaaaattcttcccagtactttgatcttaataactgatagttggagagtgacattagacgttaaagctggccctctgaaaaaagtaagggagtctggtgtgaaagtttggtctgcaagtatggccaagagttagcattattatgccaagctgtcattttctggttgtcacttttgtatggagaaggcaaagggtttcgtttagaagttatgtacttatataaccttttatgttcaaagtacatgtttgataaactgtaagctgcagtgtaattatagtatagcatacaagtattcgttatttttatgccagcaatttatcccttaattataggagtttttcatatagttaattaccatagtttatgaggaaaagtcctgatttttctggaagacaagtatatctatctgaacattcattacatttggtttgtgaaaagaattaatcatctgtggaaactggcccrttgcatcccaacgtccactaaatattcaggttactagtaacttttttatgactgcttgtcatattaaaatatataagctaaaatatatatgagcagtgaattattaaatcaatgggatccagtgcattgtagtgtagtgcttctgctcgtaggttctggatgcaaactagctgagaattttggataattttgaccttaggcaactcacttaaatgcttggtgatttggttttctctttcataaactgatcatcatatgagttcaataagttaatggtaaaagcacttaaactgtgtctggtaccagtgaaacccttaataatcataactataattattatttaacagctaagatggatgaggtaaatcaaaacatggaaagttttccaatatatatcagaaagtttttttaaaaaagactttatatgtatattaaatgtatatataataaaatcaattatgcgaaataccatctatttttctttagtagtatagaaaggaacatgtggatgagagaaacaaagaaaagaaaagaataaagaacagaaagaaggaagggaagggaggggaggcggggaagggaggggaagggagggagggggaagggaggggaagggagggaaagggaagggaagggaggggagggggaaacagacaccagtcagagcaatgcttaaacttaaggaggcaactgaggttagtggaccatgaccttatccacattcctgacccttccttcctccctctgtccctccttcccttccttcctttcttctttcctttcttccttccttcttttccttctttctacaatgaaatactatattattcctgaataattttatgactgaaaatcattatcttttaaaaattttttcaattatttaagctgctctctaaggaggttccagtgcytcctcattggattgactgctgatatgttcagattgacaaaaggccctcagaaaaactcccccagggtaatttaaaaccctgtacttccttagggctcacacaacctttctgaaagtgtttggtttttctgtgccaaattgtgcatggaaatcttggcgatagctctcacaccttcatgcccagggttcagcttcctgtggcacctgcagccatccccattttaggtaccattagccctggggcctttcatatgagctgtgtgcaggtgcttgtcatttacaggatccacaaaccccccatccacccaaggacccagggatccaaatctcctcatgggtcacaccatccctttctctcaaattcatgcttttctggctctagtcttcaatggcccacatatctcaaataaagcactggtgttgctggcttcaggatatctccaagacacaaaaactatattaattatccttaggagtccaagaaacaaatttctgactctttctaggaaatagagatggagacgtttacatttcattacttttacactcctatattatcaaaaataatgtaggaattaatatctttatagctgtgtcaccaagagtgaaaactacagtaaattttttttggcattttgactagatatggtataaataaatccagttttaggaaatcccacaaaggacaattccatttttcctttgctcctaaagaactacagtgctgtacaggtagctaaaattctgtgcagcctcaataatgtcccaaaattccagagtgagaatggcagctaggagcaatctctaacagaataaggagtccgtttcatttacagaacgtctcaacaccttggatcaacaccattttgagacagagttagcaaataagcaamtacccaaagaaagctctcagacaagaagctgtccttggattaggcttctcactattaggggttcatgccagatgaaggaaaccttttgtgaactggataggtaccccacayctggatgggaagttacctttggccaaaaccaaaagctgcctccaaggattgcacatactcctggaatagaagttagactgaactaatcagtagtcttcctggtttcaacaaacaacaaaaaattgtatagaaacaaagtgaccttcctgaaaatgctcatggtcttagcttctcacaatccattcagactgatgacataaaactacaycctccagctcttctgctcaggatctaagtggaggattccctagcaattcatggttatcattaagagataactgatgaatcttttcccattcattttaggaaaatcaactgagctaaatctgtcctatttcaagcatgaataatcaggacaagaacttaaatcctttaaaatgacacagaatagagagaaagagatattttaatagagcattaagaaaaagaaaaagattacaagaaatttggctgggtgcggtggctcacacttgtaatcccagcactttgggaggccaaggcaggtggatcacctgaggtcaggagttcgagggccgacatgacaaaacccygcctctactaaaaatacaaaaatcagctgggcatggtggcatgtgcctgtagtcccagctacttgggaagctgaagcaggagaatcgcttgaacctggggggcagaggttgcagcaagccaagatcgtggcactgcactccagcctggacaacagagtgagacttcatcagaaaaaaaaaaaaaaaaaggattacaataaatacaattaaatttattttagatagcatcttctttccacagtcaaggaaattaaagaaaacatatgaaatgaatgtcagatgaaagatagctgacacatcagaaatgtaatataagaaaacaaataatgccgtggtgggattaaaactgtactagaaaccataaagaacaaagtccacactggaaaatgttgacggttatattactgacaggttttataataaaaaatgagaattaaattgatatctgagaaaagatcatagatatggaggacataccacagaaacctaacatatgaatcattgtatctgaagaagatgataaatggggcaatagcaatattcagaaatatactttaaaggaaattttcttccaaataaatacctgaatctttaagmtggaagggttaaacagatacaaaacaactattgaaatatatatattggaattagatgtttctcagtgaaatttttgaatttcagtactggagaaagaaccctataaattccgtgataggtagtagtattgttcccagttgttagctatttccttccttaggcagagtgttcttcctactccagttactttggacttggtcaagaacatgtgaatagacctgatataaatttcattaatcagaaacatgtagagctgtcacgagtttctgccggtattcttgcttctgccttcttgcaggaaaagatcattttccagacaagtactgctgcctcagcctgggctgtaaaatggaaagacaggagaagccaacctgcccccaacctgtggcctagagcagatccatagaacctggccaacaacatgtagtatgaggatgaaataaatattattgttggaagccactgagccttttgggttgttatacagtatatatatacatatatatgtatatatatagtactaggtaatactatatacctagtatatatacacacacacactgtgtatatacacacactgtatatatacacacacactatatatatatatacacacacactatatatatatacacacactgtgtatatactaggtatatagtattacacacactgtatatatacatacactgtatatatactaggtatatagcattacctagtgaaaactaacacaaccacaatgacagaaagagttgtttacctacccaaggctgatagcatgctggtctcagacttgtgtctgcataacattggatgcaagctctatcctactctatctattctagatggagtaatgtcttcagaattttcaaggaattagtttgtgacataatcctatttccacccaaaaggtcatttaagtattaaaataaccataaaatatcagctatgcaagaatttaggaattaaactaatcacaaaaaaagtacagaaaatgtttagcaattaactgagtaatataccagtaactagagatcaaattaggatatgaatgaattggcagaaagaatagaaaccatttaaatataaaacttaattagatttaactgtggtaaaataaagtaacagaaactgtacaaaactataaaatttaagtwgaagatatataagaaaagaaaattatctaagatgacaaaatgagacaaattctagataataccagcaaaaatgttaaagtacaagactctccagatttcataaaggkgggactcattatcactgcttcattcttagcattgctaactaggaaaaatgttcaagcattttaaaaaataagttaccaagagtagtttaaaatgatttataaaaggccaattacaaagtataaaatgtaaacaacacacatgtcaaaaagttgatgtctataatatagaaaacatcctaattggtaaagttcatgaatagacaaatcattagagagcaaatacaattaggaaataartacatggaaaagtgttctgtgtgaccttgtatgaatgttatgaaggatcttttatgcaacattaagaagttgattcttatcctgtaagcaattgagtaccttccaaaaaggacttccttaaagtccttccataaagggactttaagraagtgagtagtttaattcctaaatggcttgttcagagaggagaataagagagcagcatggaagaacaaaagaatcggaaaggctatcgtaagaatccagttgaatgctgcagatgatgcttactaaatcttagtaaagcccagcatgttatgccattttgactgatgagatgtcatttggcaaagtctgctgttaggtgctgatttagaggacttatctcacctcatgatttacagtagaaaagggctcccagccagagtgtcactaagaaaaccatccctctcccctacccatagtatatgctgatccttcatctatggcctttccctgttctttcttcacggatwcctctcctttgtaattaacagataaggtgtgcattggcagtccttccagatgatcctcataggtcagactgcagtcaccccaacagcaaagcactgagctctgtcgtccttctctctctcctgcctgtgcttattctcactccaagggccagtgctgggtctatgagactggcataggtcagcacatggagataatatatgaattatccattttaactgatgccatatagaaaatatagagaaaaaggctttatytggtaaaagaacaaaaatatttaaaaataaatataaggatgaataggatttgatagaaaatgggatatttccagtagatctaagggaaattaatatccatatagttttattaaggcaggtacagcaggccmcaataaccactcctggctaatttgaaaatgctttttgaggaaatgattttttccatytaaacccaggcattattttttcttaggttgatgtgctcctaatcaattgaaccaaagggaattctctcttgccaaaaaaaaaaaaaaaaaaagggaaagtaatgataggaatagtttacaagattcagttttatacttaggataaggggcttttcaccaacctatactacccaatgaagctcatcatgtaaaagcacaccccttttaacagaaacatcagctgagtgaaagtgataagaagtgacgatagctccaaaatctagaaatattataatgaggatgtactattacagatgaaaattaccatgtttaattcccatggcaactgcmaaaaaaattatatggataggaatgttctgaaagagctcatggtgacccaaggaattgaactttacattgattgaskcttttgtagattttataagattacagtggtcatggtgaaatgtgaactggaatgtagtcagagtgatgggtggacagagagcttggattttgcagctaggtttgaagcctggttcagctgcataataatgaagtggagttagacaaatcacttctctccttatctgaagaattgatacaatgatggtttccctgtaggataattgttggaattaacacatcacagataaacttctcggcacatagtaggtgcttcacacaasttagttccctcccgcaacaatcatttctttaatgggatttttttttttaatttcacactaggatactcccatacaaagacttcatggatttaaaagtttatacagatattgtctatttcatacatcgcacaaatgcaggaaatactgtagtataaaatgttgcatatattagtgtcatagcaatagcaaaacaatcctgtggtttcttgccaagacaaatatgattatacattactgtgttccctgtgataaattcctttgaggtttcagaatgctgtgcgtgagtaactctggcaatctatttaagattcagttgattttctataatgcaaatctttgttttacagagctgctgaactgtaatataaatgttatataggaccttgtcaaaacaatcttattagtgattagatattggaatagttagtggaactaaatatgttcatatttaggcatttttcttaatctaggctttgagcatttattaaaaatatttgaagtaagtcaatatttacatgctatactgtgttctcatttgtaaaatttaattttgtttaaaaaaaggaaattgaaagtggaagcttaaaaatttccaacaggcatcaacattttaggttgaaaatactggcacattctgttattattttgccatatgtcattttcctatttgtactccagtatactcagaatcaatttttccacactatttatgaattattacatactacatgaaaaataaaagacagcttttcccttcagttatctaacaggccttttataaaagcatctttcattaaattactttggaatatagactagaagctttctcatctgatttatgtgaataaatatagaattgatgactgtatctttaaattatatgattcattcagtcattagttaaggagagaataatcaatgatagatttaaaaatcatttccagtgcacacataattagttacacatggatgggaacctgatcccagccgttcatctccctcttttttcaggtctatttccttattggagaccatcctggagacactatggagggccttcaaaatcaatcagaggatcgcagttctgtgaaaacattttgttgaaaaaatatwaaattttatttgactaaaactaggtaaataagcaatgactcaattcacagttttatgaaacaagcagtttatttttcatagttttgattaaagaagaaatcagtaaataatttgcatatatttatgatctgaaaatctgaataagcaaaacaaaaaacgaataggaagtatctatggggtcatcacaataatcacaggaaacattttcttaaaataaccttcaagacccaatgaacgtgtgtatgagtttgtgttgaacacagaatttccctgtatattttattgcytttattcacataacaatgcatcatagatatgatttcagatccataaatataacagtcatatcaggcatactattaaaagctaatcttcaattatagcttaatatgtgcttggaattatgcagagaacttcacatataaaatatgtgaagtcatttgagtgtgtcttatttccattttaaggagaaagggacataggttaagtaatacatccaaggtcatacaactggtctgtgttctgaaacaagaatatgaatccttamtttccattttcaaagaaatatgttccatatttgtcactttagagctccaaatcataatcactgtgctgcatgatattataagattatattattaaaagttataatccatataaattctctaaccattatatttgttagacatagattattgcttccacttccaattttccacaattataagtaatactaaggtaaatgttccttaaatatatatttttgtaagctcaattaataatttaagataaattcatagacatagaagtgcagaaacagagcatgaacacttttaaggcttttggttgaattcatatctgtatgttctctgcaacaatggagaacattgttcttcataacttttacaatcttataggcmaaaaataaataaagttctcatttcaatttatatttttgaatatttttcaataaacttattttgtatttttctttcgtactgaaacaaccagatgataaaacaataattcaataactgacacaccaaattttagacatgtcttggcctttagacttcatgttatgtctggtgggcctaattttttttaatttggatttattaaagcataatttgcatcctgatacatccttccttggcgtatagctttatgagttttgaygaatgcatactttcatgaaattatcaccataatcaagtcagagaatgtttctgtgagtcccaaatgtttcagccttcccctttgtagtcatccctccttcaatctccaacttcgrgaaaccactgatttgtcttggttcctcgcgttttgccattctcaggatattatataagtggactcatgcattttgagtttttgagtctgacttatttgttacatgcatctgtagtctgtgtttttcccatttaattgctgagtagtatcctgttgtatggatgcaccacagtttgtttatccatttgccaattgaaggttgggttatttccattttttggcaattatgaataaagctgatacaaacattcatatacagttttttgggagtacacatattttatttcttttagataaatacctagcagtgagattgccaggttgtatggtaaacatatatttacctttataaaacatttttcaagttatctgtgtcatttctaatggcccttatgattttgaatggttctgaaatgaatcttgatgtagctcattcagatttttatcagtggtgcctctttgtgaaaataagcaagtttttaaatgaggagttttaatcaactcctggttctacaagaatttatcatgcacttggtccattatccacatcctccgattcttctctgtcaagtagtgttaggwtgcttatttagtaaatctaaagcattttaaaaagttaaaggaaaatgaaataactaagaagaagccaattttataggttaaagtattagtatrtaaaacaaggcatggatacaatttactgttgagttaccttatcatcagctgttatgatagtgaaattttatttataatcagattcgtaatatatgaaatgtaacaaatattaaatacagagcactatgatatgtctcgtggggagagagagaattttgtaaccatatacagaagatgatgatggctatactggaggaacacataaagggagacctgtctgaacttagcaatgcttgaaacrtcatcttaggggagatcttcaggaccatgagccaagtgaggacaagagagaagaatggtccagctggagaatccagctcaygcaacggttttgtttagcaggcaagataagggcacgagggcaagaaacttgaggatgctgttaaagattgatcttatgatcaactgtagggtccagaaggagtgaaaaagaagcggaattcataaggagcatgatagactggaacagatggataaattagtagtcaggaaatttcctcatggccaaagaaaccttgttgtgtgagggaggtaagacaggagttaagttgggattttacatttcaaacatgattactggttgagaatatagctatgaataagggataaaagtgtggtagagaggaaggttattatagttgaggaggttaacaaacttagaagacaaagtgcatggatacccatatccmccaaataccataaacacattagtattcatagacttccatgaaatttcatgtcaatacgtttgggaaacattgagttaaagtgaaacaaacaattagctgggtgtggtggtgtgtacctgtaacgccagttactcaggaggctgaggcaggagaattgcttgaacccgggaggcggaggttacagtgatctgaaatctcactaccgcactacagcctgggcgacagagcaagattccgtctcaaaaaaaaaaaaaaaaaacaagtgaaataaacaggtattttctgaaggtcttcttaacacttttatgcattgtgtaactctaagcatgacatataatgtgcagttaatgtcaaaaggcttgaattcaaagatttattttttggaattattccagttaactgattttttaagcaatactcttttgccagtgaaaggacagcatcttaaagaaggaattgattttacatccctgataatgcttacttcattaatcactttcttcacctttaggcagtggtactcagactggcataaaagacaatccattgcttgtggcacttgcaaaaagagaagatatctgggtttcacaccaagacattctgatccagaaggcctgggcttgggccccaggacttgtactacatcagtcatatcaggtgatccggatgtggagtcagcacttgatctggatacagctgggcctgcagaacctctgacacagtggttctcaatattggctctacattacaatcatccagagagccttcaaaaattccagtaaccaggccatgcctcataccaattaaatcctggtctctggggttgcatcagtattttcttaaagatcctgggtgattccagcatgaagccacagtagagaatcagtgcctctaaagatctggtgtgaaaagccttaagcttctttggcttctcaggacttggaaagacttcataagatctgtagctaatgctctcgtaaaaactgggcctgcctctggtttaattatcagagaaagctgcctagagattcttttagaaggtagctgttagctcctttctctgaatagtaaaaaaaagggaaacttctgaatggaaacaaaactctgaaccaatataaaactctgaactgaaacagaaccactgtacagaaaggttaatagtcccccaaaaaagtcacctttcccaagaaaactttggttctgtcacatgatagcttttatgtctccaacttcttaaaacaacaagaaattgctcaacatacattttagaatcagttttacagcttcaaatctgagtttaactaatttcttcttaaatagttctaacattgtttctctttactaaaataccaacttcacaacctaccagaaggaaaacaatgtgacaaagtagaaccttcgaacacatactccatgtactttgctttttgcctctcttctgctcaccttcccctcctcaaaggacacagtgaatgaagcaagtgaatgmgttaaagaagcaaatcgcaaaataaacagggacaatattcgagattatgacatccacctatcttttcctgatgcaatgtaggctatgtcagaattgttggttaatttattggaccatgattccttctccagaatccttagtgtcagatgtttttacagaattcaaaatattttatattttaggaatatgtatatttggttacacaagcagcwtctggagcaacaattgtaatcacagatgagtatttctgcagcaaaacatggagtataaattgcctcacaacagatcaggttttgccaccaaatgagtttgcatcaatcttaaaagaaacattttgttgggttttaaactttgtttggatatgagcattgaagatcggtagaatagtgtattttatattcaaatagtgagctttatttgtaaaattctaaccaattacttaaaaattatttattttactttttctttttttaactttcctttttagctgtttctgtggcttttataagtaactataaataaatgatgaataagtttgagtagggacagggacctttgtgtatataatcccatttaatgttaataaaaatccattcaaaaagtatgtattcttatctctatttcacagatgagaaagctgggtctgtgaaaggttaaattgcttgctaaaatttcacttgtgatggagaccacatttaaacacttgacattcagatgacttgactgcaaagaccactgtaccacacagcttccgcagcaacagagtcagagacataaatcattgcatgaaagacaggtgcacagatcccattttatgtttaggttaaaaccctatgctgattgttgatagcttctcctattcaaacacaaaagctttttatcatcaatcatcttgaaagaatgaaactggaataatatttaatctcagcatttggtctaacgatgtaagaacatggaactttaaataaaccagtactttgaataaattaagacaatgtttaaataaacatttaagtaatatgtaaaacacattttgtaggtgtgccaaaatcaacctgttgagaatggtcaagaagaaaattcacaggaaaggtcctttaaagactgtcttgccaggctcttcagctggataatgggaataagccactgtgaacaccttcaattaaggcaataaacgtatgtgcgctggagcgcactggtgttggaattgggttgcaaagctaagacaaatacagaaaaatgtgtccttctgtgcaggttttccttacaaccaaaagcaatataggaactagagcttttggttgctgttgttgttgttataattattaatctttcaaatacattttatttttcaatcattaatatgaatttagcattccttaactaagaagccattaataatggcattttacttgttttcctatagctgtaattccaaagacttccctggagtgccctttttgcattttctcatacttttccccttatttgttgattgagtgacaggtcttgccagatggcaagtcatcaccaaagtttcgtgccacgaatcgtgacagttttgtcttaattaacattttttttttaaattacagactgtattttctatgtggaggtgtagaataaatagtaaaatagagattttcatgcagaacttagagcttttaaaatggacatgctatagagactttaaaatttattaaatttaagtatccagtacaacttcccagaaacgtgtttgctttctcttgtgacccctgcactcaaggaccagactcagtattttgctcagtggtttgctgtgcacctgagtgaacactttctaatggatgcttcatgtagcatattctaatctacaactatttggggtcaagctttgtcatctccatggtaagcctctgttaatgtaattgcagaaggtaccaggaattgtgacaaaaaattatatgaccagtttcttctcatgattctgaatagaacttttaagcatgagcttttggtttgcctactgcttttttgcactatcatctactaaaaagatttagtattgcatattcagaatttagccatattgaaaaagagaaacacttggtcaactactttgcctcacaggcagtccatttctcaagacagcaatctgaaaatattaaacacaattctggttttccatgttaatgggaaaaatactgctgggaagtgaatagacaataacttcctgcacaggaattaggccatctgtatatttcaaattatgcatgtacataccttggtaatgtaagttgtataatgtaccatcatatgatagattcttataaaaggacctcaagtaattatcttggcgcttctttagattgcttcagggaaaatcacccctgtgccagaagtgaattaaacttaaaaaaaaaaaactactgagataaataatccatctctttcatttatgatataggttcattagctcttaaacagtaaagtaaatgaacagaagctctctgatctgtctgtacactcctttcatgtactatgattaaatttccccttaattttctcttccctaggcatagtcacttcagtgttttattttcctctgtttatctgtctgctaactacaactaccttaaaatgatgagccccaagcaggatacttctaatcccagtcaaatagaaaaaaatgaaagcacctcagaagttaaaacttaagtgatgtgaaatggaaagatgctaatttgggggagggggcaagagttttccctagaatcctaggatctaaaaatatagtcaatctagaaatcaactgttgtccttgtagtttaacttggtgatatttttgcataggaaaagagtattatggcttaaaatgtatgggcagttaaagggagatctagtgatcactgaagcatgtgattttaaatgccaagactgaattccagtattttctagatctcaatagctcacctacaattatacatccatgcctcattattaaggtttcttagtctgttttgtgctgctataacagaataccacaatctgggtaatttatgaggagcagaaatttattggctcaggattctggaggctgggaagtccaaggtcaaggtgctcacatctggtaagggccttcttgctgcaccataacataatggaagcacaaaaagagggaacgagagagaaggggactaaacttgcttttttataacaaacactgacctatgataaggacattaattcattcatgagggcaacactctagtggtctaatcacctcccattaggcctcacctatcaacactgttgccttagaaattaagtttccaacatgtgcattttagtggacacattaaaccacagtatagggtgactttatattactatttgggacaatcctcatttaagcctgttgtccttgtgttgtattagcacccttttcccccttccacatgtccatatttagatgataaattatatggtcaccctacagttattacagtttctttgttacactgtccagcttgcacttgtgcacttggtttttcctctatttctgtcaagctctgcattgatcatcagtggtttgcttctggttatttctctgtttattaaagtcctttaatgtgtatttaattctcccttccaggttagtggttgtcctcttaagatcatcttcagcaaatttaatgagtcttgtgaaccctcccttcattatctgggtcaacaatgggaaccctgaggcytaggccagtggcctttgggacaccatccatgttatttcttacctcctttcttttctctctactgccccttattgacccttttcctacccaccagttgtcactgactgattaatctttaatttctatcttaacatctttccagaaattatgttgttctagatcctattaagaagtgtgatgttcatgacggttttgtgctgaaacactctatatcgaattgcattttctcagttcactggtttcaagtacccgtggggccactggaaataaaactgygatgtattatttccacagttcttattgtttyaattcaatcatagtgcattatataactctgacaagtcatctttaccctgaagtcatgcytgagcttttgtaaggaaaactcaagaaaacttacagatgagctactgaatttccagacattttcatgatgcatttttaaatgggaaattaaagtttctaaaatgttaccaggagttagtggaaaaactcagcatgctctgctcactcytgattcgtactaattttgtttttttctagtattaagtgggtcaagcytagaagataatgccccaaattgtagtcaatgagattccttttgtgtggtttaatatgcctaaattcaatgaaaatgaattttaatttctttacacacattttaaatatgttttgatgaattaaaatacttaaacttgaaaaaagctatatgtatgttgagaacattttatggcatacattcatcatatgaaattctgtttatgatatcatttgttataaaaatccaatgcaaatgccatacaaaaactatacaaaacacatttaaaatgggtagtatgatggtagaacccttttgtaatgctgatgttatttgttggggttgtcagtcatattagatcttgacataagcccatatgtagcatgattaattatgtaatagtagtttttcattgcagtatttcagcaggcatgacatggcctgttgcatgcctgaatctatttaaatgttaggcattccacagagtttctttgtacataattctgttgatttcccaaaaaaaaaaaaaaaaaaaaaaaggcgctgtgaagaattctgtggtagaggtaaacaacagagactacagtctggagtcaggattcatgcatcaaaaatgaagtgtttaagtagatttttgtcaactagcaaatgccattttagtctgagcatttcactatctcattctacaccatctgtctctcagggagcaattaatctgaaactccaacatgcagcattaaaattccattaacactgaacagaatattaacgtgtctggcattgccatttttatcttttcaaatttcagagttaattttgaataaagcaggtataacattttaatctatttgtataattaagattattgaataaaatatgtaattagcagcaaaaattgtgtaataatacataaaacttagtttaataatgctggatgttttgcaacttcaacattcagcatataagctaatgattatttgtaaaggtactacatattttacaaagctaatgttcccaagcctctcactttgtcattcctttttctttttgcagaaccacatcactgccttcgcagaagtcacatgatatcraagcagatggtttttcactgcattggacatcatccctttttaccatccattcataacacccaaagtttgtttgattgcaagtgaagtttataaagttgtttaataatttttataattttaaaatcaatgtcaacctatctgtttcccccactagactgtgagctcctcgagggcaggattgtctttttttttctgtgtccccagcacttacaacaaagcctagcacaaagtaggtgttcaacaaaaatgtgatgaccaaatgaamaaaattcttaaataaaacattcactttagtttctcacagaatcattgcaattatgttaaaagaaatctctacataaatcgtatttgtgtatgaaaaccttctattttgggctagttatttttttaatcttcatatatctattcagcagtatgccatatttaatttgaagtggactttgaaagtcatgggggtttttattttgttattcagcatgacattatttccattctaacatttcagtgtgtgaaattactttatttttagaaagtatgttctatagtaaaataatgtttccacattatattatgttatatttcacttaaaatactattcatactatacattctaagactggtgcttctgcttttgaaggggaaaatgccaatttttactgtaataagtaatgtatcataattaaaaattatttatttggacttcttctcctgacaattgtggcttaattcatgacttgtttttgaatgcaggcagtatttagggtagtttaaatgagtaaattcagcactggtaccttattattgagtaatttcccatgggtagcagtgtctcaagagtggtcaaaagctccactcttaggcttttttactactaaagattccacataatttaaatgggaaagaactataccctgacacataatttaaattatataaatgctagaaatatggttaatgtattttactttgcatttgtgtagtactttatagtttacaaagcatatttacaccaattattttatgtaatcctcataataacctggtataaacatgaagggtatggctttatttttatagataagaaaaatgaagccaagacagggtaaataacatgccaaatcacaaactagtaagagacatagttgaagcttaaattcaagttttctggccctgaactcatattcctttctaatatagcacagctgtcatctcattttggacactgaggcctttcagagctcagtagaatcctgggcaactacctatggttcaaaaaataaagaaatgccagaatacaaatatgaaagctctgctgtattttaaatgtttatgttttaagaatgaacacttttcaaatataaaactatataataattataatccagttttaagataatatcaagagtctagatgtgaggctttttgtgaaagagaagcctaaattcagcatctccccttccaccctcacccccaggtcccagcctcccactcagcagagtgcccaagggacataccttacatttagcatgtagaattccagattacaatcgccataatataaggaaggtgagctcctcaacaataactttgcaataattaaaactaccctaagtaactttggcttatatggcaaagtaactttggcagtaattgactgaaatgaayctttctaaactttacagtactaaagaaagcaaacttttaatttcctctgtaatttcaacagagatcagcaaataaatataaccaaagattgtccattactccccaaatagatgttatttgcccatttctatcactgtggaagctaaaacacttctactagggccaaaaagagaaaagaaaagaaaatttctactaatttcagacctctagagcaattcagtcctgttggaaatttagaacatgaagaaactttgaatgtcttgaccctttttaaagattttttaggcaataacagtaatagggaattcacttattgagaatgaaagtgaaggggatgatcctaatgtcttagaaagctagattactagtaaggcttccagacttctatcagttctattgattctacatcagacttccaagcagccaagcaggaatgtttttcctgttggaagccttagccatatattcttatgtcaaggttgcttctttgcaccttgctaaacctgatacgaatgcaggagttttaaattcttcaaaaactcagatttaacccagaaccagagtaaagtcacctctactatttacacatcataggctcaagattgtacagtgagtgatgctgtcatgaagaaaattcagatgaaaaaggcaagatacatgtgaataaggcaaaagccagaaaatagcccttattcatgatgctgttactgagaataatgaaaatcatatttcagaaaatattaccatgtaaatatgtacatatgtagtctagtaaaagcaggcaaacacatatctttctgataaaaacatctcctttttattctactyacttggggcccaggtcagtataatttagtcaacttgaaaatttcggtagtctctgtttgcatggcagaaattctgcacatgttttatctgattcctgtgataacttaaaaggctcttttatgttaaaagagaggtgaatcttctttgacagactttgtattttccacttctaactgggcctctcttttctcaggatctatcctagccaaatatctcagttacatttaccatacagtttcctttgtgaaagaacagtaggggaggaaataattctctgctgtgtattgtatttttcaaataaaaatttaaaaattcaattgaaaactgaattttgactttgtaatatattgrtcttgatagggggtagaggaataaggaatgcttattaatgtgcatgaaagaattctcagagtgactgaagaatgtttggaaatggatcacaatggatcagattagaccagttccttggacggctcaattaccctctgcatctcgtggaccatcctgggatcttactaacatccttatttccaaatctcaactccctagaaactatttgagatactgagcaggtatatgatccactatataggctgacttctatgttgagcaaagcatttaagattggatgtaaattagcatattcctgccttctaaggcactatttattacattttgattgcatgctctaacaagttgcactggaaatataccaaatggttctatttatgctttgaaaatattgatctcaaaatttgccaggcatgggctttctaatgaattttccaaattacagttcttttagaatatcaattaagggaacttcctccagactttaagtgaatgaatctcttttaagaaaaacgagagtattcaaattcctctttcctgtccaccttagattatagtctgatcttagcctaatagagcctcaggacatggccaacactgaataaaataagtctggtctctttaccccaagtcttatgagccatgaatggatcatagcatctaaattctaaactcagattgctatctttcaaatctgtggccttgctcacaaaggagcttcagataagaaaatatagatgagtggatacaaccgcctttagcattcacatgaaaactcaaagccatgtctcaaaggcctcattctttagatgagtgatatggacaggtgccatcctctggcatgattatcttcatattatttcatttataaatatgttctcatttttgcatgggaactctactgcttgtagacacaattattttttcttctcaggaggagcaaaaatgaaattttaattgaattttgttataaggaaaaccttttcaaaatggtgagatgttttgagcattaatcaagtatccctagatgtattgctccttgtcaagaagcactttcagccttcattcatttggcatatttattgaatgatcttgtgaagcagataatttgcaatgtgctgactaaacagtgcatagaaagatctggcctctgcccttccagattgtatgcttcagcagctctgatgatggagctgtaaaagatctgttttaagttcaagtaggagaactggcttggagttaatctgctgctgaggactaaagaaagrgcatttttatagattacaacagcagctaggttaatttaagaaaacaaaaagcagtgcccccataaacagtattgtattattcaactattggtaatttttaaaaccctaaaattctatataataaacatttactatccttcacaagtctgtggttcagccgagtcccttttctggtctgagctgaaattttcatgcagccgtgatcgcgttgggagtctctggctgatcttcactgagctgtctcatatatgagagtcatctggctgtatgctggtctaggatggcttctcttgggacaacttaatttttctctatgtggtctctcaaactccatcaggctaggtaggctctttggcagaatgggctgagagagtagaggcatgtaaggcagtaatacattgtcacttggccatctcagtcaattggccaaggcaagtcccaaggccagccagattcaagaagtgagggaggagctacaaagtcacattacaaagaggcgaacacagagatgggtggagaacaagggccatttttgcattcaatatatcataaacttttactgctgctaaacttgttcaagcagtactccccagagttgagttcctaacttgtcaagtaccgatttattctgataaacatgagaaacccacaaatgacaatagaaagcaagtttgttgtaactgaaaaagaatggccatgccaccagtcactgagtacattccaaaatgcctttgtgatggctgtctagagaactgtctgcccagcacctgacagcaacagggagcttgctgaagttttgtttacagcaaatttcctaggtcttctccaataggcaataatgaaggaagagaacataattttacaagcagaaataaaataaaggagaaaaaccacctaggtggaaagaataggaaagtaactaaaatataagatcaggttacgacacattgattctatatatgtatgtgtgatgtgtgtgtgtatatgtatgcatgtgcttgctttgtataattctgatttttagaaatttcagttactatgacttagataacactactccccccaaaacagcattcaaattttagttacagtataataactgagagtaacgattaaatgtacaaactttgctgccagttcttcagtccaaaaatcactataaaaataacacatgcacatatgattagtgaccagtcatctcacttccttcaaagtcttccagtgatctgtcactgaatatttgctattctgttcatgcacagacagcaaagcatgtatgtgttgactccttgtctctctgtaataaatccacatgacatcttacagaagaatgcataatttaaccaggatctggtcaacaaaaatggaactacagcaaagacaaaaaggtggcaatactgaaagtgaaatttgaatattgaacataaatacacttataaaagacatagcatagccaaccttggaaatgctgaaactaccaccaccatctgagagactctagaaatgcatccagagaaacagtgaaagtgagcttattgatataaatgggagaaaagtttgtgatgaagatgaagatattgtagaggaaataattctgattcaaaaaaattcacattaaaggaattcttggagatatttcacaacactgaaaatacaaaggataaaaaattaattagtaatggatccaaatgtagaaaaggatatggcaattagcgtagacacagagaagatgcttgccccatatcctaagttacatgacaagaaggtgatggtaaacgctgttcaaacttgtcttagcttgggatgtagtgacaaactaccatagactgagtggctaaaatacagtcatgcatcacttaaggacagggacgtactgagaaacacatcattaggctattttgccatgtgaacatcatggagtgtactgacacaaatctagatgctagagcctactgtatacctagactataagatatataacctattgctcctaggcttcaaacctgtacagtatgttactggactggtgatactccaggcagttgtaacacaatggtaagtatttgtgcatctaatgtatctaaacatagaaaagttatggtaaaaatatggtattataatcttatgggaccagcgttataggtgtcgtctctcactgattgaaacatcatcagtatgtggcacttgactataacagacatttatttctcacagttctggaggctaggaaatctaaaatcagagtgccagctacaatggtcaggttctggggagggctctcttgctggcttgcagagagatgccttctccctgtgccttctacctgtctcacatggtgagagagagtgagctctggtttcttcttccttttgtaaagatactaatcccatcatgaaggccccacactcaggacctaatctaaacctaatttcctcccaaaggccccacctccaaataccatcacattggagattagagcatcaacattcgaatttatgggaaacacaaacattcggtctgtaacaaaactactcgataaaatttttacaaagaaataagacatttaattctcaacatttcggttttagataacagagtatggaataaatatcagctattttttatttttctctgtatttaaagctgtcagtaagagagttttaaatactttaacaaaatgtttaaaggtaacattaattataatttttttccattgcttattaagacactttgcatggtttcagcttgcatggtctttttctggtctcacactgctgtacaaagtaaggactgcctgtctatatttatatatagggatacatagatgtgtgtgtgtatatgactgcctgtctatatttatatataggaatatatatacaaacccacacacccacatatatatccctatatgtaaatataaacaggcagtcctgtctatacatatatatggggctgtgtatgtatatatatgtgtttgatacgtatatgttttaatacatacagatatacacctatttttaatacatatatatatacacacctatatacacatatataaaaccccatataaatgaataaaatcccatatatatatgccttctttttaaaataaatattgtccctacttcatattaatacacagcaaagaactttgtagcctcctaactgttaattattagatttatttctcttggtcacttattttcctatggccatatttaaaaatactgttctgatcagtggatagaaaagtatttgtattagtgtatcacttcagctattcagagaaagaaggatgaggaaaagtgatttttttcaaagttatttgtatttgatttttttttttttttttgagacagagtctcattctgttgcccaagmtggagtgcagtggcacaatctcacctcactgcaacctctgcctcccaggttcaagcgattctcctgtctcagccccttgagtagttgggattacaggcgttcgccaccatgcctggctgactttttgtatttttagtagagacaggtttcgccatgtgggccaggctggtctcaaactcctgacctca

SEQ ID NO: 95532 - DNA, 24845 bp, Homo sapiens
catatgcagaaaattgaaactggaccccttccttacaccatatacaaaaatcaactcaagatgaattaaagacttacatgtaaaacccaacactataaaaaccctggaagaaaacttaggcagtaccattcaagtcataggcacaggcaaagatttcatgatgaagacatcaaaagcaattgcaacaaaagcaaaaattgaaaaatgggatccaattaaactagagagcttctgaacatcaaaataaacttccaacagagtaaaaagacaacctacagaatgggagaaaatttttgcaaattatgcatctaaaaaaggtctaatatctagcatttgtaagaaacttaaacaaatttaccaaaaaaaaaaacaattaaaaagtgggcaaaggacatgaacagacacttctcaaaagagggcatacatgcagccaactagcatatgataaaaaagctcaacatcactgatcattagagaaatgcaaatcaaaacgaaaatgacatactatctcacaccagtcaaaatggctattattaaaaagtcaaaaaatattagatggtggtgaggttgtggagaaaaaggaacgcttatacactgttgtgggttcaaccattgtgaaagacagagtggtgattcctcaaagacctaaagtcagaactaccattcaacccaccaatcccattactgggtatatacccaaaggaacataaatcattctattataaagacacatgtacacgtatattcattgcagcactattcacaatagcaaagacatggaatcagcctaaatgccaatcaattatagactggataaagaaaatgtggtacatatacaccatggaatactatgcagccataaaaaaatgaaatcatgtcgtttgcagggacatggatggagctggaggccattatctttagcaaactaacacaggaacagaaaaccaaacaccacgtgttctcattcataactgggagttgaacattgagaccacataggcacatagaggggaaagacacatactggggcctacctgagggtggagactgggaggaggaagaggatcagaagaagtaactaatggatatggggtgtaatacctgggtacaacaaatccccatgacatgtgttcacctatataacaaacctgcacatcctgcacatgtacccctgaacttgaaataaaagtttagatagatagatagagtttataatatatataaattttatatatatagatgctttaaatgtatcatactgtcacaccagaaagcgcttatcctaaaagtgctcaaaattattataattgatatatttgaatttgagataaattacttaacatactacacaaatgatcatgcctctgttataaaaactgtattgatatgtaatcattgaaacaatttcctttgtatatatctagaagtctttctcctccagggtattttatcaagttgctaggaaagcaaatttagttgtggcactccctgccagcactatttatttcatgttgcttcctttgctgacactggtacatgtcctggggacaataaccttggtgtcatcactgtgtgcctgcttgtgttgactccttctcgtcctataataaattctcaatatacaagtttgagatgctttctgagagatttggcattaaaactttctttcttgaggcctgagaaataaaagggaaaatacaccatggctcccttccaccaggctgacgtaggaagtccagtgccaactccttccagaaaggtgccactcaattcctgcatctccacagaacctccatagctgctgcatgcctcttcgtggaaggaaaggcaaactacgggactatttacacttcaggatccctgatttccctatatcacttcaggatactccaagatgacagcaattctttcctaccacactggttttataggttttaggtaaccaactggatggtgagacagatttgactttgctgacatcaaacactttgtcacagctttctctccaaacatatactatacttctagatttcactctactttcatttttttttcttggttttgaaggccttctccccaaacatacattttctcagcagtgatcctccagtgtctgcagtcatcttgttctagaaccataattctatctcgaatcttcctacatatacagctatgctaactcctttccctctctcttcctgaaagtaaaaataacaggctctaatttctgacttcaaggatgccagtttcttttctatctttagggtggcataagcctgttccaaaaatggggtcatgagagggggtagggaggtaagcagaactctccgtttgggaatgagtgtccaaaaggacttgtgtgaggagagctgacacccgccacgtggagtgggggtaaggcaaagcaaaacaaaaggcctcgcttcagccagattctccaaaaggaccttcatatgaataaaaagatcggctgatttgtatgcaggaatttaaatatgaatcattcagtatttgcttcccagatttttttaatgctttgagagatgtttaaaaataacttgtctttgtgatgttatacatggaagtggaaaaatgtatttcatttatgtgaaatgtatatttttatttttctgaaattgcccttaaattgaaaaatttattccttaatattcaattttcatttactttagagtgataaaacaagcattctgttttaggttctttggagattatttctcagagaaaacaagaaagactatttgggtttatcacaaatcttcatgaagtctatgtgaacagaaaaaaaagggcgctttttcttcctggaaatacaattttattacacattgttaaagaattaatatatctaattttatagaagaattccatcagaatttaattctagctcctggaatagccttagctttaggaggctacacaatcaatatgcagaatattagacatgttagggcttccaaaaaacattcattgaaaattgaaacattgaagatactatgatgaatactataataatttttgttgttttgttttacaagaaagactttttggactgtgagttctccctatgatgactgttccatggctagggtccttatagtactaagaaatatatttcctctcaaaatctcccctgaagtagtcattataatatctcctcccaaaacctgtccacaacaacaacaaattgcgtccttttcagggttgggtacagcacaaaacagagattgtgaaaagatacttgttgtaaactgttttctgtttacaaatgcaacagcaacaaataattttcttatcagaacctaaattctgacaccatacctcagtacaacactgtgccattcaaaaaaaaaaaaggagaaataagctgggcatttggaaacgcactgggaaacatctccctataccctgaggagacctatctttatgccaaattgaattattttgaaaactcgtgaatgacattagctgaggttaagtgacagaagtgagtgtgaggagaaaattaatgtcctgtttaatgagagggatggttgggtgatgtcagaatactgacaagaaacctctatccatattacatggtctagacaaataagtattgatgcattttctttgcatatgagttttgaacatattcaaacaactaaaataaaactcttggccgggcgcgatggctcatgcctgtaatcccagcactttaggaggcagaggcaggtggatcacttgaggtcaggagtttgagaccagcctggacaacgaggtgaaaccctgtctctactaaaaatacaaaaatcagccaaccttggtggtgcatgcctatattcccagctacttgggaggctgaggcgggagaatggcttgaacccaggaggcggaggttgcagtgagccaagaccacaccattgcactccagcctggcctgcagagcaagactcagtctcaaaaaaaaaaaaaaaaaactcctgaaatctcaaggtctcaagctcatttgagataatgactattgtattgtatgacaaaacacacttttctatacagataaattcttatgtaattcaacactcatggacaagatgtaatcattacaaatataattatacagagagaaaaaaaattattcacagaatttttattgaagaagtgaaggtgaaattaacctcttttagctgaatacaatacatttcaagaataagtggttaattttctggaaatgatgaatttgaggtagcagttatattattctgtgtaattgttgtactatgttgtatctgtctacacagagtatagaacctattgaatttctatgtctaacttgaagtgctaatgtaggactatatttttcaaaaagtataaatggttaactcagcatccaatggtttgaaatgaattacttttgattatttctataatgattgatcttaaaatagtttattatgccacatgattttcacacatatggttataggtagagttctactatgataattactctttaaatttttaatacaaagtaagattctctataattaaacatgtaccatattccctacagaagtaaatatagcaatttaagcattcaaagcagaaggccataggcttgctgtcattagattttttaaaaaaaactataattttgaacacttcataaaataaatgttaagctagtaatgacaactgagaggttttctatggaaaacctgtttcagtccaaatcaggtttatagtatttacagtgacatgattagttgtatttaacagactgttagtatctcatttaagagactgcttgtatctcattaattgtactttcctcagctccacgcatttatagcaaatcaatatttaatttcacaacaatcttttaggcacaattatctcaaatatttgaaagactttttcatgaataaaatggataattttaaatcttgcttctgttgtacagaataattgacaacccaacggcctaaggtagttagcaaatgtgagtcccacagtaaaagccaaaaatgcaattctcaccgtgccaggcactgtgcttgacaagtgaaggtgaaaggtaaataagaaatggttcttccctcagagggccctagtctagtgagagacagccaaatgaacaatttcataaagctatgctagagggaaggataagatgctaagggagccacatagacggagatgtgattcaatttagggtacagtaagaggtttcaaagaaaacttactgagggaaatcatgcctaaatcatactgagttccttcattgatctcacaggtcctaaaatcctgcagcaaagtgccatgttccttatcttaagagagtcctcttgatactactgtatgacattgtgaatacattgtttagatgtctatatctaggaaatactacccttctgacctagattctcttgtaatcttcattctctgataagatagccactagccacctgtggccacttcattttatatttaagtgtatttaatttttaaataattaatacaatggcataagattaaaaattcagctactcatttgcagtagctatatttcaagtgatcaatacctacatatgggtagtggctactgtactggacagtgcaaagtatagttccatcattgcagaaatatttatgggacagctatgctatagaaagcacctttctacactcacatactttccatggattgatccttctgctcaatcccaaattggtttatggacctaatctgctggtaaaatgttccagtacatgagagtccagaagaccctacaaaatctcattagagtggcctgattacttacttctcactgcttgatcaaattctcagaagaaattgctgtgcctctacagcttttaagaaaatttacatctttactttattgaattgatatgttaaaaagtgatatataattcctttatacctgttggcttaataggtattccaacatgcctcttcctgaatacccttctatctttgcagattatggtaggagaaggaattctctactgttgcctctccaaaagaagaaatggggtcggactagagcccaacattaatgctggaggctgcaacttcaattccttcctcagacgagctgtcagattcgttggtgggtgtggggaaccacaaagaaaagaaatgcttttttttttatattgaaatgttatatttaattatagatattaagtctcgtacgctataatttagatgtataattycagtacatgatgagttttatattgtacaagaaactgttaaaacaccaaaatttgggttttgtatctgaaatgtgttatttacagttgtagcccttgttttgagagctaatatgccatgtgtttcaayttatttttgccttagctctggttgaagtatgaatttattttaaaatggtttcactggatctgtggtcagtttttcaaaatggagaacaaacgtcagcaggccagaatgaatagacaactcttcagraattactttagccacattaatgattccatttcaattgtcctggagtgtttccatccagaagttactacactttgaaatgtcactattgagtactgcatcatggccatttttccttggttgtagcccctaatgttacctttcatcttttatgagacctatagaaaatctatagacctggctaccagcatctgaatcaaaccagttttcaaaccttcatctcttctgcttagcattggaccatcctaatgttgttccagtcataggtcttttatttttttaatatagttgaatagtcacacacaatacatcacactaacctgaatgttttctrttcattcccaataagtccgcataaagttatttttacctgtaacatgtaagctcaaaataattgatggctttgcttaatccctagtagataattatacacaaatttctttcccacaagaggaaaaatcaggtctaactcatgccccagactctgctccactaagcattttcttaccatcacattgagatgataagaaaacaatagacagcttaacagcatcgcaaactcaggcaaggaaataaaactccaggacatgtagctgcacacagagaaaatattccctaatgtaacaaaatactctggacaaagggccacataccctctctcgactggaaggatgatccattctaccctagagaacaatgttccagagcctgcatcagcgacaggtctagaaagtccattatccaaaggaaaaagtaagtctttgcatgcttctaggaattagaatgtagaaataaagtttctgtgtcatgaatcccaggtgtgtgggtggagaagcaattggaggaatggtggttaggtgacagtaagcagtgaagaaaaatgtaaaacagggtaatgtgcaagccagcactcttggtctggaggcggtgactgaagaattaccctggtcctctcataatgatttctatgagcaactcatgaatcagaatgcaagctgtcaagtcagaatgaatctagggtgacaagaaaacctagagtgagaaagttccagatcatgtgcctgtgagcagagagctggactcccaaagataaggccaagcaaacaacttcaagcaggcatggagtttgcatgtacaagtgcaaggatttttttatttcatggtttaaaattggtcctaggagaaacagaaaaaataatttggaccaagatatgtaagaacatcgtgtccaaattccaaacacacacgtgggctccccacattcgtgtacctaggatacgattgtcatttccacgttagggcctgtctgacttcttctctgttttaattagcattcctagtatgatcacagcttgaagagaattagaatggattctgtagggtgtgataactgtggctagtgttagagaccatcagggagaaataaccctggcaacttaaaaaygctaagcaaattaaaactactttaaatttttcttcattccacacatgtcgtcgctctcaaataataccttagcatgytccaagtgtcttgacaagtgacttacagttaatgttaagaattggcactttatcaccaaattaacaaaagtgcctaaagttactactttggagatactcattgcctttattttggacttaagtatctgtttagaagtttaggaattttctatactgtcttcttgaaatcaacttagagaaaatgaacacaatagattttaagatcttaattcacyaatgtttaatgaatatgtttgatgctgacacaaccaccaacttggtaacaatttctttcattttgcctataggtgttcatgtatttggattatgctctacagctctcattacagatatcatacagctgtccacaggatatcaagcaccttactttctgactgtgtgcaaaccaaactatacctctctgaatgtatcttgcaaagaaaattcctacattgtggaagatatttgctcaggatctgacctcacagttatcaacagtggcaggttagaaacagatctaaaaacactctgcatcattgttttcattattcaattgctgcttggagtatcactttaagcatgcctctttcagtcataatgattttgtttttatttttcttttcaattcaatgatctcttcaattactaaaccatagaaactcattgggggcttattccaaattcttctctatgtctccaaatttcagcctcacatttttgctactagtccstatttcaccaaactccaccatgttttgtgatcaatcctatactcattatggttttaggttactataaatggtttatttcagaatatttacagtcagtcatggctggcagtcaatataactcttgtactggtttaaaaactaaacacatatgaaagttatatctccattatatgttccataaaaaaaatgtgaattttcctttttgtaaagtttgaggaggggtaacatctaagattgcatatgttttctttgaatcagatctaactcatgccccagactctgtgacataatttcattcattctttgaatgaacccgggtgtgcatagcttctggccttacaygtcagaaaataaaggaaactcaagaaattaccaatgcattacatttcttaataaataaagcaaaaataaacttacatgacaagagatagtagtttacagtctcaaaagaaataaattgcagagggataagggccaatcaattattgaaagaattgaattttccattcaataagttgccaaatattgactaaagagtcaaaaataagttaataggtacacctgaataattaaagcctgatgttatgtgattatacacattaaggttctcatgtatcattcaataattttggatctacagtcaagacctatgtcctctatttttttctcagtcctattacattaacttatctctgttgaatggggatcttgtttatcatggtaccaaataattaggaaggcactaatttaagtgaattttattttttctaattttttaattcattgaaacaaatctctattcttcttttgcctgcccttttcagagtctcttcactatctttgcctgctctttaaactrtttaaataagatgatctataattcttgagatgaaattattgtaaagtgtactacattttgttaattttgtagagaaacattttgttaaaattagacttttcttatgctttctagagtattaacaaaacacatttagatccaatgccatgagaaaataasttcatttttwaaaatttttatgtaaataaaacaatgtgtttaggagcatagaaaaagtttaaagctttaaacccctaggttttatgagctgttacttagaactggtataattcttacaccaaagaacaatgatgttttccaatccatttttacttcaaccatccttctagtgatgtaatgaagtggccccttgccaagctagcagttttttatactggaaastacatcactactatttgttaatattaatggtgattagcagcatttattttatcactaaggtctttcaccagaaagctggacagaaggtaaaattattgcttattgccttgtgacttttaagttgaacattttaaccactcagtgtctttgagatgaytgctagcagtgtatctgaactacaaggcataatttgactatcttcttttggcagaaagtccttcccttctcaacatgcaacccttgctgcctttgcagctgtgtatgtttcggtaagtaactggttcttttttgttaagttgtgttctacagaaaatctgaggaatgaatgttgtctccaggtgactaattggatgatataaccatgtaataacagaatggtaaatttagcactgcagcctttcaatacaatggcatccaaagcagaaatcaaacactactataaaaaatagtacagtaaaagaatttttctacacagttataatagtatttatttattctggtatccctttaatattatacttcataggaggatattgtgaattataggaatgttacaaaacttgaaagaatcacaataagtacccacaaagacatacaacgtgcacacacacacacacacacrtacgctactttagtatttctgtaacaataagttttaggtcagtgtaaatttagaaatgttgtacaatgaatagtcattttatctaatttgtacaatagtccgtgaagtctttcctgagaaaaatgagcgaaattatacgacaagtaacatggagactaaacagttaaatggttaactctactgttttggtatttttccaactttcatgtaattaatttgttatttatttgataaatttcatcatgcatatcccttcttggcaggcacagaacatagccataggaagagggggtgaaacagtaaaactgaagtcaattgtatcagacttttaacttttatttgattataatttactaataaaatggcctttctaacatacttaacccatttcttccatttttaagatgtacttcaattccacattaacggattcctctaagcttctgaaacctctcttggtcttcacatttatcatctgtggaataatctgcgggctaacacggataactcagtataagaaccacccagttgatgtctattgtggctttttaataggaggaggaattgcactgtacttggtaaataagttactattatcttataagccaaagtttaaaatggaaaacatgcatagaatattttgcactataatagcttccttgcgatatattttatataaatgagaaaatctctggccgcatctccattctatgccaaaacacatatctcactttcaacaaaatcatttattgaactcttactatgagccagaaattgtaattttagaaagatttctgaattttgtctttatgccaaccaaacaggaggtgggcagggactactattactrctataattataatgctacagatgaggaaagtgattattgccaaaagtaaggttagtgaaagcaaaaatttagttaaaggttatataacttgccccacaccacaaatttagcacctgaatgtaactgtgatccaactaatactgacttctttaacactactcttttttcaagcctggtccccctctaagggaaatatcctcagcataaggaaactgagattgtccatttcattttgtcatgcatgcatgcattcatgcattttacatttattcaatatctattccgtgccagggattatactgaacattgtaacactgagaaatgagatgtattcttttttttattattattattattattatactttaagttttagggtacatgtgcacaatgtgcaagttagttacatatgtatacatgtgtcatgctggtgtgctgcacccattaactcgtcatttagcattaggtatatctcctaaagctatccctcccccctccccccaccccacaacagtctccagagtgtgatgttccccttcctgtgtccatgtgttctcattgttcaattcccatctatgagtgagaacatgcggtgtttggttttttrtctttgtgatagtttactgagaatgatgatttccaatttcatccatgtccctacaaaggacatgarctcatcattttttatggctgcatagtattccatggtgtatatgtgccacattttcttaatccagtctatcattgttggacatttgggttggttccaagtctttgctattgagatgtattcttcagaagtttacaatgtaaagactaacataaatataaatggttacaacatgttaaacgatataacagggtatgaacaaagtattttaggaatagcaaactgcctgaggaagttagaaaagacgtcacaaaagtgatgtgtatgtgtgtagctgttgttgttgttgttgtttttaatgggagttccatggggtaaagaaagaagggagggcattcaagaagaagaaactacatatgcaaagagacaggtatctgaaagagcaagtggaagtggaaggtgggggaacaggaggaatgagacataatggccaggtttccagcatggaacactggacagatgatgacttcattagcagaccaggtaaatgacagatgaagcagatttgtggggtaaagggagttgaggggatcaattgaatcaataagcagttaagtagttgcttctggaattcaaaagagcaatcagtattggagaaggatatttaatggaagtaccattgtagttactacggktatataaaactgccrggtcataaaaataaaaggtagccagggaataccaataaacaagtgacatgcggaggaaaaggcaataatgaaagaaactgagaagagctgacagaagtaaaaataaattatctgtagctacagttctcaatcatgtggtcttagtgcccttggaaaggcattacaagaaaattattaccaaaatacaggtaaagtactgaagtgtgctataattttataagtttttttattttcataaacaggcacagtcaagattgtcactttaaaagttattctcactcgcatgcattcttcactgcaggagaaagggatcaaattaaaattggtgtgccaggaattgtgcataagcctgggttgcccatgggagtgttagytggcaatgtgcattgcagaagaaataaaggagactggaaatgccactctctagtttatgtattgcttttgcatgtgtgtcatttcatgatgtcctggaattagcatgggatttatagtgcaaaggatttggttatgaatccaaattttcctccacttagccaagttacacagcttttcagaagcctgtttcttcacctacaaaataaagatactaactctctgtcccatgtcataacaagaattaaacaactacagacatgtgtcacataatgatattttggtcaaccatggaccccatatataataccatggtgatcccataagattagagtactgaattttttctatatgttttctatatttagatatgcaagtgcttaccattgtgttacaattccctggagtattcagtatagtaacacactgtaggattttgtagcctaggagcaataggctgtaccatagagcctaggtgtgtgggaagctataccatctagatttgtgtaagtgaactttatgatgttcacacaatgacaaaatcacctgtcaatgcatttcttagaatgtatccctgtcattaaatgacacatggctgtacttgtatggagagcttatagtttagtggaggatcttccccaacttacaaatttaagtrcaattattaatagaacatgagttagggattgctcattctggtgagagcatagacagatatttagaagatggtttcaaccaggaattaaaatacttgaagaggcaggagcttggctttatttcatttctgtctgtactcttgccctgaaattggaaaattttcagttctaagccaatgctttgttcattgttaagcattctataaaatgttaaatcaatatttttttgttttgaacttgaatagtagacagtggttaccgccttttgaaattagcacacaaacaggtgtctgctgcttgattttttatctctaataccaagtatctcaaaaactgaaagtccagcagggattagatcttctatgtgccaaaagggtaatgattttgagtctgaactttagcctttttccaaatttttgcttcccaaatctaaaacaaacaaaaaaagatacactgtgtatgaagacaaaattaaataaaatctggctcacatttagtgcaatggtactaaattgatcaaatagtatttcccaatttatgaccaagtttaaatcaggaaagaatctaggtgccccaatctggcgatggtttttgccctgtcttccaagaacaccctgtacaatgctgaacacacaaggctgtagtcagtgcgagtcgtaataacatatgtctccgaccttctttcaaaaccagatatcattttttataaatgatatattgttctatattttgtacacttcttctactttccatcatatgattgaaaatggaaggtaaaataaatcatttaagccatttgagatgtcackcaacaagaagttcctaaatccagaaaaatgaattgctttgaaaagcagaaaaaaagtccttatttctctcttgtctgctttttcttctgaaaatatacacaggataagatagacaaaaacatccagtaggatggagaaaagaatggggttcacattgctgagcaattcatgcagcgatttatgatataacttacaaagtatttccctgcaaaaatatagttttcrtgtttcattatttgtactagtcaatggtgtataggaagcatatacctatgtatgtacttcagtgggtactctaaggaaaccctagtgactgtcttctagtgcatgatatttattgctttctctcaaacactagggcttgtatgctgtggggaatttcctgcccagtgatgagagtatgtttcagcacagagacgccctcaggtctctgacagacctcaatcaagatcccaaccgacttttatctgctaaaaatggtagcagcagtgatggaattgctcatacagaaggcatcctcaaccgaaaccacagagatgctagctctctgacaaatctcaaaagagcaaatgctgatgtggaaatcattactccacggagccccatggggaaggagaacatggttaccttcagcaataccttgccgcgagccaataccccatctgtagaagaccctgtcagaagaaatgcgagcattcatgcctctatggattccgctcgatcaaagcagctcctcacccagtggaagaataagaatgaaagtcgaaagttgtccttgcaagttatagagcctgagcctgggcagtcaccacccagatccatagaaatgaggtcaagctcagagccatcgagggtaggggtgaatggagaccaccatggtcctggcaatcagtacctcaaaatccagcctggcgctgtccccggatgtaacaacagcatgcctggagggccaagagtgtccattcagtcccgtcctgggtcctcacagttggtgcacatccctgaggagactcaggaaaacataagcacctcccccaaaagcagctctgctcgggccaagtggttaaaagctgctgaaaagactgtggcctgtaacagaagcaacagccagccccgaatcatgcaagtcatagccatgtccaagcagcagggtgtcctccaaagcagccccaagaacactgaaggcagcacggtctcctgcactggctccatccgctataaaaccttgacagaccatgagcccagtgggatagtgagggttgaggctcacccagagaacaacaggcccatcatacagatcccgtccactgaaggtgaaggcagtggctcctggaagtggaaagcccctgaaaagggcagccttcgccaaacttacgagctcaacgatctcaacagggactcagaaagctgtgagtctctgaaagacagctttggttctggagatcgcaagagaagcaacattgatagcaatgagcatcaccaccacggaattaccaccatccgcgtcaccccagtagagggcagcgaaattggctcagagacgctgtccatttcttcttcccgcgactccaccctgcggagaaagggcaatatcattctaatccctgaaagaagcaacagccccgaaaacactagaaatatcttctacaaaggaacctcccccacacgggcttataaggattgagtgatgtccattccatcattagggctactcgcaaaagaccatatgttgattctacctgtgttctgttccagcgaattgggaagtctcaccaagctagattgtctaccatcagcccagaactctgtaacttttcagaactgctatactcaaacttgcagatctcacatcaaggagagggaaaagcacaatgcaagaacctaactaacgtgatgatatgaagagttttcttaagacctgtcgtcaaacttaaaaggttttgcagagggcagtatcaaaagaaagtggttttcttcaaatgtatactattttacttcctgaatgtgccaactttggggatttttctttatagtgagctgtgggaacccagaacacacacgttttccctacagcagaggccatgcagtattatatattcattttgcagaatctgcacctacagctcaatacgggtggtgctgattattatagtacatataccatgtaaactctcaaactctatttagctgtgaaatagtggtgtgcaattccttgttaaagaaatgctactttattaagaagatgctggctgctttgtgttagaataggacaccccgcagcttctctgtagtggctctgtcacagtcaaaaaatgaaaaggtttttgtgcgtttcttcaaaattctgctttcttcaacatcaaaaattgtgtagaaatattttcagtgaaagggaataactagtacttttctgcatagtttttcttctgcttactttttatttaagtataggtactgctaatgaatctgttttcttagtgagtaaatttgcataattttataaatattattttagagaatcttttgaaattgttgtgatcatattttgctttctatggcttctccttaacttattgattaattttttgaagttatagatatgttctcctattttaaaagcaaaaataacaattgacattccttgagcaaaatatactgctgtgaatttgcaaacaagaaatctgagccaaaacttgacattgtgggttacattgccagaaatgttggtcaagtttgcccttagatgtctacaactagctggcataggttgccatcttaacaagtaatctaaaagtcccattcggttctacattattaactttttttttctatatcctgatgaccagtaaattagagccacactggttaagtttgactcgtctctaaaacgtttttgttaattggacaccaagaggaagaatctgaaaaaaaaatgcatgttggtaagtaaaagtatctcacggtacaaattaagaatgactttcttcaaaatatctgaataggtgcagttttagtttaacatgcaaacaaccattgttgctacctatcctgaatcaagccttgagcctaaatcaaagcaaaccaataccattgataagaagaagataaaaacaaaatattttggagtgttttccaacttaaagtatgaagacatactcagttcttggaacttagtattaaaccttttttatgccatttcataagaattccgatatatacttgatgattgccaaggggatgaaaggaaacaacagagatggttgatctgatcttagctcactttccaataacagaaggagttgtttacagatgaatagtatcacatcattatcaatttccacatgaaaaaggtggagctttctagaaaaaccaacctctaaggcattaggaatttagctgaaaccagcagaattgaaaactctggcaataaaacatggactcaaccatatcccttctggcaatttccttctcagagaggggagtgggaataaaatgttgccttccccacttctcaccaccaccgccatcatgacgctcatactggcttttgcctgtttgtagaggaaaaggtgggctggttttagtactctgaaggacaaaaacaagcaaacaaaaacccctgctgcagcatttcaggtgcagtatgatatttcctaatctttcctatttcttaacaaaagattttaaagtacttctctagtcattgaagtttttttttctttacataaatattgatatattctttttctactcaaagtgccaaaggctacagtttttaatgacttaacaaattgtaccacattgttaaggacatataatgatagacactagaactcagacctctgcatgtatatttgataacatgtcttttgtaaaacaaaaattacaaaaaaatttgtttacattccactggtaccttaatttaaaataaatcagactaaaaggtggtatctcttcttagtgttctatttatcttatttgctaatgggagcacttcttcctttgttaggctgtgctttactgataaamccaagtattgaataaagagagttaattatctttttaaagtaaataaaattatgaaaatatatatagtatatataaagtactgtgtttaaaaaaatgttatgcaatgttttccaaactgataaagtttgtaaagtgctataaatgtattttgttaagtacagataaaagctattgtgtgagtatattgtgctaaaatcatagaaataaagattagatttcttcatcaaaattggaatagtttggtttttacttcagagtctgaatagataatagcttggcttgtaggaaaataactgaggaaataagaaaaaatcagaattgattaaattcataattgtttaggaatgggttacaactaagaaagaaaagtttctcaatctatgacatgttttcttattgttagaattttcttttatgcttattaaaggagctcttttatactttacacatatttttgcatatcaatgttacagtgtatgaaaaagaaaatatgaaggacttgactaagagtagttgatgtacttattttcccaaacagtagagacctttatgtcatcatggccattggcgttgcagcttttcttaaaagaatgcttcaccattaactccacgatattctttcaagccattaaggctcattatattaattttactgctgatgatttgtacatctcactggaaggtattagcacaagtttttagaccacaaccagaacttaggatttactcaaatggtcctaaggagtttgttgaatgatatgtgaagttacaaacatccagtaatgccaccaagttcatgtagctgtccaattgcaacaaagttcatacataccaggcaacaacatcacaatcactacctggccaacagccaatgtaagatactattgattgtaggaaacaccctggttttagagaagttaacatgtgaaaaaacaatgtgtatcttatataatgggtgaaatacagtttctctaggtctttaaattaaacttctctaggtcttgattttttcatttctaaaatggagacattcagccatatttcccttctaaaggatgtcctaaagttctcaatttctatggattatcattatgtattttatccaatgagcaaaaactggtaagaaaataggaaataacttgatgatctaaaataactaactaattagtattgccatctttgactacaaggttaatagaagcaagccaactggggctgctgaaagcctacatcaactatttcaccacataacatatcaaaacaggtgacctgtatacgtatacccctagtcctagtacctttctcatgaggcaacagttgagtagattcttggttattatacacctaggaagctatcattaagggccctgctatttctgtcttttataggtcaagtctttacttgatctctatgggtaatttcatattacaggtcaaagggaaaatgaatatgtatgcatgattcagagagtaatgtaattaatataaatgaaaaaatcaaaatgaattaagatgatttaatctaaaaaaacaacaaccatgacttggaaaattgtcaaaggcctgtctgtgattggatatttcatttcctctgcttaaatatgtttctgcctttattctgtaagaagattctaaaatgccctaggatcaaatattcccatttgaagaaagcatatatttcagtaatagtatatagattgcaagtaagatctatttatagaagatccccattgacgatgctttcaagttgaaagaacatttagataagccatttgatatagaagtgacttttatttcacggtcaaaacaattgtcagccaaagaaagttcctaattttgtgtatttgtgcaccacagtaaatgacaagtgaaactatagttctgccaccaattctacttcacgaacttgaatgcccttttcatctcctttactcccctaccttaagattctgtcattgcctatgagaaaaatgtatctaaattctaaagttacattttcaaaatggtacaactgaccattagataaatgagtttgaagaagagaaaatatgaaaattgcatttgtataaaatctcattttctatttatcactttgtatgcctggctacttccttataagaatgagagaaaggaagtcaaggataagcctctttgtctttaaaaagatgacataaggccaggcatggtggctcacgcctgcaatcccagcactttgggaggccaaggcaggcggatcacctgaggtcaggagttcaagaccagtctggccaatgtggtgaaaccccgtctctactaaaaatgcaaacattagcggggcatggtgccaggcacctgtaatcccagctactcaggaggctgaggtaggagaatcccttgaacctgggaggcagaggttgcagtgagcagaaatcacgccactgcactccagcctgggcgacagaatgtgactctgtcaaaaaaaaaaaaggaagaagaagaagaaaagaaaaaaaagatgatatagaagtgaccgtcatttataatccacttgattgacccaaactagatccagtgaaacttttccttttatgagtaatgcttttaaggtcaaatctagaatattaacataattctcaaaactcaacagtagaaaaaaacagagtaaattaaaaaagtaaaaatgtaaaataaaaatggacaaaaatatgtacagaagtttcaccaaaaaagcatatacagatggcaaataaacacgtgaatagatattctgcattgttagccatttggaaaatgcgaatcacaaccacaatgaaatatcagtagtcatctatcagaatgattaacattaaaaatagtaataatatcaaaaatagcaataatgtggagaaactgaatcactcatatactgctggtggggatgtaaaaggtacaaccactctgaaaaacagatttataatttattttaaaaactgagcatacacttaaccacacaacccagcaattgcactcttgggcatttatcccacagaaatgaaaacttatctgcccacaacaaaaatggtacatatatattcatagcttctttattactaatagctaaaaactaggaataactccggtgtccttcaatgggtgaatgattaaacaaactattatataatcatatcacagaatattattcagcaataaaaagaaatgaactattgacacccccactaacttgattgaatctccagagaattatatggaatgaaaaagccaacaccaaacagttatacaatgcatgaatttatctcatgtaataaacagtatagatacaagcaatctgtatttggagaggtggattttcatctttaatacatggctttcaaggttgttctaattgccacaatttccaagcagaagtaggagtaggagggaggaagtcaaggataagtagctttacctttaagaagatgacataactggcatccgttatttatgatctacccaactggcccaaactattagtctggggcaaaagtaattattatgttggtcccattgaaagtaatggcaaaaaccgcgatgacttttgcaccaacctaatagattaccttgctgcaagacaggctgaagaatgtactctctagctgggaggccctgggcccagctaaaattgtgtgtgcatcttttctaagtaggtagaagaggatgagaataattcctggggactaatgatcagtctctgtcataccagcttcaaaactcttcacaatctaacctgcaaattcctatagtctactacttctccaggaaaacctgtttgatagacatatagatagatgatagataggtaattaaacatttttaaataatcaaataattaatcttctgacatcactagagttagtacattttttaaaagggctaacctcatctctcctttttgaaactacttaaagatccttgatctgtatgaccaatgcatttacttaatcatacaatttgtatgattaatcaatttgataaatgagacattgaatatttactacacactgaactgtaagttctttataagcagttctagcacaacaggtgtttaatagatacagaataattgaatgagtacagtgtgttctatctactgtgaataaaaaataaataaaataagtaaatgagacttatttggaagagaaaggaatggttgtccatttgattgtgccctgaagttccagtttctcaaaaatccactctgagaccctgaagccaaacttatgctatttatgcttttcccttttttcttatttgaagcatgtttaaaaagtgttgacatagtataagccagatttcttggaacaagctgtcttctcacaatacatatgatttagcaacagttgttttttcagatgttcccacctccacagtaatctttgtggaggcaagtgacaataaagtatacctacttattccaacatttaaaaaamaaaacaaacaaacaaaaaaaaaacagaaaaccctttgtatagtcaagcatgcaaggtttttttcttaattcaaaatcaaataatagaccaggacctacagtgatttctttgtacctggcatatccactgcactcttcttgctactcaatgtgccactcgaatatcacaatatttttcagaattctagagtagtgagagtctttgtggtcagactgacaagtattcaaatttcagcaccacctactgtgtgcctcagttttcttatctgtacaataagtataataatttagggttgttatggggattaaatgaataaatataggtacaatatttaaaatactatgtgacatttagtaagcagcacataaatgttctttcttagttttattatttggaagtgttctgtggcttctttatctccagtcctcacttctccctagaattctagactcaaatatgtaactccctacttcattgatatctttacttaaatatctataactatctcatatttaacatttgcaaaatacacttcctgattcctactcccaaacttgtttatttctcttagtaatatctaactctccaccctcccaccacagctgctaaagaaaaattctaaactctgtccttaatccattcttttctctcaccattcactctcaaactaagtcttatcagctcttcctccaaaatataggatcgcttttcctatcatcactgcctttacccttagctatctcaccatcaactcttgatactcttatccaggcttgggggctccccttatagtcttcaggtggcagtcaaggtgaacttcttaaaaaaaaatcagatcagatctcctccaaatattctccaaatggcttatggaaattcagattctaaaaagattgaaacttcagatatggctatccagtttccttcactggcagataggtttcctcatgaacaaatttcaatattcagtgatgttatctatgagatgcagaaagtagaatgaattcaatctgagcagaggacccagtgagaaaagactgccactgtcacttttacttcagtgacattactcatagggtctaagactatctagtgacctcaattaatcaaaagttacctctattattaataccccaaaacaattattttaattatacaattggtaaataattatgattcacattcaacatgtctatgtttcaggcactccgttagatttaaatctttcaacgtttcatcatagtgatagaaaatgggttttcaaagatcccaaaagttctttagtttgtttatttggtaagaataagaagtgtgtgtgtgtgtgtgtgtgtgtgtgtgcatgcatgatttaaaatcacagccttccagagcataattgtattaactgccgtctacttaaaaaaaattaaacatcgtttaacatatgcccaagtcaccagattattaatattaaactcttcaacatacatatagcaaggtcaaaatttgtgccctgcatacaaatatacaaaacaagacagaatggcttttttaccattactgttctcaggctgctttgaagcacccatcttggtggtagtctggagattacgtaccaaaattatcagttaaatgtatatcagccacttttcctacaaaagtctctcttggataaaggcttcagggaatagggcaaaaaggctaatgtgtccagatgtcagtaggattagtcataactagcccatgtgcaaaccttgaattttattatgagccctcactagcttaacttccatgtcttttaa

SEQ ID NO: 95533 - DNA, 102139 bp, Homo sapiens
cacagcaattttcctctaccgcctctttttaacatcaatatgtcaattaactcccatcttaaaaaaataaggttcctcaattccaaatgctcctccatctcccacccaatttatccattcccctcaaagaaaaacctgcgataactggagactgttttttttttctttttcatgtcccattctttcttctcatttccatctgccttccatcactaccttatttagatctccagtgactaacctgttcccaaaatgtctgatcccacctgtcaacagcatgtgacatagctgactgcactctcattcttcaattattttccttttttggtttttggggacaccattctttgctaattttcctcttatcaccccttttcttttccatcttctttgctggctcaatttcctctactagacctctgaatgttagtgactccagactcttctctatcctgcactgtccaatacagtagccactagccacatgtgtctatttaaatttaaaataatttaaatgaaataaaactcatttcctcaatcacactagccatatttcaattgcttaaaaggtacatgtggatagtatacaacatggatacaaaacacttatatcattgtagaaagttctatttgacaggactgacctcaactcttctttggtgatctcacccaatccgatagctttaaataccatctatacgctaatgaattctaaatttataccactagatctgacccaagcttcaggtctgcacataaaactgcctatctgacataaccacttggatgcctagcaggttattcaaactaaagtcaaaaacagaccacttcactttcatcatctcctccccttcccctacccacaaaagcttgtttctccttcagtctgtctattctttgcatataataccacctaaccagttttgaatcaaaaaatctaggagtcatctggattcctccttgttttttaatccccaatatctaatcccttaacaagttttattgactctacccataaaatgtatatcaaatctgacctcttctccctccactgttatctccctagtccaaagtttttgcctggaccactgtcttatttatatgacatcccctgcacctaaaacagtgtctggcacatagcagatgcttattaaatatgttgaataaattaacatgtacaatcctacagaaaagtacaaaattatctgaacttctaaaataactttaaaaatgtgcatgactaatatttgctgtagaaactttgggaaatagatttaagaggagaataaaaattgtccaggtgtggtggctcatgcctgtaatcccagcactttgggaggccgaggcgggcagatcatgaggtcaggagttcgagcccagcctggccaacatagtgaaaccccgtctctactaaaaatacgaaaaattagccggatgtggtggcaggcgcctataatcccagctactaaggaggctgagcgaggagaatggcttgaaccctggagacggaggttgcagtgagctgagatcgcgccattgcactctagcctgggcgatagagtgagactctgtctcaaaaaaaaaaaaaaaagaagagaataaaaatcacctcccaggctgagctacgtggctcacacctgtactcccagcactttgggaagctgaagcgggtggattgcctgagttcaggagtttgagaccagcctgggcaatgtggtaaaaccctgactctacaaaaaatacaaaaattagccatgcatgggggcatacacctgtagtcccagttacttgggacactgaggtgagagcatctcccgagcccagggaggttgaggctgcagtgagctgagagcgcatcactgcatgccaacctgggtgacagagtgagaccctgtctcagaaaaaaaaaaaaaaaatcacctcccagacatgctttacttatgactggttatagaccacatatcgttattcattttgtcaactattaacatagttttcatgctttttgcagcactataatttacttccatgaatctgttaaatgtactgtcagcgcaactcatcttcccaagagaaattttaattgttgcttcttctcactcagtcttaactttcctgattaatccactatagctttttttttttttttttgagacagagtttcgatcttgttgcccaggctggagtgcaatggcacgatctcagctcactgcaacctccccctcccgggttcaagcaattctcctgcctcagcctcctgagtagctgggattacaggcatgtgacaccatgccctgctaattttgtatttttagtagagacggggtttctccatgttggtcaggctggtctgaaactcccgatctcagctgatccaccctcctcagcctcccaaagtgctgagattacaggcatgagccaccgcacctggccttttttttttttttttttttttttttttttttgagacagggtctctgtcacccaggctggagtgcagtagtgcaaatatggctcactgcagccttgatctcttgggtttaagcaaacctcccaccccagcctcctgagtagctgggactacaggtacacaccaccatcatgcctggttaattttttacagagatagggtctcactctgttgccttggctggtctcaaactctgaggttcaagtgatcctcctgccttggcctcctagattgctgagattacaggcatgagccaccatgcctggcccactacagcttcttgacttcttgattatctatacattctgtgtctgtcacagcccaggacttggcttacccaggtgacatttttggcaggaattctcagctatgttcctgtccctgcctgctacctagctgctccctgcagttctcaactttcttggcaggaaaactraagagttttatgatcaccttaattcagaataattcaaccaataagtccaaacaatgtctggtaccccaccctctttgattctctgcatttccttgcaagcccccaatgtttgattgcttccattcattccagctacatgccaagtgtggtcaaactaatatttcctacagatataggtaattataatagtgaggggatgaagtaatgggaaatgcaagggtgtcctccaagtattaaatctaccttaatatagagcttggggcctggagctaagtaattatcatatgcctgacattttcattgcatgtgtcagtttacaaagctgtttcagacacatcatcatcacagcaatctagatgctattgtttgcctacccaacaaccctccctgcagcttcctcctcactgagagaatgcctattttgttcagtacccaccctccatccaacagccatgtattacaggtgagttgtagatcatcctcctcccacctccaccagctttgaagtcgctttccttttatgcctgggaaagtgatataagtatggccaaaaggagtgaaagaaagtctgctgtgaggggttctagaataagtttccttgcctttaaaaaaataaaaaataaagcaggccgggcgtcatggctcacccgtataatcccagcactttgggaggctgaggtgggcggatcatgaggtcaggttcaagaccaacctgaccaacatggtgaaaccccgtctctactaaaaatacaaaaattagctgggtgtggtggcgcatacctgtagtcccagttacttgggaggctaagccaggcgaattgcttgaatcccagaggtggaggttgcagtgagccgagaccgtgccacagagcaagactgggggggaggggcaaaaaagacccgacaagataacctcttttttggctatggagattgccctgttggatgtaaccatccacacatcccattctgggaccactagtgtcttaagtatcaggtaagactgtttcaggttgaagacattattaggaatggcagagtgggcatatacaagtaaatgatactccttgtattatccttgagctgtttttcttactacaccaaagaccctacctctggacttccaactacgcatttgtaagcccagagaattctgattccattaaaatttgagagacactgacttctaagtccacaactatgaactttctccacccttactagctaagtagacttaggcaaattatttaacttttatggaatctacttctttgtctgtaaaaagggaactaatatccactttaaggtcttactgcgagaatgtatagttaagaagatttgatggagccgggcgcagtggctcatgcctgtaatcccagcactttgggaggtagaggcgggcagatcacctgaggttaggagttcgagaccagcctggccaacatggtgaaactctgtctctactaaaaaaaaaaaaaaaaaatagccaggcatggtggtgcatgcctgtagtcccagctacttgggaggctgaggcaggagaatcgcttgaacctgggaggtgggggttgcagtgagccaagattgtgccactgcactccagccaagcgacagagtgagactctgtctcaaaaaaaaaaaaaaagaaaagaaaagaaaagaaagaagatttgatggaagacaatttggaaagtgttgtaaggtccacggactctactcacaaagtctcccaaacttgcttgctgataggaatggacacgctggttacayaagctaatcccaggtgcccgatccccggaaattctgattcagtgtttcctaatggaccctgggagtctgcacctttaataacacattctaggctccaggtaagtgtggtgatcaggcaagtttgaatttagcaaaggaatacaggatgcagtactcctgtccagcaggactcagatttctggtttctgattctagatctgacgctattccacttgrrcaagcagttgcacctttctgaacctttttactcatctgtatacctgttcaatataacctacaggtaggtctatggtggaccgaaggcaaattatatttggggtgaaggggctcctgatcttagtattttatgttgtcgtaatgtggattaattagacataattaatttattaacaattaattaattagacataagcaaaattgagattgaagggggtgttggcagatcatcattttggctgaggacatgagaaacacactggaaatgctttgtgataaaattaactgaatattaattgtaggactgtgccttgtctatcctgctacctagagccactgagctttgcaatcctcttaggagtgtggcttacctttaggtggtcaccctcaactactctggtcacactgagagctgtgaaaacctcgagaaaagttaaaaacatacatgttgggagacagggggtttggatgagggccctaaattcgatgtttaagcctagggtccttactggcgaacactttcagtaatgtctgtgtgcaacagaaacatttctcttggcattaaaaaaaaaaaaagaaagaaagaaaggatgtattcccttagcttcaggtggcattcacgaagttgacagagccagaacacctcctaactggggagtttcgggacctttagggcgcagagactgcctgacctcgtcgtgggcgtaaatcaagcttccccagcgcttaactttacaattttcagcttacgcttggctgcagctgcgcacaatccgcgcagaagcaggggttccgctgacaaacgtgaacgtacagaacgtagaaaccttttaacgctaatatgcagtttccctgtatggctgttgtgcattattaatctaggtattgcgtatttagtttaggaaacacgaatactacatgataaatgaggtaaaatggattgtgactgggacctcagcttctccgtcgcctccactcctcccagctcaggaaagaccagcccaccaagacgtgcgtcctccgcgtttgagtcgcttcggcacccgtagttgtgaactttgacagcggctggtccccggaagttggacgcatgcgccgtttctctgcatggtgtgcgttctcgttctagctgcggccrcaggagctgtggcggttttcctaatcctgcgaatatgggtagtgcttcgttccatggacgttacgccccgggagtctctcagtatcttggtagtggctgggtccggtaagtatcgaggaggcgactgtcggacttgggttggtcactacaaaccccagagtgcaccgcgacgctcttccctggtacccttagcacttcttggagtgttgcatgcagagatttgtagtttctctgccttgccggaaccgggcagtccagccagggtaggggctggtttgctgacgcggcccagaggttttttttatgacaagtaatttacacttgtctataattaagactctctgtagcgtatatttttcaaacaattagtgaacagagaacgtagaagccttttgatgcaaacatgcagtttccccgtatggctgttgtgcattattaatctaggtattgcgtatttagtttaggaaacacgaatgctacatgacaaatgaggcaaaatgaattgtcacatttataaatatacaaagtccaagaggataaaaacaatgatctacgggctgtagaacaatacacacgcggtggcagagtgtgagcaacacactgacctgtcaggtaatacaatctaaatccaycaactctgtaggtgcttacaattttaaatacacatatttgacagggacagacagacacacacagacacaatgtaaacatttgggtatggcaggagattgcatccagatagaacatgtatagtatgagtaaatgtactaagtttatgttcaagtataacgcattactttattcacttaatctgttttgagctgttagaaagaccaaacactaaactaacctctggaaataacaaaactgactaacattacttgccacggagtgctgactccgtgctaagtcctgtgagagatgcaaagatacagcagtaaatgaaatagagaatacaaaaaaactaacagaaaataaatcaaaatgagtatttgccacaatgagataaatgctataatcttgtaataattgtgtaagaagtacaaattgctatggcagtcttcaggaagggcactactttatcaggtcttaaaaaacagacagcttcctggaagaaatgatgctaaactgaaacttgaaagatgacccagaattagtcagatgagggacagccagggtttcgagggctgggaggatgtgaaaagaaggtgataacacttggaatgaccagagttgagagaacactatcgtgtagagttcaatgtagggaggtaaactgagtccagattgtaaagagtatttaaaatcttgctttttttcttttttatacagagtctcacgctgttgcccaggctggagggcagtggcgcagtctcagctcactgcaactccacctcccaaattcaagccattctcctgcctcagcctcccgagtagctgggattacaggcgcaccaccacactcagctaatttttgtatttttagtacagacagtgtttcaccatgttgaccaaggctggtcttgaacttccgacctcaagtgatcctcctgcctcagcatcccaaagtgctggggttgcagacgtgagccacccctggcctaaaatcctgctttataaagcaattgctgctactccactgttgatatcatgtaggggttaagaccacaggcctctaggttgtcataacaccacacatgaatcacatctctgccacttactaccttggggatctcaggcaattagttaacctcgctgaaccttctgtttctacatgggttgagagaggacaggagagattaaataggatcatatttaaagtgtttaggccgggcgtgatggttcacacctgtaatctcagcaatttgggaggccgatacaggcggattgcttgagcttaggagttggagaccagcctgggcaacatagtgaaaccctgtctctacattaaaataaataaataaattaggtggatgtggtggcatgcacctatagtcccagctatttgggaggctgaggtaggaggatcacttgagtctgggaggtggaggttgcagtgagctgagattgtgccactgcactccagcctggttgacagagtgagaccctgtctcaaaatgaaataaaataaaatgatataatcaaaagcttaaattaaaaaataaagtgttcagtaaagtgcttgacatatagtgtcaacctaaaataatcaaagggctcaatatccagttagaagagtttattcaagcacaaagcgtgagattgggtgtctggggagcaaacctataccaaagaatgtaatcagtgctccccatgtggggaagaatgaaggtagtttgtatasgcaagaacagagatgctgaacaaaattacaatattttccatacaaaggccaacatacagatacaagatttggttggctactgtaagggccaaggggaaacttcccttttgccctctgaagtttcactgaaaatcactgatgaggcagaaataataggagaaaaggcatacaaatttatgaagcatatatgaaagtgttctgaatgaagacccagagatacaagggaaatggtctgtttttatgcttaggttcagcaaagtatggacagccatgtagaattatgactggacaaaagggtataatttaatgctaatagacagtagggaagcccagcaaggcctgtctagatttttcttggtctctctgagcatgcattcctttccttctggatgtggggtagggccctctstggaatgggggtcttatgacctaccgtcaaacaaggtagatcagataatttttttaatttaattaattaattttaaaaatagagatggtgtcttgctatgtgtgccagactggtcttgaactcctggcctcaagcaattctcctgccttccaaagcgctgggattaaaggtgtgagccacctcgcccagctccccagctcggataatttctttatggccagtttttacacagaaaggtggagtaaaattagagtagtatttttaggttttatgaccagcttttgggagaaggagttcttggtttctgtgacccgccctggggaagagagattctagtttctatggcaagcctcaggggagtatgggactgagagacagaggacaggagaaggccagagaaaaatttttgcttctaaggccttcattttgggatattattttctaagtcccaacactactattgattacacactaagggatttgtttaacattctggtataaggaggtaacaatcacaaaggcctctctatctccaatgtcatttagtctaggtttgaataaagactagggaatctggttaatgtataacatctcaacacaaaggtcaggaagcaacagacatacaccaaagagaaaaagccatgttacatgagtcagtttccagggcttagcttttccccttggcataataaatttggaaggtcttgacattttcttttctttttacataagcatttaataaatggttactgttattagtcttggtggcaaaaggagcttttgaagttttgttttggtttttgtttttaagacagactcttgttatgtacccaggcttgcctctaaatcctgggatcaagcgattctgagacagcctcccgagtagctggtaccacaggcacgtgccaccgcacatgacttatctttttcagtggagagtcacccacttcaagcctgcattgtcaaaagaatgtcttgacaaagaccgaagtagagaaacaaataggagccttttgaatatttcagataaggatgtgaaaagaaggtgatagcacttggaatggccagagttgagagactggagtctgactggagtgataggtgtggggctggagaaaagcaatcgcattcagatgagattggaagattttaggagttaaatccacaactgtggattgaaagtagaggatgtgggagggaaggactgaagggtgatttccaggtttctgacttgaacaaatggatggatgttagaaccattcacttgatagtgttacatttggtggactagaaaccaaaattaaggttgataattcacctggcaaatggtgccttcattcagattattgagggtaggaaggtatcaagggcctgaaagaaccatgccaattaaaggaagacttgtaatcaaataagcagtttaatagttcatgcccaaaattttggaggaggcagaaggcattttcaatatttaccttgaagaccaagtgacatttactctttagatatcataaaatattattagtaggccaggcactgtggctcacgcttgtaatcccagcaatttgggaggctgaggtaggtggatcacctgaggtcaggagttcaagaccagcctggccaacatggcaaaaccccatctctactaaaaaatacaaaaaaattagctgggcatggtcgcaggtgcctgtaatcccagctactcaggaggctgaggcaggagaatcgcttgaacccagkaggcagaggttgccgtgagccgagatcacgcctgggcaacagagcaagactccatctcaaaaaaataaaaaattattagtagatcacttctgttcagagaacatttgccaaaactacttttctttgaaacataatacagccttcttaggcaaatgttagatttaatatcaaacattcattctttcattcaataggacagcctgctatttctaggaataggaggtacagcagtaacaaacacaaatccctgccctcatagtatggtgcttgccttctagtgaggcatggatagagggagataaaaagcaaaacaaataaatagactacatagtaagttatgcagtgataaacactacgatttggggaaggggcattgcttttttatgaagattgtcagggaaagccttcttggggagatgacagccaacagcaaggaggctagagtgattagagtagactgagtaagyggggaggaacaggagatgagctccaagagggaacatagttgaggtcagagtataagaagccttttatttcacatgagacatgaagccactggaggattttgagcagaagtaaataatttgatcaactcgaatagggtcacacgggatgttatgttgcgatagactgaaggggaagtgggtcagggaacagatcaagaaactgttcataatccgtatgagaggtgatagtggcctggagcaggggagtagcaaaagaaatggtgagaaatgattggatgctggatgtattttaaggtagaacttagagattcttattctcaaaaaaaatgtatcttaataaaagagtaaaatggaagacaaaatccatcattttaatgactttattcagtaacaagtttaaattttcagtgaatatactgtcaagctaaataacagagagagattctccaaagataataagtgtattcaagagtaagcattgtagtgtggaacacacatgccgagtaaactatgggcacattcaaagaggcaagggaagacagcaatttttaaagctaaaatggggagggttacataagttgttttgaaacaattatccttgcttacagggatcaataataagggtggcatcagtccaaggttaggcaggcaactgctgggcagatgtccttgcagaagtttttttttgcataaggttgcagtggcctttgtacaaggttgtggttttggtatagtcttttgtaacagttcttgttttcaggcgattgagcattaagaacccttccttcatggcctttcccagctccattttgtcacaagtgactctatttttatcctgacaactttcacagtattcaatgagggtttccttaaaaaataaaaataaaaataaaaagtttaaaaaaggaaataaaagactattaaagcaggtataatgaagttttaattgtagtggaagatgttgtggatattaggttttatccttaattattccagctgtgaaaacaaatacctacttggagtaccaccacttgttttttttttcttttttgagacagagtctcgctctgttgcacaggctggagtgcagtctcaggtgattctcctgcctcagcctcctgaatagctgggattacaggcatgagccaccgcacctggcctaacttttttgttttttttcgaggctaaaccaaagatactaaaatgagtataaaccagatgtgtaaattatatgccccagtcaagaagatgggtgacaggttataaagctaatgtatgattttaattcctgaaattcacactaaatctatgccaaatttgtttctatatataattccttctgggatctagaacgaaatcctttcctttctactattaaaaaaaaatgtgggcttggcatggtggctcacgcctgtaatcccagtactttgggaggccgagtgggtggatcacctgaggtcaggagttcaagaccagtctgactaatgtggtgaaactctgtctctactaaaaatacaaaaattagccgggcgtggtggcacacgcatgtaattgcagctactcgggaggctgaggcaggagrgtcgcctgaacctgggaggtggaggttgcaatgagccgagatcacacaattgtattccagcctgggcaacaagcgtgaaactccacctggggggaggtgagggggtggagggaatttgtgttgggggaaaactcatgtttaatttatctttgtttgtgttcttgtatcactatatactctttcttacaacaataagggaggtggggtggaggaagccttgtaggtagggggagcagcatgaccagaggcaaggagtgagtaacgaataaggtgaatgcagagaatgttgaagacatcaacctgactgaggcagagagcttgtgaaacgagactgaaatgggtgtgatagggctccttgataaggagtttgactgttgtgcttaaatcgtttatagataggtagatattctattgttgttttcataaacaatgttttcattgtctcaatgaacatagttgatttttaaatttatgctttcaaaattaatgtattaaaattttggagattatatgatttcagaaactgaacattactcatttggtgaagctgataaatatttgaggacctgcagtgtgctgagacctctcataggagctggggttacagtggtgaacaaaagatgtttcttaggaaggcccaagccctgctgatcagcgctcatgcccccttcaccttacttctctacatagaaccttcagtgactggcttcccttttcccatcctgctttcgtgccttatttcacctgtacccttcttcccagtattgctatcactctttgaacacatgtttcagatcttgtcatctcatgccctaacaatccccatctccacccagtggcctccctactcctatctctccattatcttcacctttcaagtcatctcagccttttccggggttcttccttatttttaaggcattgatttttcataaccatttgcttacccttcacaktttagtttttcttactgtcttgcatcttctttgtcttcatatatgtgtcttgcccctttctcaccagtcttcttgatagcaagagctatgtcttatactgttttgtgccttccttagtacctactgctagtgctgattttatttttatacatgtattatctgcttttgatataaaagttgtatttatacgagggcatagatttattgttttcaaatgttcyttgtgtcttctgagaaatatacaattacagtgccccccyacccccaacctgaaaccatgatattggtataacatggtcaaatggatatgtccattgtgggtttcttaatcttaggacwtctgatattttttccaggtgggcataccactgagatcctgaggctgcttgggagcttgtccaatgcctactcacctagacattatgtcattgctgacactgatgaaatgagtgccaataaaataaattcttttgaactagatcgagctgatagagaccctagtaacatggtaagtgacaatttctatttctaagaaaattacaagttgcacattgagtttaattgtctctagtaataatctcatggcacttcagtgccctacccacaatgggcagtcaaatgtttgctggtgatgaaatacatttcctttgctaccaaaagatatgaatttctataaaataaatcttcaaattaaaaaatggttgcttagcacatcaaaaagtttatccaccatgatcaagttggcttcatacccgggatgcaaggttgattcaacatacgcaaatcaataaatgtaattcatcacataaacagaactaaagacaaaaacgacgtaattatctcaatagacacagaaaaggcctttgataaaattcaacatcctttcgtgttaaaaactgtcaataatctaggtattgaaggaacatacctcaaaataataagagccatatatgacaaacccagagccaatatcatactgaatggacaaaagctggaagcattccccttgaaaattagcacgagacaaagatgccctctctcaccactcctattcaacatagtattggaagttctggccagggcaatcaggaaagagaaagaaatgaagtgtattcagatagggagagaggaagtcaaattatccttgcttgcagatgacatgatcctatatctagaaaatcccattgtctcagcccaaaaacttcttaagctgataagcaactttagccaagtctcaggaaacaaaatcaatgtgcagaatcactagcattcctatacaccaacaacaggcaagccgaaacccaaatcatgaatgaactcccattcacaatcactgcaaaaagaataaaatacctaggaatatagctaacaagggaagtgaaggacctcttcaaggagagctacaaaccactgctcagtgaaatcagagaggacacaaacaaatggaaatacattccatgctcatggataggaagaatcaatattgtgaaatggctatactgcccaaagtaatttatagattcaatgctattcccattaaaccaccatttacattcttcacagaattataagaaactattttaaaattcatatggaaccaaaaaggagcccaaatagccaagacaatcctaagcaaaaagaacaaagctggaggcatcatgctacctgacttcaaactatactacaaggctacagtaaccaaaacagcgtgatacttgtacaaaaacagatacagaccaatggaacagaatagagaactcagaaataagaccacacatttacaaccatctgatctacaaacctgacaaaaacgaacaatggggaaagaattttctattttgcaaggagttgaactggctagccatatgcagaaaattgaagctggattccttccttacactttatacagaaactaactcaaggtggattaaagacataaatgtaaaacccaaaattataaaaaccctagaagaaaatctaagcagtagtattcaggacaccagcatgggcaaagattttatgatgaaaatgccaaaagcaattgcaacaaaagtaaaaattgaaaaatgtgatctaattaaactaaagagcttgtgcacagcaaaagaaactcatcagagtgaacagacaacctacaggattggagaaaatttttgcaatatgtccatctgacaaaggtctaatatacagagtctacaaggaacttaaacaaatttacaagaaaaaaactgttattaaaaagtgggcaaaggacatgaacagacacttctcaaaagaagacattcatgcagccaacaaacatatgaaagaaagctcaacatcactgattattagagaaacgcaaatcaaaaccacaatgagataccatctcacaccactcagaatggcgattattaaaaagtccagaaacaacagatgttggtgaggttgtggagaaaaaggaatgcttttacagtattggtgggaatgtaaattagttcaaccattgtggaagatagtgtggcgattcctcagaaatctagaggcagaaataccacttgacctagcaatcccattgctgggtatatacccaaaggaatgtaaatcattctgttgtaaagatacatgcacacatatgttcactgcagcactattcacratagcaaagacatggaatcaacccaaatgcccatcaatgatagaatggataaagaaaatgtggtacatatacactatgaaatactatgcagcaataaaaaggaacaagatcatgtcctttgcagggatatggatggagccagaagccgttatcctcagcaaactaatgcaggaacagaaaactaaatactacacgttttcacttataagtaggagctgaacaatgagaatacatgggtacatatgggggaacmacacacattggggcctgttgaagggaggggttgggggaggtagagcatcaggaagaatagttagtggatgctggacttaatacctaggtaatggattaatttgtgcagcaaaccaccatggcacacgtttacctgtgtaataaacctgcacatcctgcacacataccctggaacttaaaagttgaaggaaaaaaaatggttgcttaattttttgcatattttttattcttttaaatagagaaagcagtttttcgttgaattccaatagtgaaaattattttatttttacttacatacacgaagcatcctgttcatgtgcttattggctcttcattaaagctctctatcaatgtgttacgtttattgataatttgatttatctatgactgctgtttcttctccaaatcatacttgtgtctgcctttgaaattattagtacttctttacccctggttgctcacttcattatagcrttttagtcagtgtttagagatttttttttttaagtgaaactacttcttaattaaggaaggaaactagagctgttccttatgtagagtgagtgcctttatccatccctctctctgggaacggcccagctgcagggctgctctggatagttcaggggtggacagctggcctaactcagaccaatcgaagtctttctctgagctttctgggcttggagacctagagaatggaatcagtctgtcttcaggcaagctctgtaaatgataaagcttgaaagctgctgacagtcatgttttcacttagaagataaaggtagtctatagatagaagaatgaagataatgtacaggaagagaggagaagccagtgtctggtgctgccttcagtggctcaagaggccctgctatagctgtgttggtcctggattggtggttcttttcttgggaaatcaggacccactcctagaaccctaccccactccctttgttcccacctttgtgacatacgcacactctctctctctctctctctcaaggctgtttgtgttaacttttggtcatttgtaaaccttatccccaactaacatactactaaaatgtattctcaaraaatccacgtcaaacaagattggtatataaatctgcttgctatcattcagctatagcaaaatgtgtggtactttttttcctctgtggaaaataagccaaagtgatttcgtttttgttttaggaatcaatactgtattagtttcttagggttgctgtaacaaaactgggtttttgccacccataaactgggtggcttaaaataacagaaatgtattttctcatagctctgaagggtagaagtctgaaatcaaggtgtcatggggccatactccctccggaggttctgaagaagaatccctccttgcttcctcctggcttctagtggtggccagcaatgcttggccttccttagcttgcagctacgtcactctaatctcggcttccaccatcatatgaccttttctgtatctctgtcttcacatgccttttttatgaggataccggttggatttagggcccactctaattcagaaggacctcatcttaacttgatcatatctgcagtgctcttatttctaaataaggtcacattcatagattccaggtggacatgaattttagggggacagtagttatatactgtgcatcacaacacttagaaccaagtaagttgggtttgcttcacattaatagtcttaactataaaaatattttggatttttatttttatttatttgttgtttttttttwaaacagagtctcactttgtcacccaggctggagtgcagtcgtgtgatctcagctcactgtagtctccacctcccaggttcaagcgattctcctgcctcagcctcctgagtagctgggagtacaggtgcctactatcatgtctggctatttttttttttttttaatagagacagggtttcaccatgttggccaggatggtctcgatctcctgacctcgtgatctgcccacctcagccttccaaagtgctgggattacaggcgtgagccactgtgcccagccagattttggatttttatagtgccattattttgtattttcgaagtgcaatgtaggactaagcatctctgttcaacttccttttactaacagtcgcctactggggcaatgcagccactgttagagagaaaattctgctccattcctaaaagagcctctactcatgaatctgaagctgggaagagctctgcagagatgcaaatgagctgttgagggagatagcgtgaacatttctgctggccaccactgggtaccaccacgtgtgtgtgtgtgtgtgtgtgtgtgtgtgtgtgtgtgtgtgtgtgtgtttgtgtgtgtatgtataggagggtggtgaaggacagaaagacaaagaggcagagacagacaccttcctgccaagccttactaaggttggggggtttccctactgatctttttctacgcttcagctcagccatcttttgtaccttccatggagctcaccagactaggaaaaggtggggtcttgctgaagaaatcaatagtgatcaatacatttgctggaagaacccatattagccaagtataattaacaatctagacctgcactgtccagtatagtagccactagccatatgtggctacgtgtatttcaatttaaattaattaaaactaagtaaaatttaaaatttggtccctcggttgcactagcctcatttctaatgcttagtagccacatgtggctagtagctaccattttggatcatatagaatagaacatttttatcattgcagaaagttctatcagatgacactaatctagactttcatttataataagctgaaaatgaaatatgattagatattgtgaagataattaacggattcaaaacaaagggcccctcccaaaagttaacatagaaacaaaataactttttagctcctgggtgatcacaagaaacttaaaaagaggaagaaaaaaagaaaataactttttaaatttcatattatcattgaaattcaaggagatattccaaataaacaagaataatatgtttttttttttttttttttttttgagacagagtctcaccctgtcacccaggctagagtgcaatgatgtgatctcagctcactgcaacctccaacgcccagggttcaaatgattctcctgcctcagcccccctagtagtttggattacaggtgcccgccaccacgcccaactaatttttgtatttttagtagagacggggtttccccatgttagccaggctggtctcgaactcctgacctcgtcatccgcttgcctcagcctcttaaagcgctgagattacaggcgtcagccactgtgcccagccaagaataatctctttaataagggaagcaatgttaaaacaagaaagattccttggaaattaaaacaaagtgcttatcaaaattaaaagttctgagtcagtaattatcaggctaaatatagccgaaaaccttatttgtgaattgaaagtcaggctaaaggaattctccaggmaataaggcaaatatgagggaaaagaatcatgaaatgtcaagaatgagaggaaaaaaaataaaattttaaaaactgtagagtagattttcattagctttctcctagctcaagtatcactttttaattaaatctcatcataacatcaacagttatatactcttaactcaccgctgtttcttgtataccatgtcttcttctgatttcattttgttttctatttggctcaagtgtttccttcagtatttttttttttttgagaaaggttatatggacggtatatttccagagtcttttcagctctgaaagtatcttttttttttttttttttttaagaatgaatctcactctgttgtccaggctggagtgcagtggtgctatctcggctcactacaacctccacttcctgggttcaagtgagtctcctgactcagcctcccaagtagtcgggattacaggcatgtgccacggcgcccagctaatttttttggtattattagtaaagatggggttttgccatgttggccaggctggtctcaaacttctgacctcaagtgatcccacctcctcagcctcccaaaatgctgggattacaagcatgagccactacgcccggctatcatctctgaaaatatctttttttttttttttttttttttttttttcagatggagtctcgctttgttgccaggctagagtgcagtggcgtgatcttggctcatggcaacttccgattccctggttcaagcaattctcctgcctcagcctcccaagtagctgggattacaggcatgtgccaccatgcccagctaatttttgtatttttagtagaggcgggttttcaccatgttggccaggatggtctcgatctcctgacctcatgatccgcccacctcagcctcccaaagtgctgggattacaggggtgatcccaccatgcccggcctgaagatacctttgttgtgacataatatccctacagttgtttggcttgatgtacaatactaattgtaatgccataattttttcctctcagagtgtgtaaatactattccattctcttccagcagtcagagttccagaaaagatgtttgatcctagtttgattctctttccttagaattctgaaatttaatcagtccatgtctacatgtctgttttcttattaattctttcttgaattcagtggactcttacgatctttcttcaatttaggaccattttcttctcttttttctacttgtctattctgtaaactaatcctttttcatattatatataggtcatatgtatatatctacatacacacacacacacacacacacacacacagatggtcatctaaggagaaatgaccatctgtgtgtgtgtgcgcgtgtgcatgtattttcacgaccttgcacggatgccaaaatccgcagatgctcaagtcccttttataagatgacgtagtatttgcacattgctcatcctcccatatactttaaataaccttcagattatttataatacctaatacagtgtaaatactatgtaaatagttgttatactgtattatttaggaaataatgacaaggggaaaaaggcctgtacatgtccagtacagatacagttatccatttttttccccaaatattttcgatccatggttgattgaatccacagatgcagaacccatagatctggaggactaactgtgtgtgcatgtgcatatatatatttcttggaaggttacattgacaatatatttccatatccatataacagagttgtgtgtgtgtatgtgtatgtatatatatatttatttatatatatataaaacggtatacattttcttcctgcttatcctttcactgttttatatgaagagaagttttagatttttttttttttttttttgagccagaatctcgctctgttgcccaggctggagtgcagtggcctgatctcagctcactgcaacctccacctcctgggttcaagcaattctccagccttagcctcctagtagctgggactacaggtgtgcaccaccatgcccagctaatttttgtatttttagtagagacagggtttcactatgttggccaggctggtctcgaactcctgaccacgtgatccgcccgccttggcctcccaaagtgctgggattacaggcgtgagccaccacgcccagccagaagttttagattttaatgtttatattttcctttaggaatccaaatttatattttcccttaggacttaaaggtcatagagttatactcaagtgttattttctagaagttttaatatttttcttttctttttttgagacagtgtctcactctcacccaggctggagtgcagtggcgtgatcacagctcactgcagcctcgatcttcccagctgaggcaatcctcccacctcagccttccaagtcactgggactatgggagcgcaccaccacacctggctaatttttgtattttttgtagagacagaatttctccatgttgcccaggctggtctcgaactcctggactcaagcagtctgcccaccttggcctcccaaagtgctagaattataaacatgagccaccgtgcctggccacattttgcttttcacacttgtctttaattcatctggaattgatttctttctgtataatgtttgaaagagatctaatttccatatggcaaaataggggcccagcccagcaccatttattcagcagtccatttctgcagtgccaccactgatacgtgaagtttttgtgtatgtataggtctgtatcttagctctctattctttttttttctgcttctaatatatagctgttcagcctagctctctattctgttaactggtttgtttgtctatccctcacccagtaccaaactcccttagctttatccttcagaagtttttttttgtttttgtttttgttttgtttttttttttttgagacagagtctcactctgtagcccaggctggagtgcagtggtgcatctccgctcactgcaagctctgcctcctgggttcatgccattctcctgcctcagcctcccaagtagctgggactacaggcacccgccaccacgcctggctaattttttttttttttttttttttttttttttttagtagagacgggatttcaccatgttaaccaggatggtctcaatctgctgacctcgtgatccgcccgcctgggcctcccacagtgctgggattacaggtgtgagccaccacacccggccgaggtgttttaatttttctttctttcttacataggtttttaaattagttttgacaagttcacaaaagaatcttgttgatatctttatttgcattaaattgaatatatcagtttggggagaacttatatctatatgatgatgtcttcctatccagaaacttcatctctctctctcttcattgtttagatctccttaatgcttttcagtaacatttctaattgtctttataagagtcttgcatatctttggtgtgtttatttctaagtgtcttgtattgtttttttactcttggaagtaatatatcttttagtgacattttccgtgttggtggtatgtagagatacacttgatttttgtatagtaatcttagaagatctacttactagattctaattaaagctgataatttactatgaatctttgttatctgtgaagataatctaatcatctgcaaatagtggtagttctaattctttctaatccttacaccttttgtttttctcattttattttgtcagaacttccagaacagcaacaaatagagaataatgtagtggacatccttgtattctttctgattttaaaaatgtgccaagagttttaccttaaatcatacttggttgttgatttttatcaaatgtcttttctgcatgtgagataatatggttgttcccattttatttgtttatatggccaagtacgtggtatgaactattcttgaattcctggaataaactcagtttgtttatggtgtgttatattttaatacattgctagatttggtttgcaaacatattgttttggatttttaaatgtatgttcatgtgtgagattgtacttttcctttctcatgcttttctttggtattggtatcaaggttacagtactctcatcaaatgagctgtggagtatagacaactttttattctcaggaggaatttgtgtaagcacggaattggttatttttaagttttgcagaacttgtctaagacaaaaccacctgggcctgatgtgttctttttgtaatggttataggactcttcaagatttgtgtttctttttaaatcagtgttgttaggacatttttctaggaatgtgtccattttatgtaaatttgctaatgtattgacataaawattttcataattgtattagtcatttttgcattgctataaagaaatacccaagaccgggtaatttaaaaagaagagaggtttaattggctcacagttctgcaagctatacaagaagcatagcagcttttgcttctggggaggcctcaggaagcttacaatcatggcagaaggcaaaggaggagccagcacttcacatgggcagagcaggaggaaggggtggagggaagtgctacatacttttaaacaaacagatcccgtgagaactcactcactatactgtaccaaggagatcatgaccaaccattcatgagaactctacccccatgatccagtcatctcccaccaggcccctccttcaacactgaggattacaattcgacatgagatttggtggggacacagatctaaaccctatcaataatattctcttgttaatattgtaatttgtgctgtagctgtagtttgtgccctcttccagtcctaattttgcttgtttgaagccagacatttgtcaattttaatattcatttttttgttgtttgaggcaaggttggatgtgttgtctgtaagtaacatgtagctggactttttgtaaaactctaatctgacattgtgagcagagaatgtgttcttgtaaaagaagttccttggtatttgttgagacttactttgtagcctagtatgtttgagtttgagtacattttctgtgcttaaaaagaaattatattccccattgtttgttgcagagttctgtgtatgtccataatgtttactgcattgttcaagtcatcttctatatctttataaattgttttgacttcttgatctattcagtaagagagaggcatgggctgagtgctgtggctcatacctataatcctaacgctgtgggaggccaaggcaggaggattgcttgaacccaggagtttgaggttacagtgagctatgatcatgccactgcactcaagcctgggtgacagagtgagactccatctctaaaaacaaacaaacaaaaaaaacaaaaatcccaaaaaacagagacaggtatgtaaaaattgtgattgtgaattggtcttttttctttgtatttgttagctttctgtacatatttttgcattctagttcaaatttgattctacgtagtgaattatttttaatcattatgaagctcaaatttgattctacatagtgaattatttttaatcattatgaagctcaaatttgattctatgtagtgaattatttttaatcatttatgaagtgacccattttatccctaataatgctttttttaaaaaaaaatctattttatctaacattaacatagaaataccagcttccttttggttagtgtttgcatggtatgtattttcccacctctttattttcacttttttgtgtgtgttattgcattttttatgtgtcttttataaatgacatatagcagaattttaaaaattcagaactgggaattgtcttctaactagcatgtttggtacatatacatttgttgtgattactgatgcgttagatttctttctcctattttattttgtcctttttacttagacctttttcttggaatctttttgtttttcctccttgggctgctttctgtttgtgttaatgaagatgtctttattccccgcttctcctttcatttggaaatggaaattatactattctcttagacattactctttttttttttttttttcgagatgcagtcttgctctggtgcccaagcaggagtgcagtggtgcgatcttgtctcagtacaacctgtgtctcccgggttcagctgattctcctgcttcagcctctgagtagctgagattacaggcacgtgccaccacacctgagtcatttttgtatatttagtagagacagggtctcaacatgttgcccaggctggtctcgaactcctgacctcaaatgatccacctgcctcggcctcccaaagtggtgggattacaggtgtgagccactgcgcctggccccttacacattattcgtaaattgttaacatgagtaactagttaaaggaaaaaatataatatctccatcctcctcctgaaaaacaaaccttttatttttattttatttttttctcattcttgctgtcatcttaaacaaggtgttgagaatgttttaactgtgagcactccttctcctcttacatattattgtgtagtattttggttctaatttgtgtttataccacctaaattagttatcattattattgctttatacagttgtgcttatttagatgtatatttatatggcattttctttcttacccttgcttcttgtatcctacttgtttttttggattcagtgtgtttctttcagaggtatgtatttcattcgttccttcatggaagttctgcaagtgatgacttttcatgtttttgtttgtttacctgaaaatatgtcttggttttgtccttcctttgattagaattctagttttccttcatgacaaagtttagcattcacaaacttatttaacaaatatttattgaatacctactaagtgttaggaatacagtagtaaataaaacagaaaaatctctgcccttatggagkctacattctagtggcgggataataaaccagataattaggtaaaatttataatgcgttagtgaaaacttgttaagaagaggaataaagcaaggcaagggaataggaagattcagagggttaaaggggggttgtaattttaggtagtgaccaggaaaggtgtgtttagatgaagacctgaaggaggtgagatgttaagccatctggggaaagagaattctgggagaggaagcagtaactgcaaagaaggccctgaggtggggccgtgcctggcatgtttgtaaaatagcgagagtccatgtagccaaagcgaaggaagcaggcgagtaggatctgaggtcatagaggttaaggtaaggatgttaggcttaggtcttttaagaccttgttgttcatttgttggcttggatggctttttccagtgagtgaaatggggagccattgggaggctttaggtagaggagggacatgatctgacagaatcactttagtcgctgactaaactgaaggggagaagggcaaaagcagggagaggggtttagaggctattgcagtgctccaaatgagagatcagcatggcttagactgggagtggatgcgggagaaggaagtcagattctcaatatattttgaagtcagagctgataggatttactggcagataagatgtagggtgtgagagaatgaggaggagtggaagatggcacccaggtttttggcctgagccactggaagaatggagttgccacttacacagagaaggttagaggggtcatcaggaggggtaattgtgggttatctgtaaacatacgagagaagatgtagataatacaatgggatctatgagtctgaggttcagaagggaagtctggtctataatatagattttggagtcttctgtgtataggtgatggtaggtaaaacaagaaactagataagattacccagggagtaggccaggcacagtggctgatgcctgtaatctcaactactaaggaggctgaggcaggagaattgcttgaacccaggaggcggaggttgcaggaagtggagatcacaccactgcacttcagcctgggtgacacagtgagaccccgtctccaaaaaaaaaaaaaaaaaaaattacccagggattgattgatagaaaatagaagaagactaacaactgggccttagggccttctattaataaatttcagatataggggagctgttattgtcttggaaatatcagctatcaatttgttttttgtaggcttttctcctccccatcctttagaggccctgaaatcccagcccttaggtgtctggaataattatgtcatcctcctcaaaccttcatgtcacaggctgcctgttcccttttcattttcttcttgtttgtggcaattagggacttccgtttccttcttcctggttcagattaaattgtatttttgttatatttctgacagcatttaaaactgtttatagaaggagggttataaagctagtttatattgctattctatcagaaccaaagtcaaattcattttctaatgaaagtcagagttttgaggtactcttggtgtggatgcctattctgcaccatttgtgtaaatagcacccctctctcccccaattttcctcactttttaaataatgcactataattgtgtaagttgcaatttcctggctatagaaaacactcctgtggttacaggccttgaactatctctctataatttaatttttttcggacttcttaagtgaaccagaaaatctggatcattttaaagcattaatagtaactgcactttgtgctttggcagaagatctcatccatatcgctcggaacgcttcaggaataaaagggcatcgattcacacttggttctggtgagaagccaaaatccacattttcamcacaggcttgctcctccaaaaacacagagagcttcccagaaatcagaagatacaaattagaaatgttaatcacttatagttatataagtaacaggaaatttctgtcatttggttaataacttattctgatatggaattatccaataaatttctaaatgtttttgctagtttgtagaaaaaaattttatttttattttattttatttttttgggacgggatctctctttgtcacccaggctggagtgcagtggctyaatcatgkctcactgcagcctccacctcctgggttcaagtgatcctcctgtctcagscccccaagtagctgggactatagacgtgcaccaccacactgggctaatttttgatattttgtagtaacagggtctcattatgttgcccaggctggtctcaaactcttgagctcaaatgatctgcctgcttcagcttcccaaaagtgctggaattacaggcatgagcctgtattttttaccttgcccttattttttgcctgrcccttattttttattttttaataatttttttttgaggcagggtctcactctgtcacccagattggagtgcagtggtgcgatctcgactcactgcaacctctggctcctaagctcaagcaattctcccacctcagtctcctgagtagctgggactacaggtgcacaccactcacaccaggctaatttcttgtatttttggtagagacggggttttgccatgtggcccagactggtcgcgaactcctgaactcaagcaatctgcccattttcacctcccaacgtgctgggattacaggtgtgagccactgtgcttgcccccatattttttaaatgtttatttatttatctttttgtaattataacctttcatagccctcatgcaagaaaaaaattaatgttggtatttacctatttatgctagatattaatatacagcagattttaagctaaattttaaactagtataattttattaattgaatgttagaggtggcctgcatttcttgcacaaattcttcattcaaatttcttctgattcttctgaatcagtgtatattttaatggtgtataatattttaggtgcctaattcaccttatttataattacacaagagtaaaggcaaataatactcctggtttaataactttttaactctactcttcagcctgtctttctctgagtagtttaagtagctttttaataagaaacaggcttccttgactaacaactgaaattagaaaggcaaagagtggagagctaagaaaaaaaaaaaggatatttgactgtgaaattacttatatgaaaaaaaaataccttgaaaagcctaccaaagaaaaagtaatttccactgggattagttctaaagtaaagagtagtaaagtaataccttccagcaaaaattggagagtaacctttccaaatagagccaattaccagagccctatgaaggtaaatgaaaactcaaatcagaacgttcttcctggagagcaataggccatgtttcagcagggacatccacccctccaaggcgtggaaggaaatgaggctcagggcattgcagtgtggattttggttcattcttttatttgcttctgaatctgagccttgtttcttaactgcctcccttggcaaccaactattactccttgtaacttctgttacagcatgagttggccccttttcacattactgaagaaaaaagctcggtgacatatgaataaaacattttttaacctgcatttaaaaaaatatagagtttttcatatataaaacaacaatagaagttgctgaaaactgatttgaagggttaaaagtcagagccaactttcaggccacttaattagatttcccactactctgtaagtaggcttatgttttcccaataaacattatttatttgctaattcaatcaaaaaatacaaaatgagtgctgattctatacaagacactgtgtttagtggaaatttcagcaaatctttattgaatatgccccataattaactgtggcaggactatgagtggttatttttctgttgctttgctcttttctgttcattccaaattttatttattgtttatgttttctcttaaagagtcaggatcttgctgtgttgcccaggcaggaatatagtggtatgatcatagctcactgcaacctcgaactcctgggctcaagtgattctcctgcctcagcttcccaagtagctagaactataggaatgcaccaccacacctggcttttttattttttgtagagatggggtcttgctatgttgcccaggctggtcttgaactcctggtctcaagcaattctcctacctgagcttcccgaagctctgggattacaggcgtgactcaccatgcctggcctgttggtttcttaattttaaaactttggacaatacagaaatatgcaaaaaaacaggccaggcactgtggctcacacctstaatcccagcactttgggaggccaaggcgggcagatcagctgaggtcaggagttcaaaaccagcctggccaacatggtgaaaccccgtgtctaccaaaaatacaaaaattagctgggcgtggtggtgggcgcctgtaatcccagttacttgggaggctgaggccaggagaatcacttgaaccaggaggcagaggttgcagtgagccgagatcacgccactgcactccaacctgggtgacaagagcgaaactccatctaaaaaaaaataaataaatatacaaagtaaacagtgaaagtttcctgtcactatcccagttccactctctagaagtaaccactgtaccagtttgagttatatcctgccagtgctttttttccccttctgttacatgtatacatataacaaagtatgaattatatatacacacatacatataaccctagagacagtgttgggtgttttttggaaggagcaggttatggctagtttataaatcacatcctatatattgtctgcaacttttaaaaaaaatttaattctgtaccttgataactttccatgttggttcatacaggcatgtcgttatgttatgttatgttatgttatgttatgttatgttatgttatgttatgttatgttatgtttttttgtgagacagggtttcactctgtcgcccaggctggagtgcagtgcagcaatctcaggttgcccaggctggtctcgaacttctgggctcaagctatccacccacctcagcctcccaaagtgttgagattacaggcgtaagccactgcgcctagactgctttttactttaaaatgattgtaaactatagtattgttataccatttcctatcattttcagtttttcactaaatgctgtagtattattttattctgtaagttattttaaaaagtacattttatacacattctgcaagcacttttataactttccaattttactgcaataaatatgggaaataaagaagcccaaattaaataacttgctgacattaaagggcttgtcaacccttgcccactctagcattctgctagatcagcagtcctcaacctttttggcaccagggaccaggttcatggaagacggtttttccacagatggtggaggatggtttcaggatgaaactgtttcacctcagatcatcaggcgttagttagattctcttaaggagtgcacagcctagatcccttgcatgcacagttcacaatagggttcgcacttctaagagaatctgatgctgctgctgatctgataggaggcagagctcaggtggtaatgctggctcacctgccactcacctgctgccgtgcagcccggttcctaacaggccacagactgctactgattcacagcctgatggttggagactcctgtgctagattgttgattgaattcctattctgaagtacacctagaagttaggagtataaatatatggtgtagaaaccagtgtaatagatattccaaactatttttgttgtggccactatgccctctattcatatttttcaataatttactcaagccagcaatactgagtatactgagtatatactaatagaattagtataataatataatactaattagtataataatataatactaattctattagtatactattctattagtatactaattattagtataccattctattagtatattaattctattactatgccattctattagtatactaattctattagtataccattctattagtatattaattctattagtatgccattctattagtatactaattctattagtataccattctattagtatatagtatgctaattctattagtatatagtatgctaattctattagtatatagtatgctaattctattagtatatagtatgctaattctattagtataccattctgttagtatactattatactaattctattaatatactaatacagtatgctaatactatacaattagtatactaatacaatgtatacattgcagtacatttgcaatgtatatgcaaactctacacatactactgatttggactctagtcttctttaaatcacattgatatccctggctgtccacatttagcttcctaaaacactgctttgcacaaataacctattattccaacattgtcaatggtttccttaaaatgaaaaagtatacttggagccaaaagccaatgtccattacattctttctctctaaaatcagaaccaaaagaagagtatctgccattagtcatactgtgttttgttttggccctccacctaagtcgaaataagaggtataaacattgaaaaagaagaaataaagtaatatatgctataaataattatatctagaaacaaaatcaacaaaagactatcaagtaatacaagttcagaaaagtatcagattcaagccaaatatgcaaaactcaatcacttccttatatgctagctttaactgttagaaaaataatgaagaaagagacctaaaatattaaacactgggaaaggagcttgaataaaaggaaatgatcaatatgggcccaatagtgaaatcttattgagacattaaatatggtaaaaataaatacagaagcatgttcctgatgtttaaaaacttaacaaagattttcagttttcccaaatttataatgcagtaggtgtcagaatcctaatgctttttttaaaaaaaaaatactttgtttattcagcaataaatatttgctttccatttgccaggcaatattatagatagttgggatacacaagtgaacaaaaaacacaaaaaaatgtctgccatcatggagctcactccacttgacctggatgagaagacagtaataccagacatagtgaagaagaaaatagtaaagtctgttagaaggtgatcagtgctgtgggggcagattgcacagggatggggaactgggaattttgatggggtggaaaagttgtgattgctcttaggaccttgaaggcgatggggactcctgagagaagagtgtttcaagcagagggaaaagtctctggaaaagccatagagaggaatattcctggatgttggtgcaatagcaggtaatcctggtccctggaggagagtgagtggaaggagagacactgaagaggagatgggaggagtgggcaaagaccagataatttaggaccttgtaagcccttttaaaaacttcctctcttaatctgaggaaaatagagacctgttggaaagttttgcttggaggagtgacacaatcatactgttttacacaggtcactcgtgtggctgtgttacaaatacaccaaaagcaaaaccaaggaaatcagttaggaggttgttgcagaaatcccagcaagarataatgtggcttgcatcaggagggccaggagtaagggaaaatagttggattctggatgtttttgaaagtggagttaacagaatttcatggcagaaaacagaggaatcaaacatgactacaaagctgttctgagcaattgtaagaatgggattgccatcaccaaccctgggatgtctgaaaggggagcatcccgatctccaagggtctttaaagtgttgcctagaggaacctggaaactccctgggatttagagggacttcccagaaccactttgcacagattcaaaaccgtttcctaaactctacacacttgtgcactctctctccctccttccctgtctcccttcctccctcattcccttctccctctcccctccttctctctcttcttcctctcctctctcttcaaccctctctttctctctcctctctccccctcctcgctccttctcctttccttctacttcttttccttctcctctctaccttcctctttcctctccttcccctaaaaggtccttgaagcttcagaaatggaccaggcgggcccctccaagtgttgaaggacttatattttctttcctctgcaatgtcactccctcatcctgccaccaggtggcagtgcactgctgatcatttagccgctgacctgcactagttctcagtagaggcggtagagagctgaacatagagcctgcagtcggccttttaatgcctcattctttaatgtgaagtagggcttctcatcctcgtcactattgacattttgggacagacaaatcttcattgtaggggaatgtcctgtgtgttacaggatgttagcagcatccctggcctttatccaccagatgccaagagtgctcccccaacccccaccaccagttatggcaacccaaaatgtctccagaccttataacgtgtgtatggggggcctcccctcccatcgcccttgagaatcagtagttgaatcaacatctacagaatatcagacatttgaggaaagcctctaaagagaaaactaacgaaaggaactagagaaaagggcatttcagtggcagtggggagtttaaacgaaaacaattatgttcgaagaaatgagagggcattatttcattaaaacaagaatgagacctattttttaaaaaactaagaacaaaaaaaaccccttggctattaaaattttgatttcagcaataaaaattcaatgaaagattggaagatcacattgaagaactcaagaaaaagattaaaagcataaggaaaacgtaaaaaacagtagagaaaggcaagaaaattagacaaccaaactggatgttgcaagtccattattcagaaggaacaaggaaatgggaaaagttcaaaatgaaacaaaattatgacccagggaaatttccaaaacagaaggacccgacttttaaaataaaaggactatcctgagtccagtgaaagtgtagtcacaagacacgtcatgtacagtttcagaactaacgatgaagagaagatactaaaaacttccagaaagaacaagaaaaggaatcacatttgaggtttcagaagtacagtggagcagtgtctcaaatggattcctcatgtaccctcccacagagggtgtgccccaccaaaacaaggggcacccaaaagggagactcagttccagggatctgggcctcagtccaggagagaagggaagggaattctcaggacagcagtgaagggagttccagtgtgaagacttcataggtggtcctagagaacaaacagttgggaacagagcaaagtgacagagaactccagaagacatggtgccaagaaagtaacaggaatgataaataacgcgaagagtctgacgaaactgagaagaccagaagaactttcaaactgtgtgtakgtgtgtgtgtgtgtgtgtgtatgtttaaatcaaagataagcaaaggacaatgagtgctttgaatgcagaggagggagagatctctgtgagatagagtgttggggtgggggcttcttcaaaagagtagggagatattggttgatttttggttttgtctttgaatatttttctgtattttctaaagttacaattagaaaacagctattttttagaaacaaaactaagaagagatacaagccccagtgggagtaaaaacctactaatatgaaatatttatttttttataaatatctaaataaatattttctacagaaataatccaaacacataccacaagcaccaatattttgaggctcatatccttttattttggaagtacaaaagttttgctgctagtgtaataaatagggattcttttggtttgcattctttttttggttttgcattttctgtttatataagaatcagtggcagtttggtggttgcaggatttatcaaccagctcttctaaaattaacatgacattcttccactgaacaccacctactgttttccacaaggtggggtgctaacttcgcacagtggactgagactgtgtacagcttgctgagatgtctacattgagtgtatttgttgttactttccacagttcctaagcagttcttttttccctttctttttttttctttctttctttttttttttttttaaagagacggggtctcactgtctgcccaggctggggtgcagtggtgcaatcatagctcactgcatctttgaattcctgggctcaagcagtcctgcctcagcctcccaagtaactggaactacaggtaaggcccatcacacccagctaattttttaatttttgtttttgtaaagatggggtcttgctgtgttgcctacgctagtctccttctgccttggcctcccaatcagttctgaaagaaatgtttgtaactgtatagtttaaactgtggggttttatttaagtttgtcaactgtaatgtatattacaactggtggcttaacatagttatggttttgagtgtgtataatgtatatgtgcacttttcctcattcatatggaccttaacttactgaattataggtaaaggtaaaaaaaaatctctaatttgaaaggaggccggtctaaatgagcaaaatatttgaataagaaaatatttgtaatttactgcaaatagagattctgatgtggccatttcagtgaatagattcttatttttgaaatagtatatcaggtagatatatacatgcttttaaagtattttaaacagcttaatctcttaaattcctccccaaatctcaattattccttcctctatctctagacctaaagccagtcaggttaaactttctttaaatcatgttctgaacagatgaaattaaaatagctgtgaataacatagtgccgttatttcaaccttgtggtaatttaaccaatttcccagtgccagttaaatttgtattgtatgggattcttacaacatgaagagcagtaacattttataatatagtactgttgtttctccatttcaaagcaaatttatggcattctaatcaccaatgtttggttttaaaaacataaatagcacaattwaaaaaaaaatctatacctttgagtacaaacatacaatttattttgtgctgttataaaatcaggacatggcctgttttggaattccctacgtccttccttttgtacaaatggaggctgttagatccttccagcctttaggcccaaggaaataattctggtagttgcagtcacaccacggacagcataattctaagctctgcatgtggccaggctgtgactagagatgtacttacagttttagtcaggtttgaccaagcaggtgagcatggcaaggaagtaaaagggaaacaatgggtgccgagggatactcccttgtccttcaaatacctggtagatgctcactttatggtgcttatgaaatgtcatgaagcaacatatgagtaagggagctgtgggtcctgctaataaccagctctgtcaccttgygtgaatcaacccctctgggccttagtcttctactgtgaaataaggaggcctggctgagattaggaatcttatttatttatttatttatttatttatttatttatttattttgagacagggtctcactctgtcacccaggctggagtgcagtggttcaatcttggctcactacaacctcttcctcccaggcttaagctatccacccacctcaacctccccagtagttgggaccacaggtgcgagccaccacacctggctaatattgtattttttgtagagatagggttttgccgtgttgcccagcctggtcttgaactcctgaggtcaagtgatccgcccacctcggcctcccaaagtgttgagattacaggcgtgagtcactgcacccggcagagatctcacacctggctttcaagtctgacttgtcaacgtcaagcgaggcttctgctccaggctgtgtttctccagggcctgtcagcatcagtccagcatccagattcctgaatattatcttcctagattcccagttgtcttcctccgtccacttgcctgctaggtctacccattgcttcagttatagtacaaactcctgtctgtcccatttcaacctaaaatacctgtgtatgttttctaatattgatatattttatacttaaagagtattttaccaactcaaaattatgctccaaacaagaccacagtgaatcatgatgtgctgtcagcctgtttccrctcttgctatttgctccccaggtcatgacagtaccgttcaccctaggtaaaaacctgagagttatcccaaactctccagcgtcctaaatctcccttctcactgcttgtcatctccattcctctaccttagtgctgctgctggccgtcaggccttcagcatcattcttctgatgtatttcagtgatctccccaatgattgcccttctctggtcgtgccctctccccttctgtccattctcttcataattactagactggtatttcttgaatgcatttctgctcccattattccgctccaactccattttctgttgttccctatgttgcttcttacgtaccaaaatacagttccccagatattccatgctatttcatgtctctcagctctgaacacrctgcttcctctggcaagaagacccttcaccaaccacacccacactattatacttagaaaattttatatcctgcacaagttagatcaggaatctcttcatgaagcctgatttaccttatcaaagaataatgtattggctgrgcgtggtggctcacgcctgtaatcccaacaatttgggaggccaaggtgggaagatcatttgaacccaggaattccagaccagcctgggcaacataggaagaccccgtctttagaaaaagtttttttaaaatcagcaagatgtgatggggcatgcctgtagtcctggctacccagaaggccaaggtgggagaatcgcttgagcccaggaggtcaaggatgcagtgagtcatgatcatgccgctgctctccagcctgggcaagagagggagaccctgtctcaaaaaaaaaaaaaaaaaaaccttatagtttatcactttgttttttttttttttgaggtgaagttttgttcttgttgcccaggctggagtgcagtggtgcaatcttggctcactgcaacctccacctcccagatttaaacaattattttgcctcagcctcccaggtagctgggattacaagtgcccatgaccacacctggctaatttgttttttggggtttttgtttgtttgtttgtttgttgtttttgagatggagtctcactctgtcaccagactagagtgcagtgtcacgatcttggctcactgcaacttcctcctcctgggtttaagcaattctcctgcctcagcctcccaagtagctgggactacaggcacgtgctaccatacccagctaatttttgtatttttagtagagacaaggttttactatgttggccaggatggtctcaaaactcctgacctcaggtgatccaaacacctcggcctcccaaagtgctgggattacaggcattacaggcgtaagccaccgcgcgtggccaattttttgtatttttagtagagacagggtttcaccatgttggccaagcaggtttcaaactcttgaccttcaggcratccacgtatcttggcctcccaaagtgctgggattacaggtgtgaaccaccgcacctggtccagtttattacttcttacttggtgctaacattatatttaataattgtctcatattatagttatccctttgactgcaattatcacttttcctgtgctgtcctgatagactgcagtgagttccttgtgaatgtcttattcacctctgtttccctagcccagttcctgtcacctggcaggtgcttgttgaaagtttaatgaagaaacaagtgaatgaatccatgcttagagagtacagctctgaaattcaatgtcgtaaacaattgtttcatacatgattttaatatatatattttattttaagaaaaggaatgcaattttcttaccattttaaggacaaaggaagggtgcttcaacttcaagtgacataaacctacgcttaaaattggcttgaacaataaagggaatttgtcaacttacaaaacaggaaaaattcagtcttatttctggcgaggcttggtccggttgcccaggcatatccctatagcaagagttgtctctctgctctgtcttctgcagtggcagctccaccgggcttcccacagtgctgcctccagcagctccaagctctctcattagggtaacaaaaacctgtagcacctcctggcctcatgtctcttcctcttcatgaggaagaagaggatctcttacagcatatgggagagagagccccagcaaacatctcctgcctcatggtactccagtggggttatactcccatctttcagctaatcattgtagccaggaatgattcctccatgttgcttcagccattccaggcctactcttagaggcagggttaggggtgaaggggacaggaggcaaataccaccaaaccgtccggctgagaatatgagaggaatgagttacccaaaggaaaattgcgatattgtcaaaagaaggagtcaataaaggctgagagagaataaatgtgcatttataaaaggctttaaaaatcttttgagccagaatcccataattttttcagaaacaaactactttgtttttccctgaagtctcagaccaccaggcaaggagaagcttctggaggtaaagtgaggggtggtttcaggccctggggcagagctggagtgcagcctcatttctctttgacaagccagtcttgagccagctgtgggatcatggtggctagttaaggatccctgatctcagctagccctccttgcttcacagtgggacactgaggtccagagagcttgattcatgcaaagtaagtggttatcagcaggacccatcatgggactgtattagtctgttctcatgctgctataaagaactgcccgagactgggtaatttataaagaaaagaagcttgggccaggcgcggtggctcacgcccttaatcccagcactttgggaggtcgaggtgggcggatcacctgaaatcaggagtttgagaccatcctggccaacatggtgaaaccccgtctctactaaaactacaaaaattagccgggtatggtggcgcatacctgtaatcccarctacttgagaggctgaggctggagaattgcttgaatttgggttgtggaggttgcagtgagccgagatcgcaccactgcaccccaacctgggcaacagagtgagactccatctcaaaaaaaaaaaaaaaaaaaaaaagaggtttaattgactcacagttccacatggctggggaggcctcaggaaacttggaatcatggtggaaggcacctcttcacagggtgacaggagggagaataagtgcccagcaaagggggaagccccttataaaaccatcagaactcatgagaactaacgcactatcacaggggaactgcccccatgattcaattatctccacttggtccttcccatgggggttatgggaactacaattcaagatgagacttgggtggggacacaaccaaactatatcaggggcccacagcaccctcacttatatgacacttcatggcatttcatcagcaccataaagtatctaccaagtacttgaaggacatataaaaaaaaattttgtggtaaattatggtcatcttgatttcataatgattagttgaaccatccaacatacatttaaaaatatacattgcattatttttaaatagttatgaaagaaagctgaaaccatttttggttgaatgaaattttaccattttaactttgtcttgtttccaggacttttcagtcgtgtggcattcactaaataataaaggtattgtatgtttcagtgtgtggtaacagcaaagaatgacttcatcaaccacttgatctcctctgttgtggtttatgatgccatctggattctttggtggaattatttccatctaaatcactataaactcctatttagttttcacaaatctaaagccagatatgtttgtggtttttaacagtgatgtaattctggaacatactttgaaagttacaagttgtcatatactgttagtatttaactcagtgtttcatatactatcagacactagaagcctgaacaaaatccatttctctgttttttcactcttcagcatcctacttttcttgtctctcttgccaccatatatttgattatacatcagtcaagttcatatagggagcgttgggaggccttgtgggcatacagagtactatgggacatggccctgttctacaggaattaggaagctgagatggaaaggttgtttcactgtttcactaaaatatgtyttcttctatacgatagagaataagaaagagtcttacttctttggccaatagtgtgaaagagactggattatattgaagacaggtaaattttgcaggatatacacattgaactacaaagaaagaaagaagagagaaagagacagagaagaaagagagaaaacaaaacaaaacaaaacaaaaacatcctttctaggaacatataacccagctgactgccaggtaggagcaatagcaggacagcagaacttgccataagggccttgaggcctaaagttcaacagaaaagtctcaaaatttctgaggtcctgttgtgttcttattttgatttttcccctaaaaggcttagggaatgtgtcggggtaggtggcgggcggtcactggtaacagtggtaggtgggtttggtaacccaagcctacagtgcaaaacagggcacagagggcaaagagagaggaggaggcagggagcttagttcctgtagaggcagggaaagagacaacaaactctatgggtttgagagtgggtgatttgaaaaatcaaggaagaaaaaggaaatggatcaggatgagtagttggctatacataagagtagcaggaggcagggagtaaacttcgtggttcagctccttatatgttggggaaagcagctcctcagcagtgagacacagagatccaagcaagatctagagaaggaggtgagtcagcagcatatttcagaacacatggaagacctgggttcaggtcctggtgctgtcactttaggraagtccagattcctcatctgcaaagtgagaaagttggaatagtatgtcccttaaaaccctgagatgtcatgaggttaagagccagcatcttccccatcaccatccagcatggactagacttctagaaattataatgatagtcatttgtctgttcagcaagttatttactgagtacccatgatgtgcaaaacatcaggcagtgggatcgtagcagtgagcaagatgaaatccttttctctcatggagcttgcatccctggaagaggggcagactacatacaatcacatatacacataaatgaacaagttaattggaggtaatggtgattgctatgaagatggtaaaacaagacagtgtggtggagagaccacatatttggagaagaactgtctcccctctgagtgggtaatgtttagacaagatctgatgtacaggaaggagctagctgtgagacagtctgggagcaaatcaaacttgttagaatgagcagacaaggccctcaggaaggagtgagtctgacacattcaaagaacagacagaagaccagtgtggctcaagtgaatgaacaaggaggaattagagatgtgagccagcaccagattacatgggaccttgggagcaactgtaaggcatttggacttggtgcagtggaaagcctttgtgggattttaagcaggagaatgaaaggatctgctttacattataaacagatgggtctggcaattctataaagaatagattgtaggggagcaagaggagaagcaaagagactagttaagaggctgttgaagtagtcaaggtgagagatggtaatgacttgaattgtgggagtagccgagacatgtggaataagtggttagctatggaatgtgtataaaagttttgggagaaggaaacatgggggcagcctcctctctcctttcggtccctggcaacctcatagatcttcatatctagaaggaaatctatgatagattttactgttgatttgttgatttctaccttgggaatacagaaggagtagcccattgtggtggaaaatataatagttttaagtcactgtagaaaggcctagtggatagaggaatacaaatatatatatatatttgtgtatatatatatgtgtgtgtgtgtgtatatatatgtatgtgtgtgtgtgtgtgtgtgtrtgtrtatatatatatatatatatgtatgtatgtatgtatgtatgtatttctcagcccccgtaggatggattgagatccagtttagcagcctacagtgtccctcaaaggaagaactactttccttggtctataggaatccaggaaaagactggccctgctagggttatgtggccactcctgaaccaaatggtagttctgggagtgggaggtaggggtggtaaaatgatggagcaggcatcttttatgtcttgcatcccattataggacatgaagctgggtcaggaacagttcccttagagcaaaggtacagactaacaaaaacaacgtctataaagatgccttcatttggatttctccagatatcagaacccctaggtaattcctggccaaaggtcatagcaggcctgaattgtagctgtctgaacctctgtctcattcccttgtcttcaaaggaaactttaagaccagaatataagccttgtattgattatttttcattgacttctttatatagttgattttatttcctaaaactatgtaaaataataaaaactctcttaagattttgccacagcctggctctcagtgtttcctttaaatgacacaggacatcaagtaacccagtacccaatttctgtgtcaagtataggtaatctgagggcactgtccctgtcaggatggcccgggttcccatctacttgactgcctggcagcatagcaggtatcatagaaaaacagtggggcagagagtttttgaagcattgttagatgcagaaggggatgccctgctgctctaattggcaggctcctttcccctttgtgtgcatacctcaaagcctcagcacactcctctctcatggtcctattttttggaaagaggacccacagaggcttttcacctagaacatgttagggaagggggacatttgtctttgattcctttgtgtccctccttcctgtttccccaacctttggggtttggtgccttctagctttggctgtttataaatccacaattccctgcactaccccagcctctctcctctagcttcatgaattccattcagttcaacccatttaaagagtggcccttgcaaataaggctttaagtatacactctcaaattaccccccttgtgtcctttctatattctaaatatatctcagctaggtgataggaagatggaattgatttatattactgtgtaatgacatattgaattatttattcaataaaattttttttttttttactacaaactataaccaagtactcttacaagcactgagattgcagtgattaaagttcctggcccagggccaggcgcagtggatcacgcctgtaatcccagcactttgggaggccgaggtgggcagatcacctgaggtccggagttggagaccagcctgaccaacatggtgaaaccctgtctctactaaaaatgcaaaaattaggtgggtgtggtggtgcgtgcctgtagtcccagctacttgggaggctgaggcaggagagtctcttgaactgagaagatggaggttgcagtgagctgagatcgtgccactgcactccagcctggatgacaagagctaaactccgtctaaaaagtaagttcctggcctccttgtgtaagttatgttctaatggaggagacagcaatacataaataaataagtatataatatgccagtatagtagatgttattttaaagcacacagaaagtttggtgatggaggagggaagaatatgtgtacgtggggatggggagaggggaggatggggatattttagaaaggctagtcaggaaagatatctctgaggagaacggatatgctacaatggtggggggatgtgtaggtggagacttggatttatagagcagtctttttagtaggattttcagttacctgaacttactgtcaaaaaataatgtgagaaagatcggataggatttggaagtggagcttctctagtttagagctgtaagccagagagtggcaccagatggactctcctgtcccgtgccagtcattgttaatgtcacggttagggcttccaccttggctttctttccagccaccacttcaactttcatccctgactttgatgcagattctcccaccatattgactcttcaggctgtgctgaacaagtatcctgccctctgacttggaagaggctcctcattgccctaccctgtggataaccatgtgctttattatttaaattgatacttctgagagcatggggcactatcaataattatgctgagacaacaagtgtaggctgagatccacctctgcagtctagatgattggtcactgtaggcatgtggtcattggctgagctagctccagcacacaaatggaaccaagactcccctcccagctaaacttctggtctggagactgggaggttggctccttgtatggtacatccacaagtaaaaagagaggtcatcaaactttagttactggtcttgttgccttaccctcaggcctgattttctattttatatattggaggtccctcagttcccaccccagaacatgcttgcactagtttctattcttctgaaaatggactgagacttcctaaacccattttcttagctgctccaggctgctgccagggatgagatgtagactttcttccacgtccaggtctaggaaagctatctccagccccagacgctcttgcataggctttaccaggcttggatgtttatgtccttggagccaaggtgtaatcaggggagccagaatcaaactgatcatccttccagtcctggtgacactgtctggatataatccagaaatgttgttcattgctgctgcttcgtaaagttgtatgctcacagccttaacaaaattaaaggaacatgataaacacccatgcttttttaaataaaatattataggtattgagattaggccacacaatttggtggaagtaacagccaaaaaaacttstatgatggaattctactgaattatttttatcacaataataacaatgacatgacatcttactggattcaaatgtagtttgtagtataggtccacagtcccttagtctgaaatcctaaagagctctgaaaactggaaaaaaaaaaaatccagtttgtcacaagcttatttaacggcaaaacctgatttgaatcagcatgaagcttatagtctttatttatcctgtttagtgtgaatattcatgtattgttgcagagatattaatatgttttatttctttcccaaacttcaaaaaaggatattatataatatgtggtatataaaccatattacctgtccaaacacttctgacccaaaaggtttctgagaagggattttgactctacagtactgcttggcctattacttgtttttcaattagtaatctccacaacttagatgagcataaacctcaaacaatttgctattgcttctgagtggtttatagtttgggaactactcagtattagtttctagttcaatatttagtaccttagcttctggaaggaaaaacattgatttgataaaagattgataaataaataaaaatagtggatacatattgagcccaggtctcccattctacactggtataccatggagagatgagaaaatattctttgccatcatatgaagaagcagagtggtcacacatttccattttcactttttgctgagtctgtaagaactgcactcatgttctcttggagcataatagaagcctccaaacacaatttcacacctttttctgagtgcaagaatgtagttatatgcttttcactggtttagaaaaaggcttctctatcttcttttctcaaggaacatattgtttctcaaggccaaggggaaaggaagaatgtattaattattctgttcttttctttctgacttaactgtgtggtagccaggctccaagaaagccctcaatgattctcacttcctggtgttcacattccagtgtagccccttccatatcaaatagggttgatctgtgtaactaatatcaaaatatcagaaatatcaaaatgtgacttctgaggtcaggtcataaaagacgtgacaatttctgccttgcctcttcttggagcacttacttttaagaggctagctgttgcataatgagaacacttaattaaggagccctatggaaagatccatttggcaaggaactaaggacaccaaccagcaatcagcactaaatggccagccattgagtgagccaccttggaagtggattctcctgccccagtcaaaccttcagatgactacaaccccagccacccacttgatttcaagttcatgagtcactgcaagccactaagccactcttggttcctgacccacagaaactgtgaaaaacagaatatacttattgttttaagctggtaaatttggagataatttgttacacagaaataggtaaccaatatatctggaattttgattcaaggaaaatatgttggtttctcttgattatgaaaatatcactttcttgttgcaaattttaaacatattcaaagttattctgacctgaaaaatgaaaatatcctgtaatatcatcttctctgtaatttctggcatgtagttccagctccagattttttttctttttcttttttttgaggcagactcttgctctatcacccaagctggagtgcagtggcatgatctctgatcattgcaaactctgcctccaaggttcaagcaattctcctacctcagcctcccaaatagctgagactacagctattttttgtattttttgtagagaatggggtttcaccatgttggccaggctggtctcaaactcctgacctcagaagatccacctgcctgggtctcccagagtgctcgcattacaggtgtgagccactgtgcccagcccagttccagattttttttaatgaaaatactaatgcatggccgagtatagtgactcaaccctgtaattctagcactttgggaggccaaggtgggtagatcacttgagcccagaagttcaggaccagactgggcaacatggcgagaacctgtctatacaaaaaaattaggtggacatggtggcccacacctgtggtcccagctactggaggctgaggtgggaagatctgggtatggtggcatgtgcctgtggttccagctacttgggagtctaaggtgggaggatcacctgagcccagggaggtcaaggctgcagtgagctgtgattgcaccatgcactccagcctgagcaacagagtgagaccttgtctcaaaaaaaaaccaaactaacaaatactgatgtgtgtatgtatgcatgtgagtattttgttaattgatgctggattatattaaacatgctgtcttccaacttgcatgattcacttaacgtgtcttgggatatcttccatacgagttcatatagttctatgtcatttgttaatatatctccatatattttactgtatgcacttctccattccctactggagaatatttggtctaatttcagtttccacaaatacaaacaatgatacagtggggtaatctgtgggatatatttccagaagcagaaatgctggatcaaaggaagacacatttaaagttctgatagatatttccagattgccctcccaaaaagttgtacccatgtatttacccagtgaatgtaaatgtctatttccccatactctcaacaacactggttatccactgtcgttgccaatcaggtaggcraaaatgacttgttttctgttgtgcttgttagccatctttttacatgtttatcattatttgtatttcttccatttggagttatctgtctgtctttgcccatcttgatactaggttacttgtcttacatattgactggtaagaattctttgtatatcagcaggttaaattctttgcctgaaacatagtttatagaaacttcccccaacttattgttcaaactggctttaacattttttgaatcataggaacttttttgtcatatgtgatcccatctgatgtgttatataaagcatgagataggcattacaactctaatttaaaagtggttagaatgaaaatttaaattaaagaaagcatttctgtttctacagctgttaattgttactatgtttaactttgatatcagtgactcagttgatttggattccatctgtttccttctagtataccaaatactacattcaccgaattccaagaagccgggaggttcagcagtcctggccctccaccgttttcaccaccttgcactccatgtggctctcctttcccctaattcacagggtgaagccagatttggtaagtaagaccatcactaaggagagagaaagtaactccctgtagatctttcgttagtaacaggacatactgttttcttaaacagctaccatttattagtgtgccaggtagtatgcaagaccctgaactggctggtgccttgatcttggacttcccaggctccagaactgtaagaaataaatatcagttctttataagccacccagtttatcgtatctcattatagcacctgaaatagactaagatatcatccttggatttttgtgacttttatcacaaagcactctttctcctgcctcagcctcctgagtagctgggactacaagtgcatgccaccaagccttgctaatatttgtatttttaagagagatggggtttcaccatgttttccaggctggtcttgaactcctgacctcaagtaatctgcccgcctcggcctcccaaagtgctgggattacaggcatgagccactgcgcctggcctgtgaccagtaatctttgatgttattgttgtaattgtttggggacagtgtgaatcgtgcttacataagacagtgaacttaataaatgtatgtgttctgactgctccaacagcctgctgtcctctctctgtctcacacacacatacacacacacacacacacacacacacacacacacacacacacattccttgggcttccctgtctatgagacacaacaatattgaaattaggccaattaataaccctgcagtggcctctcagtgttcaagtgaaaggtagtatttcttatgtttcacattttaaatcacaagctagaaatgattaagcttagtgaggaaggcatttgcaataggcagttagtcaagttgtgaatgcaaaggaaaagttcttgaaggaaattaaaagtgctactccaggctgggtgcggtggctcacacctgtaatcccagccctttgggaggccgaggcaggcggatcacaaggttaggagatcaaggccatcctggctaacacaatgaaaccctgtctctactaaaaatacaaaagatttgccggccgtggtggtgggcgcctgtagtcccagctactcggaaggctgaggcaggagaatggtgtgaaccccggaggcagagcttgcagtgagccgagatcgcaccactgcactccagcctgggcgacagagcgagactccatctcaaaaaaaaaaagtgctactcctgtgaacacactggtttcacgataagtacatgacatagcctcattgctgatatggagaaagtttgagtggtctggatagactatcaaaccagtcacattcccttaagccaaacctaattcaggacaaggtcctaattctctttaattctgtaaagactgagagaggtcaggaagctgcagaagaaaagtttgaaggtagcaaaggttggttgagacttaaggagrgaagccatctccatagcataaaagtgcaaggtgaagcagcaggtactgatgtagaagctgcagcaatttatccagaaaatctagttaagataattgattaaggtggctacactaatcaacatgttttccatataaacaaaactgccttatattcgacgatgtcattcaggactctcgtggctaaagagaagtcaatagctggcttcaaagcttcaagggacaggctgattctgtgtagctgttgactttaagttgaagccagtgctcatttaccattctgaaaatcctcaggcccttaagaattatgctaaatctattctgcctgtgctctgtaagtggaacaacaaagcctagatgacagcacatctgtttacaggatggtttgctgaatattttaaacccactgttgagacctactactcaagagacaaagcttcctttcaaaatattactgctcttgatatattgggctggatgtttttatttaaaaaaatacaaaatatactgctcattgacaatgcacctaattacccaagagctctgatggagatatacaaggagattaatatctttatgcctgctaacacagcatctattctgcagcccataaatcaaggcataattttgacttgcaagttttattatttaagaaaacatttgtaaggctgtagctgccatagatagtgattcctctgatggatctggacaaagtcaattgaaaaccttctggaaaagattcaccattctagatgccattaagaacattcttgatttatgggaagatgtccataaacaggagtttgggagaagtatattccagccctcctgcatgactttgagaggttcaagactcaagtggaagaagtaattgcagaggtgatggaagtagcaacagagctagaattagaagtagagcctgaagatgtgactgaattcctaaaatctcatgatgaaacttgactaggaccctattctgtgataggatttatactgtgcactcgaggtataaaagtaaacacagctctacccctgagtggactgaggtgatctgtgaaaatggctcgctattcacttgacccagaaaaatcccacaaaagtcatgcaaaccaagttgttcaagtcttcatgttcactttaagaacatccacgaaattgcccatgccagagagacctaagtaaccaagatgttatgtaactccaattttctttagacatgtattagattctgctaatattagctaacttgctcaattgaaaagttatccagtattttaaaaaatatctttaatgcagcaggtactaaaagggatgaataaaacagctcttcaggaagcttatactttggcttcagggaaaatggagtaaagaaacaacaggtagacttgaaatacagattaattcagttgaaaatagagaccctatttaaaaggccgggcgcggtcgctcatgcctataatcccagcactttgggaggctgaggtgggcggatcacgaggtcaggagatcgagaccatcctggctaacacagtgaaatcccatctctactaaaaatacaaaaaaattagccggatcgaatgagtaggctgatctcatattctcttgaaaatatactcctaaagaggaatttgtttcaaggagaagaatagaaaagttaatttgtgagattgctgattattaaagtaagaggactgcttatgttgggggaaaaagatctataaagttcttgagggtaaaggccaagtatttttgcgttttccatggtcctttctagaaaagcttccacatatttgaggaatgacttaaaaataaatgaatgaatactggattaagtgagtcatcacaaaaacaaagacacccactccctacactggtgctcttctcaggctttattaagagtctgaaaaaccaggagggtttccaaagtctgcagtgtttgattactggcttcattccaccctggccattaccaaatgaaatactcaaggaaagagctctgcatacaaaaatgaaacctaatttaatttttaatcaagtaaaaaataaatttcagattctccatattaacaaattgaaaggaaatggaccatttcaacctaatactctgcctctttgcctgaagctggtttaattcaccatgacaaatttagatgtacttattacatctacactcactcacgctttgtatgaaagaagtccattattttatttagtcatttttttccatgtttcatacccagtttgagctgtgaaatgtctaagttcatagcagtagaaagttgatggctgggtgcggaggctcatgcctgtaattccagcactttgggaggccaaagcgggcggatcacttgaagtcaggagttcgagaccaggctggccaacatggtgaaaccctgtctctactaaaaatacaaaaattagccaagcatgatggtgggtgcctgtaatcccagctactcaggaggctgaggcaggagaattgcttgatcccaggaggcagagtttacagtgagctgagatcattgcaccccagcctgggggatagagtaagactccgtctcaaaaaaaaaagttgatgacatggatggtgggttattatctataagtaggatactgtgattttttttttgattaggtgttttctgtggtgagccacaaactaggtggcaccaagattatcactgtttgtatagtatataaaatttttattggcctactaattaacatgtgtttgaaatattaagaagaggcaattaactcttgttaattgttgacatgccagaacccttacaggaactttttctccttaactgttgttaatttgattctctttgtataatgactttcatctggtattatatttggtggtgatcaaaaaactttataacatgttcaaaggaaacttggctagacaaagaaaaggtcagctgtcccaagatgtttatctgtcaatggaattaagtgagagtaaggttttccaagccaagtcagatgagaaacaattagaccacacttgtcttactgcttcatgttttccaagattaatgaaatcataattgggagccatttgtttaggtttcctcagttcctgctcctctgttgcccagtcctctataatgtgttaaaataatgccagtgttaccccttcccactgtgtgtttcctctccatatatgcgctgtaaatttggcagcctccttaaagatacagaaggactggccctgcactgtacgtgcatttagcaagtctgatgatggtcagagtccactgcgagaagtggtttgatgtgaaaatccccccaaatatctggtttcttgtgactgacaaactgcttttcccagttgcatggtgaaattaccagctgtgccactgacacattggctgagtgacaacctgtagctgcttccatccataaatgaggtatttagtttaaatgttatagcttctgtttcacattgagtgagttccgaacaacatctgtgtcaaaattaggctgcatattagcagttagattgctttgagttgttttgattcgtctccattttgggggactctcagcagcttgaaaatgatttttctttctaagtcgatgctttttccacttggcaaacattacatttttcctgtctgcagaagccagcgtggctttgcctgtgatttttgctctcttgttttgctttgcctgcatcactcttgagttgtcactgttccagcccatcacaggctcattttggatctgaggctggtggggactcttcctttcaaggtgaaagccaatgtgttttcccaaggatagctgtgaggtcacagttaaaacaaaaatgaaagttgaatgaaaaggaattcagttgtgagaggataagaaaaaggaaaacatgaggtaaacaaaactgtttttgaagaagggactgatgtggtcacaggcagtgagctccagagacctggccttatagatgagggtaatgggagatgctggtgacgaggtgagaacagagggtggggtgaagagaagggaagcctttgaaatgaccttagatgcatgaataattcctagaaccagtcccagcttcacagactttcagtgcttattttaaaggatcatgtgaagcaggagctctatttgtatagcacttgaaaatcaagaaagtgatgtttctgtttagaatctttaaaatcgctctttgacctgaggaaaaaataaaagaagggggcacagacagcaccgataattgaatatgtaatggagagcctcagaagggtgctgctctccaagttaagtgggatcattaaagttttagagtttgtgtaactagagtcagtagggaagcgtcatgggaagttttaaaaatttgaatacagactgtgaactccttgaggaacggtgaggtgtattactcatcttggcagtgctagcacctattctagagcgtggggcatgtaggagttcaataaattttgaaagagtaaatctgggtaggagagagattaggaaaggagaagtcagagaagctatkaaaacctgatgatgaccatttacagcctttaggtgggctggaaaaagtagaataggaaaaaaacattgcataactgctccttggttaacttttgctccctctgaattaatcgctgaattcgtctaaggatttttttgataacatgtttctaaagtgttaaatattctctttatcaaagcaccataagaaaatggcgaaagtttctcattcaccttaaccagagtacacttgctttatttctttaattgaagtgaaattcacataacataaaattagccattttacagtgtacaattcagtggcattttagtacattcactatgctgtgcaaccaccacacacctttacagcatcgagttccaaaacattttcatcaatagttgctttactttaatttcttggtgttgtagaaccacttagagttttgtggggttttttgttttgttttttttttttgagacggagttttgctcttgttgcccaggctggagtgcaatggtgtgatcttggctcaccgtgacctctggatcctgggttcaagcaattctcctgcctcagcctcccaagtagctgggattacaggcgtgcacaaccatgcttggctaattttgtatctttagtagagacagggtttctccatgttggtcaggctggtctcaaactcctgacctcaggcgatctgcccgcctcggcctcccaaagtgctgggattacaggagtgagccactgcgcctggccaccacttagcattttttacttcatttgggggagaaaaaaaaaagattaaaacacagatagtgttttctaacagcctctggagatcaaaggccctctccttcatggtctttctaattccttgtttaccctgcccagaagtcattgagtagatgtatctttttcagttagcgcttactctttgatacttkgcaatttgatgacttatttttctccttgtataattttttatcttttttttttgagactcagtctcactctgttgcccaggctggagtgcagtgatatgatctcggctcactgcaacctccgcctcccgagttcaagcgattctccygcctcagcctcctgagtagcgggattatagacgcatgacaccacacccagctaacttttgtatttttagtagagrtggggttttaccatgttggccaggctggtcttgaactcctgacctcaggtgatccacccgcctcggtctcaaaaaatgctaggattataggcatgagccaccacacccggccatgtatcatggatttctttttctagtgtaaaacatacatgaagttaaatcagctgtagaaagcttatygctgggattacaggcatgcaccactatgccyggctaattttgtatttttagtagagacagggtttctccatgttggtcaggctggtctcaaactcccgacatcaggtgatccacccaccttggcctcccaaagtcctgggattacaagcgtgagccactgtgcccggccaggttatcgcttctttacctgttagcatgcaatttgaaattccactcataccaggacagcattttacagcagatataagccaagcggcttctcaacttcagtggtgccttttccacatagtcaaaagggttaactgattttccctaagatacatgggcaaataattattaaaatgttcttcaaaaggaccttacaatcaagaatgaggataagtggaatgagtaaacaccttacaaatttcaaatactattatggcttactgcaaaagctgtgttagcattattgggtgaggaatgtaaaagatccaatcagaaacaggttagagagcttgaactggtattatacatgcttaaaaatagcaagaaggtccctgctgataagaccttcaaattacagaaagaacatattgtgactgataattcttttaagaaatgtgaataccagatttataagtttcacgtgtttgcaatgtcaaaacttccatattctgccataaaaagtgaaatcctgcagtggaatcagctgtagaattgcaaagggcagcaaattccatttgttagcaaaataccattttgcattcttggtcttcctgaattcacatttaagccacttatacaaatctttgacacaagcaatttttaaaatatgtttatggctgacagtttgtgaaaacaggtttgcttttgtgggctaatcacttttctctaaagacaggtgtcacatgcttaaatcagttgtgtctacatcttaaagttccagatgttatttttcacaagatttacttacacagtacagtattttgtagataaaccttgttagtggaggcagtgcctggattcagggaacttggtctgttgctgtttaattattcctaagccaatttgcctgttgcagtttttcaaggagccatgattcatctctgtgaagtcacacagggagagaaaaattccccactggtcacttctattaaagaacagaattgggaggggctggaggttgggagaaggtagggggtgaatttcctgctctctgtggaaaccaggtgcagcttatataaggcaaactttcattcttaaggtcataaaagaattccccatatttacccttccttccttccttccgtcccttttttcttttttcttttgtctttttttctactaattgagacagaatcttgctctgtcacccaggctggagtgcattgacatgagctcggcttactgcaacatctgcctcctgggttcaagctattctcctgcctcaacctcccgagtagcagggattacaggagtgtgccaccacacccagctaatttttttattttcagtagaggcggggtttcaccatgttggccaggctggtctgaaactcctgacctcaagtgatctgccctcctcagcctcccaaagtgctgggattacagacctgaaccaccgcgcctggccacctcatattttctttataggtttcattgagaattcatcctgaatatttgcttcccatttgatttcctataatttccaatctacttttttttctggtttgcatccattttacctcagttgtgatacacaagaaaaaataccatcctacaaatcaggaggttttggctttactctcatctttgtcagtagttaggtgtggtgactcaaagctaatcagttagcttctctgacttagcttctccttcctatcaaataggagtaatgagaagctccaagagaaggatcacagttggcagatgcacttgcttttaaccaagccactccctctgctgggaaagtgattccctgccattcaaaaccacttacttctgctcacctcctgccaggacatatgatccttggagctccagtgcctcattggattttagatattgtagatctcaaaaatatatatatgtgcttgaattatgatgtcgatgtggctattagagtcattctggggttccccagggtttccttagggagcacctgtcacccatacacatcccaaggggccttcgagaaggtggttgcccttctatggccctccctgatacatgctcgtggccctcctctctcttctgtctctttccatgctttaactgttctttctctttcttcctctcatctacacctctcccctccattgggatcatgttgaagcccctgtttcatcttatccttgacattctctcccacctgtttttgtcacaaagaccctagaggttggcctgtttacctgcactcctttccaactgccccgatcagattataccgcaggaattcttctcctaggtctcccttaggtctactgggaaatgaactttaattttcaccagttttgccatttttttttcctagcacagtgactctttgttttaaggcttttcctgcagttgactgtaggaagcagataggtgttaaaaacagttaagcattgcaggagttagatgtgtaggaacttagggattactgatggactttattcagatgtgaattggacaaggtctttctcaatgccttttgtctgcttcaattatcccctttttatttctaagaccagcactcatcagggcctcctgccttgtcttttttatcagccggttctgcagcaaactgatgatccttgggcgatagcagacacacacatcttgtctgattcacatagttggtcagtattgggaccacatatttggtcaaggtatttcacaccacactacacacacacacacacacacacacacacacacacacacacacacacacacacaccccttttgcaaaattgcaagggctggtgactgcaggatggatgttaagcagccctaaatagtgactacctgtctaggctatcctctctgtggtctcttacctctggtggtttcatttttgtaggttccctgactggattgtatttgtgtgcagccttcaagcctttttctgaggatttgagtgggcagtagcagtgctgaggggtggcttggaggcctaatagatgttcttggggactaaatgcatgccatataaatgaaggcagtgggcttattgcaaacagttgtgagataaacctgctgtcactgaaccttcttctttaaagtcctggagctgccattgctgttgtggcagaacagttcatatttatcagatttagatcttggcagatttctaaatttatatttatatcttggtgggtttctaaatataaaaatcagcatgtgtctgcatattccctttcctctttttattagagcagtcatattattcaatggtcattctctgatggagaaggcatttgtacacttagaattacaaacttacacagatgataccttaccaacaatttaattatataccctatttttaaagtttagataatagaaccaaaagaagggagtgccttgtccaaagtcttagaactaataggaaagcatgaataaaaaaaaaacagttcttgtcactcccagctccaggttcagctctctgaccacacaacaaatgagacatcatagactcttctctcgaagggtatcaggtgctgtctacatggatagagaaaatgggcttgggcaacatgcataccagggtttaaaatctaggtctgccactctaccatttggacaaatttaggtgagctgtttattctccataaacttccttttcctcatctgtagaacagggaccatgatatctacttcatagtcttgtgtgaacattcatgcataagaagcccccatggtaggttgctggatctttctcctcttttgtcattaagttaaatattctcttccagaaatcaagaggctaataaggagttaataaatgttttaaaacttagaccacggaatgtctacacaatgcccagtttggatgctatggtattctgactgttttcatgttgattttcatgccacagtgagcctcttcaggcatggaaacaaccaaggattatttgcttctgtcttctttgttttccagccctcttatattttcatcacagactccatcgcttccaaaaacagtgtgtcaggatttactaatgaatttcagctctgtcctgctggaccaccattcaaggacatccgtccaaaccygcccctctcaagaagggcttatccacatgcacctgatttacaaacaaccttagttccccagtttggttcctcattttcttgaggcttcttctgaggctttttgtcttgcacctttactccatccagatcttgccctcctgtgaactcctcttgaacttagagcttagcatttaattgttctctagtcatttaacttctgctgaattttctccctccccaaattagattgtgagtactttaagagtcaaaaaccaagctttctggctttattatccctgtggagcttagcagtgtgtcaggtgcttggagaggtctttgattaataactgaatagtaaggaactggaacacgctagttctaccagatggaaattagcagcacccagtcccagctccctgcagatctccatctctctcggttaaatatctcgtcctcagctaacaccctctgatccctcctggatcccactgagaggtgaatggcattcacaagccccttgaactgcttcttggctcacctttattaccctgacttgctcccaacccactatcaggtgtgttctgccctctttgttatcaaagaagggggacttaggcctcccctattctgagtgccgtggcaagtttaaaactgtatagcgctctcttcagattgcaaagggttaggaatcataatgaagccttaggaactcgagtctttttctgctgccattccatcaacatgctcacttaattcttaaacaaaatgctattcattgaattactttttatttcttaagatagcctgaaactattaatatggtgcaagactttctgatgtcattgctctgggatcataaaacctacttgtcaaagctattctttgaagttatttagccataattttgttataagctttttatttacaaataaaaattatttataaatcaatttgtaaataattgtaattataagtttacatgtaattttaactatttgtagataattcaaaaaattatttacaaatttgtttttattttgtattgagtaactgctgtgagctgagactagagctaggcaccatgggaaatggagatggcaatttgtgctcagaagagtttgtaatctagaatccagccatggccccaagtctgaggctaagaaggaaggatgatctggactgggaacagaattgacctgcctcagggttccagactgaagcatcagtgtgattttttagaggtgttttaaatcacaggccctattttgggggtgagaacaggttaattagccactattccattattccaggctgcacaaactacatagtaaagattatggyctaaggcttcaggatgtccaacagaatagttctgaaagtcaggggaagcaaacgctcttcaaagcgcccagaacaaatagccctttaggtcagttcttaaatcaataacagatcagtcaccagaggaggaagtctgtttcacagccaaacagtgaacaatgctgtactgaaaccctaagctcccatggtctctggggagtaattagaacttgttcagtaatcagctaatttgtatttctgggaatgattctaaataaaaaatgataaaagttggataaagggtaaactatagaccattgcttcataatggaattgcataattcaagtggggaatcataaatttggaaatgctggaagggttttttttttttttaagaaaaaagtgatttaaaggcaatgctaataaaataaaaataacccatgactaaaaatatatgctgaagcattttatctcactggaacctgagaacagtaaaatatccaagctggagtctagtctactagactagtctagttttctcactaggcctataaattaattttgagactctgaagtaattgtttgacctcttttgtctgcagagtcagtacagatttggggtgttgtttgttttagttgttggcaaaacattgtagatatccagatcctggttgctgtatttttattaaaaagaacaggaaactggccaggcacgttggctcacgcctgtaatcccaacactttgggaggctgaggagggtgggtcacaaggtcaggagtttgagaccagcctggmcaatatggtgaaaccccatctctactaaaaatacaaaaaattagctgggcgtggtggttggcacctgtagtcccagctactcaggaggctgaggcaggagaatcagaggttgcagtgagccgagattgcaccactgcactccagcctgggcgacggagcaagactcttgtctcaaaaaaaaaaaataaataaatcaaaacaagagcaggaaacttatttccatcaaaagagatggagggctaggataagtgaataaacaatagcttatggttaatttcaaatacagcttgttaccctgcactagaaaaatgagacaattctatatttaattatatatagcaactctaacatttgtgatgagaggaaaagattcttctgggtttttttttattgtttcttttttttttttttaattgagacagtgtcactgtggcacaatctcggctcactgcaacctctgcctcacaggttcaagcaattctcctgcctcggcctcctgagtagctgggattataggtgcctgccaccacacccagctaactttttttgtattattagtaaagaaggggtttcaccttgttggctaggctggtcttgaactcccaacctcaggtgattcgccctcatcggcctcccaaagtgctgtgattacaggcacgagccaccgtgcctgacctgtttttcattgtttcaacaggacaaatacaagaaagacttgactggtatctcatcagattatacttttcctgtgatatcagttttgaacttataatttctttccagctccaagagtctctgattcactgattctaacatgacatactaggaaattctatcaaagcaggggctcctggaacaggtcccgttgaccatggaccacagatgttctcaaggagaaacccacatatggtgatagggtatatgactaaactgcctgtttgagatacacagctttcatgactaccaaatctggcatttgtgtttctcagtagcagatgtgaagaatgagttattacttaatgagcagcaaaatcttattggactccactgcagtgcacagtagctcactctaataagacgaaacaactgtaaaatagtttgtgtgagttcagttccgagtctacttctgacccagttggatggtattatttccccaacctagagatttcaggttactgtgacatccacgaaaagatccaaatgatatttagtagaagttcatatgatgaaatgagaattaaactaaatttggttaaatgttttgagttttacttttgtattagtccattttcatgctgccaataaggacatatctgagactgcgtaatttataaagaaaaagaggtttaatggactcacagttccatgtagctggggaggcctctcaatcatggtagaaggcaaaaggcacgttttacatggcagcagacaagagagaatgagagtcaagccaaaggggaaaccccttataaaatcatcagatcttgtgagacttactaccacgagaacaatatgggggaaaccacccccttgattcagttatctcccactgggtccctcccacaacacatgggaattataggagctacaattcaagatgagatttgggtggggacatagccaagccatatcaacttttcatcactttaagtcattaaaaatacaaattaaaacacttagtcacatatagtttttagattctaataataaagaataatgaatcttaatcctgttctatatggaagtctctgcaggctgctataacacagtatcataaactgggtgcttattaacaatagaaatttatttttcggctgggcacggcggctcacacctgtaatcccagcactttgggaggccgaggtgggcagatcacaaggtcaggagatcgaggccacggtgaaaccccatctctactaaaaatacaagaaaaattagccaggtgctgtggcgggcgcctgtagtcccagctactcaggaggctgaggcaggagaatggcgtgaacccaggaggtggagcttgcagtgagctgagatcacaccactatactccagcctgggcgacagagtgagactctgtctcaaaaaaaaaaaaagaaagaaagaaatttatttctcacagtcctggagtctgggaagtccacagttaaggcgtcatcccatttgatgtctggtgagagtccactctctggttcatagacagtggtcttctcactgtactcttaaatggtagaagggatgagggaacattctagggtctcttttataaggcactactcctattccatgagggtcccacccttatgacctaatcatctcccaaaagcccatctgctaatatcatcaccgtggaggtgaggatttcaaggatgaattttggaaggtcacagatattcagtccatagcaggaagtaattgggatcttcaggtttctaggctaatctagatgccttcstatttatcattcttttcttgagttgactttctgattatagtgaggccaggtcaacacacagtattctaaatatatggtcaggatggtttcttctgactttattcaatatctttatttgtataatgaagaactttggttgttcttatttctgctatgctctgttagaattggaattttatcttccaaatctttagaactttttactaaatatggaatgatattctggcttttttttcctcttctagtcaagaactatcttttctttgtagaatttaggaatggcaaaaggaactaaytcatttttgtggtattttctaaatccgtaatacacaaatgagtaggcacatggctgatagaaatatcagtatacaatagcttatagcttctttcttttttaatacaaaatataaagggcattttcaccatcaaaaatttcctgaattcacctataaccaatttctacaatctcttttgccatttaagccaaagtgaggttttatctttatcattgatagacaacttgattgtgtctatatcaatgataaagatggctgaatttcagctttatactttagtgagtgtaatatattggattttatactacaaaacagactaagatacttgggagcagagaatggaggtggttgaggacaaatctaggctgagtcctatgtttctaacttgggcaaatgagtcaaacttcagctgcatttggaagtagggatgtccattggatgtactgtcagaactcagagagcaatctgagctataaacattgatttggcaatagttgaagaggaaaattatttgagaagctataaatgttaggaggagctttcttatgtaaagtttgttccagaagataaagttgaaaggtttgggaggatggatctaggaggaagaaacacaggaccagtatgacaatgaggggacatgagagaattgtttattagaggcactaactataaaaagtctaatattttttcctctgtgaatgttggaggctcattcatggatcatagttaaaaccccaaatttatcattgctatctgtaattatttgggttaataatttcaaatgcctgttaaagtctagaaactataattcctcttagcttttaattttgaaatcatgttaaacttacacaaaagttgcaaaaatagtagagaattcttatgtgctttttactcagctcccactaatgttaacatattatataatcataggtacagttatcaaagccaagatattaatgctggtataatactattaactaaattacagactttattaccagtctttccaccattgttctttttctgttccacatccaatccagaatccacattatatttagttgttagatctccttagtctcctccaacctgtgatagttcctcagtcttgccttatctttcatgactgttacatgtttgatgaatactgatcaattattttgcatacagagaatacaattgtatgatcaaataatgggatttattctttctctatttctgaatggaactttgggttttataagagtgtattttgtgtttgtcaaaaccctggtgactggtcaaaatccatttcagcacaacacaattattgtgacttctttgtgttgcttggaaattcctccttccttcactacaaggaaatgatatattctctgctctacttactatagtaatcactccatctttaataatgataagtgaaatagtgaagagtaaaaattttcacaatgtatggttcctaaattaataaatttttgtcttgtaagtcattttaaaaaaccttttgcaaattcctcaaaaaataaaacatgattataaataaaatatataatattttataaatataaaaataaaaaaattaccatatgatccagcaaatttactcctaggcatatactcaaaagaactgaaagcagagactcaaacagatacttgtacaccagtattcatagcagcattattcacaagtcaaaaggtagaaacaagtgtccatcaacagatgtggagaaacaaaatgtagtatatatacacaatggaatattaatcagccataaaaaatgcaattctgatacatgccacaacatggatgaaccctgaaaacatcatggtaataagccagcacaaaaggactaatactgtctgagtccacttctttggggtagccagaatagacaaattcacagagacagaaagcagaatagacattaccaggggctgaagaaggggggaaatgggaaattattggttaagggatacacggtatctgtttgtaatcacaaaaatgttctagaaatggatagcacaattacaaccttgtaaatgtgcttaccatcactgaattgtacatgtagaaagtggttaaragggtaaattttatatatattttaccacaatttttaaaaatccttatacaaccatagctctcctgctacccacttactggatcatttaaatccaatatatagggtttttttattctacagattacattttttctgaaaaacctatttttstaaatagtattatcatactaaagctaaccttataaaaattgtatttcatctaacagaaatttgaaaaagtttcatcttaaatttatttgaataatttaatttctgatatttgtatttgattagttatgaaagtcagtaatagaaacataagcttatctcactagaggtttattttaccctgttggcttggattttgtgataagtgttcacataaaatttagcctctgaataaatctacctgcagcatgtaccacccacattcatcactgttcctgattgtatgcctcaaattctctagaagtaggaagcactacagatacctgcttactgtggggaatctaggagttagggacttgtatttccgtgagcccctagactcatgacaccatttgttagcttgttctgtttcatggctgacagctccaccagaataacatggaatgggaaagaagcgattctcagaagaaagaaatactgagaaaaacaaaaatagatgtctagcataccagatcattttattagttaattccactaaggtttgttgagcacctctcatgtgcttggcactattctaagggtgagggatacatcagctaacaaaacagacaaatatgcctgctctcatttagtttaccttggaactggtctgttcagctrtaaaggcatgttgaaacttgggcagctggcagatataacataaagtgcttagacttccatggctaacctgtctcccacttcttgaagtcattgcattcaaggaggatagcaagctagtattcatgtcagattggcttccttatgcagaggtctgctatagtttccataagttcaaaccagtgggtggtattgctgtggtttatggggcccctagcatctagaatgagataaactggtactgttttagcttgtgtagacaacatgttggcaatagccagtcaagttgctgcaggatttcagtctcagaccaaaatgggatgaaaaatcaggggccttgatggaactttgcattttggggctaaagccgaggttcactagacgtgcaggaatgcagaggttttccagatacataccagattcaagcttaaggcagcaatactaattccatttatagaccaagcccctggaaagggtggtgttcccgccagtcttggttagatgacttgggacatgggcagggcacagtctgttaagggaaaaatgtcttcagacgggaaatgaccataggatgctggtagatggatgctatcagcaaataaaaataattgttagtatttgttagccagacctacattttttcatttatacctcacaacaaaaacgaacaaagggggaaaacccctctttgagatcagaagtctacttgcaagtattaaaaattcatatagaacttgctcaaacaaaaaaggaaatttttcaatactggcagtacggtgattgttaagacagaccatccccacccscctcctctgtcctgatctcactgcctgtgcagagggataacatttttgccttttggaaatattaggaaatacagttatatatttcagctctggaagccacattcggttctaggcatcacacttttaaagggccattgacaaattgcagcatgttcagaggaaaatgatccagatggtgaggaaatatgaaaccgagttatataagaaacagttggaggaagtggggagatttagcctaaagaagaggagattaaccagaaagtattacagagaccacagttttcagattccagaagagacaccacagaggttagggattcatcatgctctgcccattggagccttccagaacaaagacctttgtcgggaagatacgggtaaagcatggaaaagaaattgataacaaagccatgccagaatgactgggcctcactggaggcaggttctaaggtgggtactaagccccacatttctggagttattctaacggaggatatcagtcagcacctgctcatttcatacttcctccatgagtcttcccagatctcctatggccaataatctctcttcctggttctcccttttactttttacctctctgaagtgtttccatggattcctttgtattcaattcaatttatatatgtccatctctcactagtgattctcaaacctattgtaatcctttttatatcatgccttttcctatcctaaaatgaaagtcatagttaatggaacctacctatatataattccaaaagtgtaataaaatgctctaattttaataaaaaggaaaaaataaaaggaaaggaatttgtaatcaaattacgtgttttgcaatatgtacatacccaggcatgacaaaccaggaggcataatcaagtgcatagattctgwatatagaattaccatgagtaggacagctacaattcagaccagtccgggttcatcgtattgataactcaaaacctgtgagcagctttgttgcccatgatgtaattttttaaaatggtgaacagcttttgtaaagttccaaacaaaccaagtacagtcttccctcagtttccatggaggttctatttaggacaattcagtataaaacctgcaaaaaaaattttgcctttctatatgaaacagagttaggttttaggctcaaacagttctaaacagattttcactacgtagatgtccaatgggacatttgaaagtcaagagggatgtaagacagtcccaagtattgcagaatgtccatatccctggcacctgtccaataagtgcaactagcaccccttagtcaccataacaaacacaaatccccctgtaagctccccttatctactgctccatgaagaaccagactatacagtgaactctaggaggacggggtccagttttgttcctcttttaattttctttttacttgatacaagagatactcaatgtttcttcaagtaaagaatgcagtaaagaggatgcttaactgcttcccaagtatctcaaactcagtttttccaaattgaactaagataccatctttctgatccctgtccccactcccaatctgtcttacttccttaattttgaggcctaaatgatataacattatacaaatccagcaactatggattcttctctctcactgcctgtgaccagtaggtcatagaccatttcgtttctggcttagaaacatgtcctgactctggcctccttcattaccttgctcctgcctcccttttcatgttcacctggctgttgtaactgcctgtgtctctgcttccaggctccccatcttcaaatacacactgaactctgaacattccatggatgtgtcaagccctctaaattttggtacatgcagttccttatttctagagtaacgattgcctttttcgcctgaaagacttatcctcatgcatcaagacctggcttcaatgtcttttcctctgtgaggtcttccaagatcagaattactctgtgtgtctctctcttcatattcttcttgtggcattgcttgagttaaactgtatttgttcacatctctgtggtcactgctagatggagagttcctgccaacatggtgaaacccagtctccactaaaattacaaaaattagccaggcatggtggcrtgcacctgtaatcccagctactcaggaggctgaggcaggagaattgcttgaacacatgaggtggaggttgcagtgagttgagatcatgctactgcactccagcctgggcaacagagcgagattctgtctcaaaaaataaaaataaaaaggcgggggcgggggcaggcgcggtggctcatgcctgtaatcccagcacgttgggaggcaggtagatcacgaggtcaggagatggagaccatcctggctaatgcggtgaaaccccatctctactaaaaatacagaaaaaattagccaggcgtggtggctggcgcttgtagtcccagctactcgggaggctgaggcaggagaatggcatgaacccaggaggcagagctttcagtgagccgagattgcaccactgcactgtagcctgggcaatagagcgagactctgggccaggcacagtggctcacacctgtaatcccagcattttgggagaccaaggccggcagatcacctgaggtcaggagttcgagaccatcctggccaaaatggcaaaactttgtctctgctaaaaatacgaaaattagccaggtatggtggcaggcacctgtactcccagctactgaggaggctgagtcatgagaatcacgtgaagccaggaggcagaggttgcagtgagccaagatcgtgtcactgcactccatcctgggtgatagagcgagacgctgtctcaaaaaaaaaaaaaaaaaaaaaaaagttaattacccatgctttggagtcagcggctggagtttcagttctacataatttagtagtcctctggtcttgggcaaagtccttaatctttcaaagccccaggtttcttatctgtaaaatgaggataatcgtggccacctcataaagatattgggaattgaatacaatgcttacaagatgtttaaaacaaagtttgaaatatccattatcactggctttgtatctatccaacacctcatagtaagcataatagaaaagatacttactagctgactttgaatgaaaggactgctgatatcaaattctgaggttttgtgattgaatcaaaaaatggatgttatatttagaaattatagctaattttgtcataaatttatccatggaaaataatcttaaaagaaaacaaaagtgctatattttcctctctaacttttttggtgcattaaaaggcattcaggttgggcatggtggctcatccctataatcccaacactttgaggggccgaggcaggaggattgtttgaggccaagagttcaagaccaccctaggcaacatagcaagacctcatctctacaaaatatttaaaaatttttaaaaaattagccagkcatgatgacacacactgtagtctcagctactcaggaggtggaggcaggaggctcacttgaccccaggaggtcaaggctgtggtgagtcattatggtgccaccgtactccagcccgggcagtaaagcaagaccctgtctcaaaaaaaaaaaaaaaaagaatgagggcattcgttctagaacaataatataacaactcttgaacttttaaagtccacaaccactgtggaatattatgtgcctgcaaacccctgtgttttggactttgacttgtatcttccaaaacatgaagtgtgaggaatgtcacccttctcttattaatctgggatggtgaaggacagtgagcacctctggtattgttgcactgagctcagtaactgccctgcagttcattcactttcaattgaaaataaatatgtttattcagcctatggaccacttgtttccttgctttaagtgctgtttgcaatataaaaccgaatcctaaactttaaaacttccatagttaatactctgctaaatgtttaaagcctgacatttaatctccgtgaactggaacgctctgatttcactgttttcagctagtaaatgtcactctcaacattgttgctttcactcacacttaagtgctttcatctgcagtgggtgcagtgtgtcagagaattctttgtttgccactttagtaaggggaaaaaagactaagctgggccttgaaacagggtgaaaaacacttcgtggaaggcaaagatgaccctgtttttatatggagtttgtgaacacacaatcttgagttctaccggatactcttaaaaagcaattacagagtcctgctgagctcacatgtgcttgccagccaaacagtgggagtggggaaggagcagtagatactatcgttgctttaattcacttttgcctgcaggaggaatcttgtcatctactggctccccaaactattttcaaatgggatattttatttctgagtttctgaaggctactggcacacaggccagctctcacttttcatcattttgacatgaaatggaaaatccgtttgtggctgttttcgtagcatgtgatttactcctgttcttttatctgtctcccctttatattttttgtttggacatatttttctcttcaggcttttgctgtcctggcgtttttatgttcatcctccttcccctgccttctccccatccccaacccgctcagcctccttcccctggtcctcagtcccttgccccacccctcttgtgctcatccaacttaaggcgaggctgcctgtctttctcctccctgatctgttccatgctgctgctggggccgcttgcgctacttctccccaccttccaggttccccccmccaggtacttacagggctttatcaatattggcccatgagatagctgacaacaagcagtcattgctgaactcatccctcatcactgttgtagaaaaatagattatcagcaacattcttaggcatacctctgtctttaaggtactttgtgcctgcaacaaccagtgtttccagtttcctggcaaccatattgaagcatgaatttaagcctggaaatagaacatcatatgagaagcaccaaagtggaagtttagaaaatcatgcctttctgtcagacacagattcaggtctctactctatagtttattagctatgtggccttggacaaattcattcattcatttaattgaatgcctatatttatgccttgtatttggcttttaggaagctagttaatagccctctgtcttctccacttatattcataaccagttgagaaataagacatagaaacggctgggtttggtggctcacacctataatcccagcactttgggaggccaaggcgggtggatcacttgaggtcaggagttcgagatcagccaagccaacatggtggaaccccatctctactaaaaatacaaaaattagccagacatggtggtgcacacctgtaatcccagctactcgggaggctgagacacgagaattgctcgagcccgggaggcggaggttgcagtgagcagagatggcaccackgcactccagcctggactacagagtgagactctgtctttaaaattaaaaattaaaaaaagaagccatagaaatcaaattattcactttatcaacaataaaagccatgttggaagatgcttatatatgcagccaccctaggtttactaatacttctctcctaaattagacagcaggcctgcctctgtttttccctatscagcacaccagtcggggtgtagagcatggtcacatgttgacaaccgacaagctgaaaagaatttaaaaagtgaaaaaacccatgggggctggctgagcatcctcaatctgtcctcctaaactcactgatcaggcaagctgctctttctccttagggaaggatagactgagaaggctgaaaagaagagactgtactcttcccacctggggcttggaaattcccttccctccacggaaacaggagggttgagtattaccccctaaccttaagcattgtatttaaccagtgattaccatggtaagcaaaataaatattgcaagcctgttttctcaccttaaaatatggataatcatagctacctcctattgtggctgtggagactaaaatgaaattacaaattctttacaaagaatatgagtgtgtgttaactgccattttttgatcaggcgcagcctgaggtggaattggtcattcggtaggtatgtgtctttgtgccctctcttcttcttctctttctgaaccttcaatttggtgattttctctttcttcattcctttttttttttttttttttttttagtgtggcatattggtcctaaagcttttgatttccagtaagcataggttgaattaactcacactggccaaatctttgctaatcctggtttatgtattacagaactgattaatttgaacaaagaaagcatttggaacaattaagtctgctttagaagtgcacaactggttgtacctaaatgatcaccaaatgcatggctaccaacaggaaatatatttctttttttttttttttttttttttttaggacagggtcttgctctgttacgcaggctggagtatagtgccatgaacacagctcactgcaacttctgcctctcaggcccaagtaatcctcctgcctcagcctcctgagtgtagctgagaccacaggtgcatgccacccagctaattttttttttattttttatggagayaagatctcaccctgttgcccaggctgatcttgaactcctgggctcaagtgatcttcccaccttgccctcccaaagtgctggtattacaagcatgagccactgcgcctggccagaaatatatttcttgattcctcacatttattgttgttttagtaactggaacaatattatgcagcttctctattaccgtagaaaataatttcaggtgagccttcaaaccacaataatgaagaataacagtataggcagtgagtttaggaaggaacttttaatccaggatatttggactttattttgaaggcaggaagaagccattgacgataagtgatgacataaactagatttgcattttaggaaaaaggcatgtagcagcactgtaaagagtgaaatggagcaggaggggttggggctgggaatgtgggtgggagggttgtgggaaccaggtgggaggagagatggcctgcgccaggcagggatggtggagatcaagagcaaggcccagatttgagaggctttctgagtaaaattagcaggatttgggcgagaaaaggaaaagagagaaatgtatcatagtaggagagctgtttcctaaagttaaaataataagattgtaaatggcagtgctgccagaggtcctttcccagcaggataagaaggtttccatgaggaatccagcgtgggaaagacagctggagccaaaggagagatggacttggccagtaagagaactggaccagtccctcaggagggagctggagagggaatcccctggcaggttaaaattgcaaggaatgggataacacagagatttgcctttcactgactgaagacagagtgagagaggagggaaaaggaagagtggaaaaggagtaagttggtgtgttggggacatttgggggctgcatgctttcaagaatgccaggatgttatagatactcctgcctcataattacgtctaaccattcagataagcacttgaagcctcatttcaggttttccaaaaaaaaaaaaaaaaaaaaaaatgggtctactgaaaatatttaattggatacttagctagaggacttttttttttttttttaactttgtggactatgtcttttttggtgggggtggagggatttaaattgcatttttcttttgccttaaattgcctgaatggagggaatttgacctctgggacaagctctctctttgtagtctgctttttataaggatgtttcatagtttttaaagactctcaggactggagcatggagtttttaactaatgacatgtttcaaaagttttgttcatatttgtacaggtattatataaaacctgtgtttgttctgagagattttgtgatattaaacttgccagcacctctagacacctaacaatgtatgagtaatttctgcaggcttcccatgagatttttttgtgtgtacctgctttgtacaaagcatgcgataggggctgaatacaataccatttcttgattgtaagctctctgatggcttactcatcttcccaagcccaactgccaggtaaaatgccagtaccactataataccttatacgtatttaatcctcacagtaaccctatgagttagttacctgccatgtctatcctcattttgtgaataagaaaactgaggcattagaaagaaaattggcttacccaaagtctgaaggccaagtggcagacaggattcaaacccagacagcctgagactacagcatctgtactttattgttatactgtgctgcccttctgctcaggttgtaactatttaattcataaatatattttttaataaagtcatatagatgagacaacacacagtgataagctggtggtagttattagaattttaacatggattttagcacacttgcttataattaacatcacatttaaagttagtgtccctctatccagttttctttcataycttcccattgccagcacttcccccaaccaaagggagcctggttttgttttcagacccagctctctgtttcaaagacttacaccatagtgggccagcagggaaggctgaatggggttagacagccagtggaggtgggagtcaggaacaacaatggacaactggcatagaaggctacatggcacttactctccctggaaacgctccgtcagactcaggaagtgcggtttaatcctggttaagataattccatttttatgccctagaatagactgtctacattctccaacagaattttattttaaatgttaccctgagaagccctaccagtaaataacttggtgtgcattactttccctgttagctgaactgcacaaaataggggtttattctgccaccaccacctcttttccccttaaaaggctcttcaatgagaacctgagaacctgttgccccaacaggagatgcctggactgtggcccagccataccctcagtgggatttggaggaggagagaagactgtaatgcagtcaaaagagccactgtcgatcttgaaagaacatcaatcatacagatgccacaaagattctcctccccgcttcagttacaagacacaccttttggtatttattgtgaggcagccctgtacggagaaactaaaaataaaaaaagcagcaaatataagacgtgctaggatctaagttctttgcagatcttacttcacttaatcctcgctaaaaccccataagggaagcactactcaaatccacatattacagatgaggcaactgaagtacagagaggtgaaatgattcccccacggtcacacaggcaggaagtggtagagccaggatgcaatcccaggcagtcaggctccagagcccatgctttcacagctatcccttccctggaccatcagtgcctcaaataccccatcttgtttgcaattaggcagaaactgtttcaataaacaggggcttcatatttgaattagaaaactcagaggtttaatattmtcaccatagtggttgagaatctcttccttaacaagattcggcttttagtcaggcaagttgtctcccagatcaactgctggattaaaacttgctgcccctgcctttaagactactctgggagagggtccactctggtgctactgacagactgagccccaccaatgaggccctacttattgtgccctcacctccccaaagacccaggttgtaatgtgaagcacctgcagcaaaccatttctcacatgcccttttagcagggatggaatgggacaccttggcaggcaagatgaccttaagtggcaggggatatggtgctttgccacccgccacctccctattaatgtctttctgtttttccacttttgggtgtcttccttatatcctgtccatattctctggatgctctcaactacccttttttaaaatgttaacagctgggtgcggtggcttacacctataataccagcactttgggatgccaaggcgggtggatcacctgaggtcaggaattcgataccagcctggccaacaacggtgaaaccctgtctctactaaaaatacaaaaatgagctgggcatggtggtgggcacctgtaatcccagctactcaagaggctgaggcaggagaatcgcttgaacatgggaggcggaggttgcagtgagccgagattgtgccactgcattccagcctgggtgacaagagtaaaactccatctcaaaaaaataaaaataaaaataaagtgttaacagattattagggaactaacttctagtcctttggatagaactccacccagggatacttgccttctaagagatgactccgaacacctaaccatcacatggaagggcattctggctgagttctccaatatctggcagttctctctgctatgggaaacctcaggctcactgaaaagcccctcccagatgggttcagcagggctgcttgcccctaaagtggtattgagcaggatgagagagattggcctttgatggatcaccagtgcccacatctccttcttcccactgcttttcctctttaacacacacagaccccttctgccaggttgactgaaagtaggggtaccatgcttggacatagccagccctgttcctatagtgtagagcagaggtccccaatctccagtgtgcaccagaatcacctgagagcttgtttaaaatgtatattcctggtgcctagacccagggattctgatttagaaagaatctacatttctgttaagtacccctgatgaatgtgacgtgaaagtgtgagaaacactagcatagagtcactcctctacttgctttcagtgggatcctctctgaatagaactgggataaactcattgctttcctgaagtcctaccaatgctcttgtcttttgcatgtgcagtaggaaagcgtcattagtgcagtcaagcagtcttaatgtaacgcagctaaacttgaagtcagtttttaaaaccctccaaaaacctcctaatttcaacaaagcagtgtcattcagcttctgtaagttactgatgggtgagatgcatcactgctaggattttgggaaatgtgtgatggacaattaaaggaaacaacctttgaaagcctgaatgcactgacagtgaaggacgtttttattggcagaccttgactgcttagtcaatgtgtggaatccaaacttggctccaaaatatatacattttttgagacagaatctcattctgtcacccaggctggagtgcaatggcacgatctcagctcactgcatcctctgccccgccaggtccaagcagttgtcttgcctcagcctcctgagtagctgggattacaggcacgtgccaccacgctcagctaatttttgtatttttagtagagacggagttttaccatgttggccaggctggtctcaaacccctgacctcaagtgatctgcctgcctyggcctcccgaagtgctgggattacaggcctgagccactgcgccttgcccaaaataccacgttctttaagcacaccaagagtacagcaactttaggatctcaacttgtcatattctacctccttgcctctgtttcattatctttgaatatatgaatgtgtctgtctctttctgtatatctgtatctctctctcacacataaacacacacacatgcacagaatctcatagagaagtgttcttacatatcctttgactcagaattaatgaatcagatcatcttctataaaaattcttaagcttattttttatactgcaaaaatagtctgcacataaaataaagaacactgttgaccagttttcagttcagcaagatagaaatttaatacataggtacgtgtacaaaaattaaggaagtgtcacaggaaaaatatcacttacctacttaagagagtgccatgattgaagtcaggagttatataatcactttgaattcaagccagttcttcctgtttaggacgaatactcccttttcttgtgaaaatgttaaccatttcaccattttctctgctgaaaacctttcctaatccatattactgtaataatagcatgttatagtctgctactgatatctctattaaagctatataaaatgttaataacaaatgccagaatttaacctttaattaaattccctgtgtcataacctttcttagaaccctcttgccttaagcccacttctaacaaaagctggacctagttggcaggcstcagccaggccagtatggtagagaggagaaccctggcctaatcttcaaaaagcttgggtttgagtctcagctatgtcactagctaactgtatgatctcacatagaccagttaatttctctgtaccatagcttccttgtctaaaacaggaagacagaacatctacctctcagagctattctaaggtttaaatgaggtaattttgcaaaatgccacatgtagactctatacctcgcaagtggcagtttcccagaaaatgtcagtgtgtttcccttactcctcaagctgaaggaaagggattgacctaaattattccctgaggcttcatctagctctagctgtctgtgcttttgagaagccacttacttcagggtgtggagaaaacaaaaggaaaaaatactgggttagtagggtttaaaaccctctgtgaaaacatttcagagttgaaaacacaatgaaaacaaaaaaagatcaagaagccaggaaatcatcaccttggtccagagaacaggaaaactaaaagattcggtttcctcaactgaaagtaggagcagccaggaaggttgggaaaacaatgtttggttagcctgataaagatctgtagtgacgatgctaagcaggcatggcctgaccattccaaccaaaaaaatgtttaggtctttatttatgtatttgtttttcgtgatggaacatcagggcaagaaaatgaaataccaacctagtgtggcattgacaacctctgagctcttttgtcttccctgcagttacagtcagggaagcagccatgaacatgcatggaacgtgcagactgtgtagcacgttgggtctgtaggatgctactgacatgcactgaaaccaaagctgtgcatccctaagttgtagaggggattttggagcctgatgtctggatgtctgcactgcttatagcttagcccaaaccccaaaaatcagcatgctcgcaagtaggctgggaagtctagtacgagggcaaaattgacaactcttgttttgaaatggacaagctcaggcttattcatcgtgtcatcagacttgttcaccatgttatggctacagaccttcaaggccatttggccatggtctgagaagtatactacagggtcactgcagatcctgagtaggggaagctcaggaatcctttaggcatccaccgttggtggaagtccagaaaatactgcccttggtaatcaggcttcttctatctttatacatgtataaatatatataaattacaaatatctttatatattatataaatgtatataaatatgtaaagatataaaaatatataattatatttaatatttttaaatatttaaatataaatacttaaatatctatatataaatataaataagatttaaaatatatatttatataaagatagaaggagcctgatatatataaatatataaatatattataatatatatatttatataaaaagatagaagaagcctgattaccaagagcactattttctgtgacccttcctcaatttttgccctgcccagtctactccaagtgatatataagactggaagacaaagagaccaaagtggatggctgggttattgttatctggtatgccctgaagggtaggctaagtcatgccaggtcaatgctatgcctgtgacagagtaacaggacttgaggacaagattagcatagcccacatagtctatgtgtttcataaggctctggcctttgttccacacagtacccttaaagtttgaaaaatgccacaagtatactactttattctttgatggataataatagctaccatttattgacacattaccgtggagcaagcactgtgttaaatgctttcatgtgttatcttatttaatctccccagcagatagcatttcccctgtgttacatttgcttctggtttggttagcattccccatccctaacattctccacttcaccgctaccaattcccaagaagagaatatgttagaactgactctccacctcccactaagaactggcaggaccaattctgtcttgccctgcatctttgtttaggttattcactacaagaagttcagaaccctgagatacagtttcaccctggtataacatttctatttagctataatctgtctcaagctccccctcctcttcaaccctcctcttccattggtcctcagtaacttcgagtcagtccacaaaatcttcattcgtcatcctctttactgcctcttgctcttatcagtatctgattctgcccagaataccctaccaattcatcagatacttgcttgtaagtaagtcacctcctcaggaaagtctttgtcttctatatcaccccatttccttatcctgcttttcagtcaatgacagacaaacaatagtgatcccgtaagattataatagagctgaaaaattccgatcacctggtgacatcatagatgtcctaatgtagcacgggtaaacaagcctactgcactgccagtcatgtaaaagtatagcacatataattatgtacagtgcataatacttgataataaataactatattactggcttatttactatactatactttgtatcattattttatagtgtactctttctacttatttaaaaaaaaaagattaactgtaaaacaacttcaggcaggtccttcaggaggtattccagaagaaggcattgttctcataggagatgacagctccatgcgtgttagtggccctgaagacctttcagtgggacaagatgtggaggtggaagacagtgatattgatgattctgatgctgtgtaggcctagggtaatgtgtgcgtctgtgtcttagtttttaacaaaaaggcttaaaagttaaaaaaaaaagatataaaaaatctttttgttcacctgtacaatgtgtgttttaaactaaatatttctacaaaaatcaaagttttttcaaaaatttaaaagtttataaagtaaaaaaagttacagtaagctaaagttaatttattattgaagaaagaacaaaaatgttttcataaacttagtgtrggctaagtgtacagtgttcataaattctaccatagtgtacaggaatgtcctgggccttcacactcactcaccactcactgactcacctagagcaacttccattcctacaagctccattcatgataagtcccctatacaggtgtcccattttctgtctttcatacagtatttttactctactttctctatgtttagatgtgtttagatctacaaatatttaaccatgtgttatagttgcctacagtattcagtatagtagcatgctgtgcaggtttgtggtctaggagaagtagtaggctatacaatttagcgtaggtgtaacatccagatttttataagtataccgtgtgatgtgcacacacagtgaaatcacctaataatgcatttctcagaaagtatccccattgttaagcaacacatgactacatatctattattttctgcctactcactggaatgtaaaccttacaagggcaaggacttttgttcactaataaatccctaatgctcagaacaatacctgtcatattatctttgctcaataaaatatttgttgaacgaatgaattcatgacaggggaaactgagacatagcatgggtaagtaaactgtcccaggtcacattgctgttaagcagccaaccagggtctgcatgattgcaaagccttggtgcataagcaccatgttattcagcctcttgatgaattatgtcaatgcacaacaagcaggaatattctgaccagaccagaataatcgatagagcaagttagagggaacttatcaactgggcaagatcctacagaaccgaagtttactgttcttctcagttatttttttgattaaattggaaagtttttttgagttgtcaccaagcaaaatgcaagtaactaatatttgaggatgagccaataaattcagtatccttaaaacattagtgcattagcctaaatgaaaacaatttataacttgcttacctttttggtatggtttaaaagaagatgaaagctattctgggtaaagagaaatcggcaagtggctagatgactgtagtacgttcacgcagtggcacaattgtgcctatgtagaaacatggaatggatgtagttgtatacgtggaaaagtagaccccaaaatgctgtatacacaatgatgacatctctgaaaattctgttaccaatagaattgtaagagaccttgggttcatagatagtcagggattcgagggtttagaatttatttggtgatttaatgttgttcttgatattttgatgtttctgtttaactgttactcctcagatgattaaataaacataaaaaagaagaaatacaatgtaccatcatgtgagccaagcaaatacgtcatccccatctgctgcacatccttttccttcctgctgtccacctccactgatcgctgacattcagcaactgcctttcccaggcttcagcccggccttcctgtcccctgactgtaacctctgcatgttatataccacctgactctaactgcattttcttctttactcccttgattactctcagattcttctctttctagttgcctgaggcttttgtcccactgcttttgccctcctgtcttagataagtccttttgcttatcctttccgtaccctggagcactctcccagcctctttttgctgtgcagtcgccatccatgttttgccctgtctgactcctatgcccatggtccagtgcttttagccctgtctgaggaaatcctgtgactgctctgatgtgatctggccccctctgtctctacatttgctgctctcaaatctttgttcctcccatctagttagggttcttgatagcaaactatagaaatctactctggctgattgaaacagaaaaaggatttagtgaaggctattgagaactcttggaattaccagcaatgtcaattaagtaggcttagaaaatatagagggacaaagtgggaactgagcagccagaaccatgaatgaaattctatggccacagagctggtttcaggagatgctgctgctactgttgctggacagtgaacgctgcagctggcaccactggcactggatgctggacccctgccagcagtacctttgctaccagaacagagtctcctccagccctgcccctctgtagcactagctcctggtcagatctaggcagaaatagctgggcaagtcactggcccatctactagctgtaaggaggcctagaaaggagtatctcacttctgctgtgagaaaggggctttgcctgcaaccacagctcatactctgggaaattgcttaaacaaattctagacaggaacaaaacaaagaaaaaaaaagaccacatggtccattcctgatccataataattgttgtattaaactttccacaacttccttaaatcctgaaagctacttcttccaacctctcactcagcaagaactctggtatatagtttaacgcaaaattaaactttagggatcacagatttatacacaaagatgttcataacaatatgatttagaataacaaaaaaggagtcagcctaaatttccaacaataaccatttccattaacaagagaatggttaatgagttatgagatctccataggattaaatatatgcagtcattaaaaaccgtgagtttttaaaaagtattttaaaaacaaatataactaactttactaatattatgtataagctctcacaattgcaaatatgcatatatgaacatatattagagtataaatatatacaaagacgtaagttagaagagaatacaccaaaatgttaagattggtgagattaaaaggattgtgttcttttttgtgcttctctgtatttttcacactgagatgaaaagttaatatttaaaagaggggcaaactttctatgccactatttttatcttttatcatattctcagtacaacttttcccaaaccaacctcatgaaccaaatactctgaatacttactattttctcctggtattgaaagaacttacccttttctatgtggtcatttcctccttcactatcagtttgttctcactgatgtttatgttcacatgtagatcattcattccattctgtaaaccctttccccagccctgcttggcccatccagctgacacctgagctcccctctcccacagcatgcttacttttcccctgccctgtattttggtccaatgactcactgaaatagccatctctgaggtttccattactcttctcttgaccaaatctgaagatcttttctctgtctctatctttgtagctctgctacctgcaagaaatggtattgatcatttcatcatctttgacacacttttagggataggcaagggaccttgtggttttcttcttctttgtctaaccattcttaaagcattttcctgactttgcttcctgttcagctttacagccaagcttcttctctttctttctttattgacaattcctacatgtcagtgttttctcccttcctcatttccccatttacctgtctacgtaatggagccaataccctataaacagaagcattgattttgacagaacccttgacctccaggtaggctacctacccgagccagcccagctttgacagtgggctccagttctctaccttcatccatggccccaggagctcaataaagctttccctgcagctgtgttcctacagttcatgacctctctccagccttcacctccatcagcaagaggctatcagaaagtctgtgtttgggccagtgccttagagttggactctgcttctctgtccagtctcttaaaattgaagccttaattggactcttcagctgcctttcagtcttaccttcatatgctctctcgggtcaccctcaactccgtgatctctgacctacaaaccaacccaggatgccaaagttcttagcccatatttggcgggggtsttttactggatcaggagtcaaattcagactactcaagttaaatacatcttttctatgcatttacttatttttcttatccatgagtttcctgaaaatatgtcttttcatacatgcagaatgttatgtttcagccaatgggacttgacctgtggtgacccaaatctacagaacaacaatcctgttgaaactgctcttgatccttgatctggctcatctatgctcatgaccttgtatttatatcagtcctgtcctctttccgttttctaaacccataacatwttatttttagtatcttagacttcctgcttttagagaagtttatttattgatttgttaatcatccaacagacacatattgaacccctactggttggtgctgcacatggtcagaggctagtcagggagttgaacaaaacaaagggctgtgtcacttagtatgcttctattgccagtgacagaaatcctgattcaaatgatttaagcagaaatagaatgtattccctcacctacctggcaagtctagggacaggtctggtttccttcaggcacaactggattcatggatcgtaatgctgcctttgggacctggcctgtcttcatctctcggctctgctctgctttgtgatggcttcattctcaagctctctacatggtggcaaaatggatgtcaatagcaccaaggccacatcctcctcagttccagaacagtagaaaatgtgcggctttctcagcagctccagcaagtgttctgctaagtcttgtggtttctgactggactgtgtgctcttccctgaaccagtgactttcacyaggggaattcgatgctctgattggtcagactggagtcatacatcctctccttacagctgggtgtggagtcaggtctacacaagcacttaaattgagagcgaaggatacagtggttcgttcccgaggaaaaggtgatggatgtgggatggttaaaaaaaaaaaaaaaaaagggccaggcgcagtgactgatgcctgcaatcccagcactttgggaggccaagacaggaggatcatgaggtcaagagatcgagaccatcctggccaacatggtgaaaccccgtctctactaaaaatacaaaaattagctgggtgtggtgatgcatacctgtaatcccagctactcgggaggctgaggcaggagaatcacgtgaaccagggagtcagaggttgcagtgagccgagattgtgctactgcactatagcctggtgacagagcaagactgtgtctcaaaaaaagaaaaaaagaaaaaaaaagctgtcagtcaaccacataagtgtatggttagaattacagatggtcaagtttggcaaaggaaacatttgagtcaatatagggtaagcaaagacccaytccttctatactcccttgcttcttcctttctttcttcctttcagcaaaatttagtgaatggctgctttgttctaggtgcagagtatacactgttctagaagcggactctgcccataaggagcttacagagtagtgaggaagagagatggcccgggtggtggtgtgagacacattcactgataatttatattttgagaaatggaagtatgaagagtatttctgtgttttttaaaattaaaaagacagttccaatcattatatcatttaacatctttacttagactgtctcagtgagttctgctttgttcaatgcttggaataagtctctctggtatgcttctttgaataatgaagactccataatccacttttatttttttgcctaggctgctgcaaaaagaggtaaaacctttgtgtaattaaaagtagctttccttagattaggtttcctttgagattagtttgctttttttttttcagtccttgatttatgggtttgtggttttattgtaccagggacttttgtagtaaggtgcttccaaatatacggatgcaagagagataaacaaaatacctttaatttacacttttatcttaacagtctctacttctgacctgtggcaggttgttaatgcatctcccagcaatgccagtcatttcccttcccatatacagacatctctagctgtgtatacatagtttgtgtatagagagttgactagatgttgaaatgaacacatggatttgtgcatttttttaaagaggaacaaatgtgaaattctttctgtgacattcaagatccagcaatccttgcattattttttagctgtagtttttattttgttctgtattattgaaacaaagactaagaaaagaacacaaataatccaaggattagggagtgcattaatagagtggttgtcaactggagacatttggcagtgattggagtcattcttggttgtcttgattactggaatcttgtgggtagaggccagggatgctgcgaagcacgctaagtaagatgcacaagacaggcccccataactaaaatatccagtccaaaatattagtagtgcctggcaataattggatttttggaattctaaacattgaaaagattcagagcaagtttgtaatttaggtttaagacaaadaggaaaattgtagagttatagaaccctgaaagacatttagtccagcctacccattttctagtaaggtaactgctagaaataaaaaaaaagtgacctgaagcaacgtaactccttcacctcctaaacatgtgatcaagcaacttgcccaacttctgtgtgcctgccttttctcctctgcaaaaagggatgatacaacttgcttgtgctcactttggcagcacatatactaaaattggaatgatacagagttattaaaaacaaaaaaaagaaaaaaaagagaacttgtctcaaattatgattgctgtgacgattaattaaaatgtaatacacgtaaaatgtttagtgcagtacttggccatagtgcgttgtgaataaatagcagtggtgagggccgaggtggtgattgttctttatgctgttgcccagaatcacagagctggtttgcagtttgtttaaccttgttcccctgactctcagttccattttctattacactgccttgggggactatgaagaagggttataggggcaacttaatggagattaaagaccagtctggacagcagcttagtagctggtaattcaagggaaagtctgaagacaaattctccataaaagacagaaaggggatttgtagatggtaggtagagagctttgaggaagacataaggaagattggtctcatctaaaacagactcttttcccaaagctctgtgaatggtgtttcaggtggtcacacctcctggtggagcctagaccaggtgacctttttcaaaccctacagccctgaccatgttcacatggaggcaagatggctctctttctgtcggggagagtccttgaaatgctggggtggtataaacaatatagacagtatatatgggaacctttccaactstaagattctctggtgctaagttttgtggaccttaggctggtaagatcatgtgacatagagcatgcccaatagatatgtgtagacaatcacaaacctcttgttttatggtttgtggaataaagtgctttattagattttactaattcagtcaacatgagcatataattaagatgttgtgtaaaatgctttttcctctgaaaacagtaatatcttaccaacaattctctgaaacaggttttctcttattttcttcaatggcttataaaaattcagctgggctcggtggctcatgcctgtaatcccagcactttgggaggctgaagtgggcagatcatgaggtcaggagatcgagaccatcctggctaacatggtgaaaccccatctctactaaaaatacaaaaaaaaattagccgggtgtggtggcgggcgcctgtagtcccagctactcaggaggctgaggcaggagaatcgcttgaacccgggaggcagaggttgcagtgagccgagatcacgccactgcactccagcctggacaacagagcgagactccatctcaaaaaaaaaaaaatcttcatagtcaattaaagatattttctcccaaatcaagaataagttggtacattaaagaaaacagtgaatctcagttgattttgttttctgtatttttatgtgacattcaaggtccacagagcagtcagagaagagcaacacatgcctgtccgatgagtgctgactgagcaccaggaactgtgctagaagttagaagttaagtgatttgccctgagtcacacagttggtaagcaagagagccaagacaacacagctctgcctggctccraagtgcatgggcttaaacatgcgctgtttgctgcatcctggttcttgacagagaaggacttattagaatcataagcagatcccctctgaaatcaggctgttcttaatgcaaaatgcctcccttagattattattctgtattttcatttgaccttcaactttttctttcaggtgttgtgwaacggaccaggaacatgtgttcctatctgtgtatctgcccttctccttgggatactaggaataaagaaagtgatcattgtctacgttgaaagcatctgccgtgtagaaacgttatccatgtccggaaagattctgtttcatctctcagattacttcattgttcagtggccggctctgaaagmaaagtatcccaaatcggtgtaccttgggcgaattgtttgacaaatggcaactgacttctttagaattttgcagttaacagtagtatgtactcaaattggggggaaaaaaaccctacatgtttcttgtaaaggcgtctgacagtcctgagaattattgatggtaaggaataaaaaatgtacagatgactcagtgaagaaactgaggcttctcttatgaaacaaacattgataaacgtaactactaaatgtttatgcctctgtaaaccaaatttcttttctagataaaaatatgtattactacctgcaaattttcttctggctgttttagtagtattttttttacagaactaaatatagagtttgtatgattagtaatatttcctgtcctacagcttttttttttttttttttttttttgtaaagtattctgcattgtaaaagaagagagaaaaaaagtatttctgagttttggttcagatacaaaaggctttatttcctgtatggaaacagtgatgtccccagtgaatcctttcagcataaaggaagcagttatattaaattggcttcatgacaatttgcactccacaagcctccagaaccttgagcataaaccagtatcattttttgtacttcagtcttgctttttgagtagttggccttaatacagagtatcttttaaaatctcttgtttaggccggcatgacggctcacacctgtaatcccagcaccttgggaggctgaggcgggtggatcactggaggtcaggagtttgacaccagcctgaccaacatggtgaaaccttgtctctactaaaaatacaaaaattagtcaggcgtggtggcacatgcctgtaatcccagctactcgggaggctgaggcaggagaatcgcttgaacccgggaggcagaggctgcagtgagccgagattgcaccattgcactccatccagcctgggtgacaagagtgaaacttcgtctcaaaaaaaaaaaaaaaaaaacaaaactcaatgatgtagggactgttattattcccattttacagatgacttgtccaagatcacatgagtagtaagtagcaaagccagaattcaagttcaggtaaacctgacttcttagtggggccagtttcacgggtgtgtggcctgtgcagtcacacagagttctgcactgaagagggcctccacttggtttaatgttctgctgtgactctcttgaacttctgaatatttttttaaacaatgaacttatattttagaccctctgaattctttcgctggtcctgcttgagactgtgtttctagtggtgccatgtctactggaatagaagtacaatagttagtgcagtgcctggcccaggagctcctcaaaaacaggaattccatttccttccctctaacctctgcttctttaacaaagcagccaaaaaaaaaaaaaacaaaacaaaataaaaaacagaaaagagaagattctctcctgtagtatatataggttttttcctcttaaatcttttgctttataagtatgatataaatctaataaatagtgattagtgaagtgattgaatttttgtgaaaagagacatgattatccacgatcatgtaagattaaaatcctgaggctgatccagccttttttcttttttttttttttaaaaaaaaaaagcaaaaaaaacaaaaaaactgtcttctctgaatcatgtaacaggcgcatctgtcagccggacatcttcctaggtttttggctggagaaatgtgtagccgaaggtgtctcagaatggtgagaacactttgctgtctggatttagtgggcctggggcagccaaatgatagttcattgtgctttgattttaatcctcaaatctcagtcactggttgcttccctggagtatcagagcgtattagtatcatacaaccaggggctgaggtgaaataagccttgactgttctagaaagaaagtgattttttcagggacaacagcatctgcattttattgctgtttaaggctttctctgctctgtactttgttccctgagtggcactaggtaaatgaatggtaagggaaagtgaactgcgtttagtgaatgcctctctgtgctgtggggcagcttccctgggcccccacaggtaatcctgctgcagaggcttctgtcaggtcagagcttaacaaagatcagaccagagagaattgtagaaaagatgctataattttttccagaaacatatgtcccagatgttttgcagagccttaacttaagacagtggttagcctggaatgtcagagaaagaatgtgtatgtgttatatcaccaaaagtttagaaatgttatatctttcataggttcaggctgctgtgtactcattcagagccaggctgagacatgtgttattgcatcttcctgatcattcagattactctggtaaacaagtgcatgctctgctgtgtgttactgttatggctaatttgagtcctcaaggtcccattagcagagggggctggtggcacaatttccctgctgtgcatttctgtgacattcagaaagatagtgcgccagtcccaactcaaactgaagaagatgagtagctagcttgtcccttccagtttctcttagaacactctgaatgcaacttttactgtaggagactgttcatgaaaaaattaattgaatcagtcttcaaatgagaggcagggaaaccacacatcctgcccacacctacttccctggaagatttctatctacagtccagctatcctaaaaggtctcagtagcttgccaggtcagaatgtctaactgtttcaaaaaggatgcccaaaaatcatgacaggaaactttagcctggaacgaagagtgctatgaaaccgtgtcaacaagaggagtggtgacaattgtgagttgaatagcaagatgtccttgctaggaaggagatgacccaagcttccccttataaaagcaacttggaacacatcattctacctttcaaagatacatggtaagttaaaattgagaaacgtacccctttactatacagttccttgggttgaatgagtgctttttttttttctgaaaagccccatcccccaaaaggcatttgatagcaatgtattaagcaccttttaccaacaataagaacatcattgtaagtgttaaagaaaattgtccttctccctacaggtcagcgtttgagcctcacggggtttcttcccatgatttcagccctggcgcacaatgagcagacacccaaatcttgtccgccttcaacattcttttgttagggcccatccctctagcactctaaaaacaaatcatctacaactgtgttcctgctgcccactcattttaaacatgaatttgacatagctcctccttttcgcactggagtagttaactaatgctagcccactagcttctatcatgtccctcaagcaacaaactttgggatcatttttgctttttcactctttctttacccaattataattggttgccttttttgtttcattatccccagaattttctcgtcttcctcttctctccttgaaattacttttactgttcctctcctttgtcatcacctattgattctgcctttgacttagttcatatctaccctttccttttcagtcccatagttacaacctaagccagctcttcaacaaaaatttcttgcttgatgagcaagttttattgaggaactgaggaaacacctgtggaaggaacaaatgaatgattttgttaattacttatgtttgtcttcagagacttcccctcatgctagttctgtatacttgtttcacttttttctttcttttttttttttttttttttttttcgagacagtctcgctccatcgcccaggctggagtgcagtggtgcaatctcaccttactggctcactgcaacctctgcctcctggcttcaagcgattcttgtgcctcagcctcccgagtagctgggattacaggcatgcaccaccacacctggctaatttttgtatttttagtagagacagggttttaccatgttggccaggctgatcttgaactcccaacctcaggtgatccacccatcttggcctcccaaagtgctggaattacaggtgtaagccacacgtccggcccttgttccactttttataatatttacaccacagagaggttaagtaatttattaaagattatagaactagaaagtgacaaagctcagatttgaaccaaggcattctagctccagccaggcttaccttaatagctacgttaggtgtttttttttttttttaaagaaaaaagaaaaaatgtcctcaaaaggaaataaatggggtaacagggtactatgacggagtagaaggtagttggtgttctagatagggaaatcaggaaaggcctttctaagaaagtggtattttacctgagttccaaaggataatgccttaaatatttgtcctccttctacttcactcccaacttagattttgccycacccacaaagtctttgtcttcatttagcttgagcaaattctctaaataactctgtgacatagccacccataccaaaggttagtgctgagttatataccatcgaattgcagtccttgttcttagaaacacctgtggaaggaataatgaatgctattgctgattatttatgtttgtcttcagggactgtacctcattctagttttgtatccttgttccacttttgatagtatttacaccacagctctgtacaaaacataggcactaattaaatacataaattatttggccaggcatggtggctcaygcctgtaatcccagcactttgggaggccaaggtgggtgtatcacaaggtcaggagttcaagaccagcctggccaagatggtgaaaccccatctctactaaaaatacaaaaaatttgccggcgtggtggcgggcgcctgtaattccagctacttgggaggctgaggcaaataattgcttgaaccagggaggtggaggttgcagtgaactgagatggcaccactgcactccagcctgggggacagagcgagactccacctcaaaaaaaaaaaaagaaaaaaattatagcttcagacttgtctaggctcacttcagttatattttatctagaccagtgcttcacaaacgttttgatctcaggacctcattatactaaaaaattattgaaaactggctgggcacagtgtttcacacttgtaatcccagcactttgggaggccgaggtggatggatcacctgagcccaggagtttgagatcagcctgggcaacacagtaaaaccccatctctacaaaaaaaatacaaaaattagccaggcatggtgatgcacacctatagttccagctacttgggaggctgaggtggtaggatcacttgagcctgggaggtggaggttgcagtgagccgagatcatggcactgcactccagcctgggtgacagagtgagaccctgcctcagaaaaaaaaaaaatatatcccaatgagcttttgtttgtgtgagctatatttgtcaatatttaccattgtagaaactagacaaaaattttaaacgcaagaatataaaaggacatattccactggctgtcagaacaatatcatcacacatcttgtagcatctggaaaactataccatcataagaatgacaaggaaaaggcaaataacatcttaatattactatgaaaatagttttgacctcataaacccctaaaaacgtcttgaagactccccaggaccttggaccacattttaagaactgctgctttacataatgtcacatcagcgaattcatctcttctttttttaaaataagaggcagggtttcactatgttgtccagactggtctcaaactcctggtctcaaggaatcctcctatcttggccttccaaagtgctggaatcacaggcatgcggcactgcgcccggcctatctcctctttagtcagtcagtgatctgtgtattagttttatcgctgtgtaaaaaattgccacacatatattggcttaaaacaatacattatctctgtaggttagaaatccaggcaaagaaggttttctgctcaagatctcaaaaggctgaaatcaagatgatggccaaggctgagttctgatctgcaactctgaatccttttcagataccttcagatggttgttggcagaattcagttccttgcagttgtaggatttgtggtggcctgcttcctatcttttaaggactcacatgactgagtcagtgtaatctcccttttgattaattcaaggtcaactgattaggatcataattacgtcccttttgccatgttaatgtaacataatcagaggaatgacatgtcatgatattcacagatcccacccatactaacggatagtagattatccagggcat

SEQ ID NO: 95534 - DNA, 36378 bp, Homo sapiens
cttctccgagctaaaggaggatgttcaaacccattgcaaggaagctaaaaaccttaaaaaaagattagatgaatgcctaactagaataaacagtgtacagaagcacttaaatgacttgatggagctgaaaaccatggcacaagaactacctgatgcatgcacaagcttcagtagctgatttgatcaactggaagaaagggtattagtgattgaagatcaaattaatgaaatgaagcgagaagagaagtttagagaaaaaagagtaaaaagaaactaacaaagcctccaagaaatatgggactatgtgaaaagaccaaatctacgtctacgtctgactggtgtacctgaaagtgacggggagaatggaaccaagttggaaaacactctgcaggatattatccaggagaacttccccaacctagcaaggcaggccaacattcaaattcaggaaatacagagaacaccacaaagatactcctcgagaagagcaaccccaagacacataattgttagattcaccaaggttgaaatgaaggaaaaaatcttaagcgcagccaagagagaaaggttgggttacccacaaagggaagcccatcagactaacaacagatctcttggcagaaactctacaagccagaagagagtgggggccaatattcaacattctcaaaaaaaagaattttcaacccagaatttcatatccagccaaactaagcttcataagtgaaggagaaataaaatactttacagacaagcaaatgctgagagattctgtcacccccaggcctaccttacaagagctcctgaaggaagcactaaacatggaaaggaaccatcagtaccagccactgcaaaaacatgccaaattgtaaagactatcgatgctaggaagaaactgcatcaactaacgggcaaaataaccagctaacatcataatgacaggatcaaattcacacataacaatactaaccttaaatgtaaatgggctaaacgccccaattaaaagacaaagactggcaaattggataaagagttaagacccatcagtgtgctgtagtcaggaaacccatctcatgcacagacacacataagctcaaaataaagggatggaggaagatctaccaagcaaatggaaagcaaaaaaaagcaggggttgcaatcctagtctctgataaaacagactttaaaccaacaaagatcaaaagagacaaagaaggccattacatagtggtaaagggatcaattcaacaagaagagctaactattctaaatatatatgcacccaatacaggagcgccaatacaaagagacttagactcccacacaataacaatgggagactttaacacccgactgtcaatattggatcaacgagacaaaaaattaacaaggatatccaggaattgaactcagctctggaccaagtggacctaatagacatctacaggactctccaccccaaatcaacagaatatacattcttctcagcacatcacacttattcttaaactgacgacgtaattggaagtaaaacactcctcagcaaatgtaaaagaacagaaatcacaacaaactctatctcagaccacagtgcaatcaaattagaactcaggattaagaaactcactcaaaactgcacaactacatggaaactgaacaacctgctccgaatgactactgggtaagtgaggaaatgaaggcagaaataaagttgttctttgaaaccaatgagaacaaagacacaatgtaccagaatctctgggacacatttaaagcagcgtgtagagggaaatttatagcactaaatgcccacaagagaaagcaggaaagatctaaaattgatgccctaacatcacaattaaaagaactagaaaaacaagagcaaacaaattcaaaagacagcagaagacaagaaataacacagatcagagcaggactgaaggagatagagacacaaaaaactcttcaaaaagtcaatgaagccaggagcyggttttctgaaaagatcaacaaaatagactactagcaagactaataaagaagaaaagagagaagaataaaatagatgcaataaaaaatgataaaggggatatcaccactgatcccacagaaaatacaaactaccatcagagaatactataaacacctgaatagaccaataacaggttctgaaattgaggcaataattaatagcctaccaaccaaaaaaagtccaggaccagacagattcacagccaaattctaccagaggtacaaagaggagctggtaccattccttctgaaactattccaatcaatagaaaaagagggaatccttcctaactcattttatgaagccagcatcatcctaataccaaagcctggcaaagacacacacaaaaaagagaattttataccaatatccctgatgaacatcaatgtgaaaatcctcaataaaatactggcaaactgaatccagtagcacatcaaaaagcttatccaccacgatcaagttggcttcatccctgggatgcaaggctggttcaacatacgcaaatcaataaaagtaatccatcacataaacagaacgaaagacaaaaaccacatgattatctcaatagatgcagaaaaggcctttgacaaaattcaacagcccttcatgctaaaaactctcaataaactcggtattcgtggaatgtatctcaaaataataagagctatttatgacaaacccacagccaatatcatactgaatgggcaaaaactggaagcattccctttgaaaactggcacaagacagggatgccctctctcaacactcctattccacatagtgttggaagttctggccagggcaatcaggcaagagaaagaaataaagggtattcagataggaaaagaggaagtcaaattgtccctgtttgcagatgacatgattgtatatttagaaaaccccatcatctcagcccaaaatctccttaagctgataagcaacttcagcaaagtctcaggatacaaattcaatgtgcaaaaatcacaagcattcctctacaccaataacagacaaacagagagccaaatcatgagagaactgccattcacaattgctttgaaaagaataaaatacctaggaatccatcttacaagggatgagacggacctcttcaaggagaactacaaaccactgctcaacaaaataaaagaggacacaaacaaacggaagaacattccatgctcatggataggaagaaacaatagtgtgaaaatggccatactgcccaaggtaatttatagattcaatgccatccccatcaagctaccaatgactttcttcacagaatgggaaaaaactactttaaagttcatatggaaccaaaaaagagcctgcattgccaagacaatcctaagcaaaaagaacaaagctggaggcatcatgctacctgacttcaaaccatactacaaggctacagtaaccaaaacagcatggtacaaaagagagatacagaccaatggaacagaatagaggcctcagaaataacaccacacatctacaaccatctgatctttgacaaacctgacaaaaacaagaaatggggaaaggattccctatttaataaatggtgctggggaaattggctagccatatgtagaaagctgaaactggatcccttccttacaccttatacaaaaattaattcaagatggattaaagacttaaatgttatacctaaaaccataaaaaccctagaagaaaacctaggaaataccactcaggacataggcatgggcaaggacttcatgactaaaacaccaaaagcaatggcaacaaaagccaaaatagacaaatgggatctaattaaactaaagagcttctgcacagcaaaagaaactaccatcagagtgaacaggcaacctacagaatgggagaaaatttttgcaatctacccatctgacaaagggctaatatccagaatctacaaagaacttaaatttacaagaaaaaatcaaacaaccccatcaaaaagtgggcaaagtatatgaacagacacttttcaaaagaagacatttatgcagccaacagacacatgaaaaaatgcttatcatcactggtcatcagagaaatgcaaatcaaaaccataatgagataccatctcacaccagttagaatggcaatcattaaaaagtcaggaaacaacaggtgctggagaggatgtggagaactaggaacacttttacactgtcagtggtagtgtaaactagttcaacattgtggaagacagtgtggtgactcctcaagggcctagaactagaaataccatttgacctagcgatctcattactgggtatatacccaaaggattataaatcatgctactataaagacacatgcacaggtatgtttattttggcactattcacaatagcaaagacttggaaccaacccaaatgtccatcaatgatagactggattaagaaaatgtggcacatacacaccatggaatactatgcagccatcaaaaaggatgagttcatgtcctttgtagggaatggatgaagctggaaaccatcattctgagcaaattgtcgcaaggacagaaaaccaaacgctgcatgttctcactcataggtgggaattgaaccatgagaacacttggacacagggtgggaaacatcacacactggggcctgtcatggggtggggggttggcggagggatagcattaggagaaatacctaatgtaaataacgaattaatgggtgcagcaaaccaacatggcacttgtatacatatgtaacaaacctgcacattgtgcacatgtaccctagaacttaaagtattataaaacaaaaagtatagacaaatcttattcaatcttgagttcagaagatagttatatcgggtttcattatagtattcttgctatttttgtatatgttggaattatttacaacaaatgttaattgtatgttacagtgcatcaaaatgtgtttaagtagtggtggtgcttgtgggtagctctttcactataataaaaaatcaatatccaaaaaaaaaaaaaaaaagcagcgcaagctcgttcaatgaactcttaccatcattcattcagccaacaaatatttactcaacatcaggctcaatttctaacttcctagaaagatcttttttcccatccctcccctaattcttaccattttaccaactggttcatctctcttttcaatagctatattgtccccgcttataatgagaatctcattttgcctttaataatctgattcacctcaacgaatgtgaaagattgttgaggaaagctcaatacatgttcaatttgatgtttataccgagtccaccaccacacgtgaaatttaataggggtaaataatctcgaccacctctaaaggggtgggtgataaaagctttctgtgatctcaccggctcaagtgtcctctttaatctgaattcatctggagaataactgccctatgatgttcttataaaattacttgtttcctgtgcttagaacttgtctctgggtagagtgtacgcgtctcaagggcaaagactcagtcttgttcgttgacttcacacactgccagcaaataatgtgaatcaatagacctttaacggatgaagaaaaattagcagtttgggagaaggtccttgaaggtagcaaagcgaaaagaagaagggggcgcttgcgcataaacagctgcttctgagaacgaaaactacgtagcatttccgagtcccggtggccgctcaggctgccctttaaagagacgtgtaggaagcccaccctggggcggccgtgggcggagccgcgacctgaacgccgggagacctcaccaggcggaggcggtgtctacctcaccaggcggaggcggtgtctgcctcgcgctgtcctctgaccgccagggggagccctgccgcgcgctgcgctccgggccgcgccgccacgctctctcgacccgcgcgcccgccgcgcaccacccgtcgccacgcccgccgcaggccaagggccagtcacttgcgggccggcgtcccgcagcccattcgcgccccgcccctgccccgccgcgggatgagtaacggttacgaagcactttctcggctacgatttctgcttagtcattgtcttccaggaaacagctccctcagtttggaatcagctctcccgctgcggccgcagtagccggagccggagccgcagccaccggtgccttcctttcccgccgccgcccagccgccgtccggcctccctcgggcccgagcgcagaccaggctccagccgcgcggcgccggcagcctcgcgctccctctcgggtctctctcgggcctcgggcaccgcgtcctgtggggcggccgcctgcctgcccgcccgcccgcagccccttcgctgckcggcccctgggcggccgctgccatgggcaccgacagccgcgcggccaaggcgctcctggcgcgggcccgcaccctgcacctgcagacggggaacctgctgaactggggccgcctgcggaagaagtgcccgtccacgcacagcgaggaggtgagcgtggcgacactygccgcggggctcccggggcaggcctcgggcgsggccgggcggttccggcaagggagaagcgcccgcgggcgagggagggtggcagggcctcgcgcgcacctgggctccgcccgcggtcagatgctgaggccagtgtcgacgcgaccttgggtccaaacccgctgccgagggcaacgcgtctaaaaaacttagccggtgcagctgcgcactgagtgacacctctctcggtgcttaaggctggtagcaaaactctcaaacatcctgggtccctcttcctggcacggaggtcacagagggccaggacgtcgctccgtctctctccacatctctcgcttccttcccccaccctgtccaggtaaaggaatattttcggagattatcctttggtgcattcagatgaagtagtattcatagtacacctaacttttagaatgttgacattagactctctattgcagtgaggcaaatgagtaagcactcaattttggctttggaataccctaaataccctgactttagtcattacacattttatgcacttatctgtgcrtctatgtatgctttatcagtacacattctatgcatgtaacaatatcattgtacattctatgcatgtaacagaatatcacatgtgccccataaatatgtacaaatataatctatcaattcaaaaattaaagttttgtaaaaactggaaaataaaaagactagtcactagttggaggtgacagagattaatctggaattacaaacttgttacctatttgttggccatttctgagcggatagtcatccactgcacattgtgcatattggtggtatgggacaattttagtatttaaaaaataacaaaatctttagatttaggagctatatgactttggaaaattactttaaagttggataataacaccttcctcatcaggttgttgtgagaattaagaggtaatatatgaaaacgctcaccatgcaggcatctatctccctgtcatctggttccatcagaaagataaatcttaattaagagaaaaaccttcctaaactatgtgtgtttagaaaaaccttcctaaatcagctgtgttcctaagtggtttctgctctcttctatgagatgttggtaacagaccatgcagcagcacacggcatccctctgagttaagtgctggacctgtgcccaggcctgttgttggggtcagtgcccatcaagagatgagaactcttgcttgtaactttagtaggaatctgagtctgtaccatattctgtgttcacgttccagctcagtgtgtatgttttgttttatttaaaccacctactttggctgtttctcccacagataaatatttctgtattcggtacatagactcttaatttcttccagtactgttggtggtagttcaatacagaattttgcacgtatattgatattattgggtgaaattttacctatctcacaatagcatactctaaagtagtgactcaaaagagtttctgactgcaaacacagtaagaagtacattttactttgcaatccagttaatagttgtataatcagtatatctgaaacaggtttcacaaaaagatattagcccttataccgtatattctgattttttcttttattttaatttttaaaatgttgatttcttgatgctcagagtcacacaccacagtttgtaaaacattgttcaaaggactarttctggtttctagtgttttatttagggtgcttcataacagtaggataaaactaaagaaactagaaaacatttcaggaaaacttgaaggaatggcatcatactgtagggaaactatgactgcttggtaagagcaaaaggggaggcacattttgtttctatgtaaaagaactttgtaacacccagagctccaaattgggatgtactacttggaacagttccgcttcactgaagaaattaagtaaactgaacaawtcacttatttttgagaaaatgtacgtgttgggtcaagagttcagttaaatttcttacaaggtctcttctagttctaattttttaaaaaatgttatgacctctgcccagattttttgtctcactggaattttatgaaatcaaatagtttgtaagtggaccattataggactgttttgcccagttctttgttgtaagggtgtttgaccggttgaatcatggtatttaaaaaattcttatacaactccagatctaatggtaggctaagttgtggtgatgcttatactcagtgatattgggtgtgtattataagaatgaagagagcggagaacaaacataaacattaatgttaatgacaaacattaacccaagtacaaggttaatgtttagtcaatatagcaaacatgtaatttacaagattaaaaataattaggcttgtgataaagtcaatgaatttcctacgtaattgtaacattagactgttttattatttgtcctgacattttgcagaatccaagattaattaaagaaatggtttcaagaagagggtgaatactataaaaatagacttaccttcctgaattgaggaattcatcaggaaagcctcargtgtgcaaatkagccatccttccagagggaaatttcttagaattatcccacgatttgagccaaagcacttccgatagaatttttaacctctagttggttctgctccttccvtttttactaatttttaagaaaatactatgacttataattgtatctggaatgattatcaactccttttcatccactgacttaaatttgattataaatatgctttacataaagatctagaccttataatttgaattcaagtgaattgttgtgactagcatgtaaattattattatggattgtaaatcttaacataggtagttctgtgcccttaaattgataaaccagttatctcttgtaatcatgtgtactaagatatacgtagtaaagtgattgtatcagtttttatcataagcagtcatagttcagatagttcagaagtttagtgtctgctgtttctattaggaaagtgcttttgcaattcaggggcttgcctctagttactcatttgtgttttcattgattgcccacagaagaatgcaaaacactgtgtccttggttatctaataaggcagtgatttcagattgccaggtttggcccattagtggtcataaatcagttcagtgagtcatggaccagtatattttttctaattaatatattggaagccattagagtgcctggcatgttgtgagcataaataccgctttatgactgttttgttccattatatgtatataggtctttgctcactatgtgaatgtatgtcttactttggactactatcaaataagtctgaaatacactttaataaagtatgtttgaattaatttacaacatactataatatttgtataaatttttttttgtttatctaagaaaacatggaagataggttagaggtgcacctaaatgttacgaaatgacttctggagtgtcatacaagttgagttctgcaagatatgtctatcctggtggttctcagactttagagtacgtagataaagtactctccttaggatgcttgttaaaatgaaagtccaaactgctcttggagaatgattcagtgggtctaggattaggctcaggagtctgaaattttaataaacagcacaggtgaatctgaggtaggatttaccagccacacttattctctaataatttaatttgtttgtctttgagaaatgtagcatagttktgatatgaattctagtcagacagcctgggcttgactccaagttcctttgtttataaaccttatttttgtttctttatgaatgcctttttttttttttttttttggaaatagagtcttgctctgttgcccaggctggaatgaaatggcatcatctcagcacactataacctccacctcctgggttcaagcaaaattgtcctgcctcagccacccgagtagctactacaggcttgcactactaggcccacatgatttttgtatttttagtagagacagggtttcaccatgttggccaggctggtcttgaactcctsacctcaagtgatttgcccccctcagcctcccaaagtgctgggattacaggcatgagccactatacctggcctatgaatgcttttgtgtctcaacagttagcttaaattttcactggtacaaaaaaagctttaaagtaattagacaacttctttagttcaagaacatttgagaaacaagagtaggatgaaaacaggcctgaatttatgtatgttgaaggaaacaaaaaccttgtaggattaaaattggggtttgtatggtatttcctgttgctatcttttttttcctgcttatcaaattaatayattcttattgtagaagtacagaaaagtatatagactttgattaacagtttcaaaatgcattccttttgcagcttcatgattgtatccaaaaaaccttgaatgaatggagttcccaaatcaacccagatttggtcagggtaagtgaaatgtgaatgcaaaaatcatgcaggtcaaaaaggaagtaaagtaaacaggaagttaatttcttcagttttgtgagggaagtcaaataggcaattagccataaactctctgtggttgatttgctgagacggcactctgatccagtaggcttatgcataaaacagaaaatctagaccgtaggcaactctttaaccagacaagatactaggattctcatgcttaattctcaccatggtttcctcactatcagtgttttatttcagtttatatttggtctaggagaggaatgattatcaattgtgattggtagattgctttagtagactcaacatcactagaagtaatttttcaaatgtcagtttctgatgaaacaataaggaactgtgttccactaaatgtcagtatatggctactatcataaatgttaatgttcaaaaccctaaaacacrttttgaaatccaactcagtcaaaggctcacagcacattacttaggctactttaaaagtatggaaaaggacatgtgctggaaatactggttcccctgggcatactgcaaccatgtaactctatagctactatatagacattgagttatggttttttttaaatcaatctctgtttctctgaaatgactgtttattctacttatgcttgacttgtaaacacttactgaacccctgatacgtgctgtgaaagtgctcaagaatcatgggaaagcctttgccgtttactttgtatgatattgtaaatgtaagttaatatgtatctgatttatatgtactaatattttctcattatccttgtaaattattcattaaaatacattcaaatagcctttgcttttttctgctgcactcargaaaaaaaaagttttggtttacaatgcttgtgattacaggctgggcgcagtggctcacgcctataatcccagcactttgggaggctaaagcaggtagatcacctgaggtcaggagtttgagaccagtctggccaacatggcgaaaccccatgtctactaaaaatacaaaaaaaaaaaaaaagccaggcgtggtggtacccgcctgtaatcccagctactcgggaggctgaggcaggagaatcacttgaacctgggaggcagaggttgcagtgagctgagatcacaccactgcactctagcctgagcaagagagtgagactctgtctcaaaaaaataataataataaaattaaataaataaataaataagaataaaatgcttgtgattataaaactaaatatactattgtcataaaatcagcaattatgctccttagtatctacccaaagaagctaagaacttatttccacacacagacctatgcatggatatttatagcagctccattcataattgctaaaatttgaagcaaccaagatgttcttcagtaggcgagtgtatatataaattatgaatgcatatataaactatccagacaatataatattattcagtgcttaaaagaaatgagctatcaagccatgaaaagacatagaggaaacttgaatgcatatttctaagtaaaagaagccaatctgaaaaagctacataatgtatgatatcaactatttgatattctggaaaaaacaaaactatgtagactatagttttgctagtctagtaaaaaaactagtaaaaagatcagttgttgccaggggttagcagggacggagggatgaataggcagagcacaggatttgtatgtcaatgaaactactgcatatgatattgtaatgrtggatacatgttattatatggttttctaaatccataaactatgcagcaccaagagtaaaccctaagataaactggacttgggtgattatgacatgtcaatgtaggttcatcaagtgtaacaaatgtataccactgtggtgggtatgttgataatgggggaggctgtgtggatgtgagtgtagggagtgaatgagaaatctgttcaatctaccttctacttgatattcttgtgaacctaaaactgctctaaaaaaaaagtatatttaaaaaaaaaaaaacaggctgggcgcggtggctcatgcctgtaatcccagcactttgggaggccgaggtgggcggatcacaaggtcaggagatcgagaccatcctggctaacacggtgaaaccctgtctctactaaaaatacaaaaaattagtcaggcgtggcggcgtgcacctgtagtcccagctactcgggacactgaggcaggaggatggcgtgaacccgggaggcagagcttgcagtgagccgagatcgtgccactgcactccagcctgggcgacagagcgagactctgtctcaaaacaaaacaaaacaaaacaaacaaacaaaaaaacccaaaaactaaatccccttacaggttaaagttcaaataacattaaaatccaaataaattaaaaagtaaaagaaaatgcttgtaattaatgtagaacgtgtttattatgtcatctagagtggatattattttcattggtttctttttagagtaaaattatctgctgtgctactgtttctaactcctcacatatccctccactgcttgtttatttttaatttttttgatcatgcttctttctaaatacctggtcaaaatgagatacattttcctagaaaatagatacacacacacaaacacacacacacaccccactttacctttatttcagagctttacaacccttgtgaagcccacccagacctcaggtagagaactctgttgtcttataggttctctgattctaaaaggcattatggataatagaaaattttataattaatcagaagcattaaattttatatttgttttaaatattgtgtttattataggagtttccagatgtcttggaatgmactgtatctcatgcagtagaaaagataaatcctgatgaaagagaagaaatgaaagtttctggtaaagtccagtcttttctgtttattttgttacatagcggaagygatagattttgttaggcattagaataagcctttctttgctcagacactaaatgtgggaaatacagaaattcttttttagcataattttacttaaactccaagatggagttataagaggtcagtgctggctattatataagagtcagaatagaacttcaacttgctgttcttcatgatgatgtcatcatgtcatgtaatttatgtgtcaaacttcagagcagtagaaagattaagatgaaggagatggaaaggataaagggaaggcttagaagcagcatccacccaaagcaagcataagcacccccttcctggtaagatactggtaagcaatgtgtgaggtcacctgggaatataaaaagaaacctgggcaagttacatgaagagaaagaaaatactgtaacacccattcaggaaatgtagtaagtgacaaattccagaaactgtactatactcaaggaatacaaaaatgaaaagatgcgccatctctgccctcaccttacaattagcatagcatagtcattaaaagcttgagctttgaagtttcggggtgtgcagattacaggctagtataatgttgggctaacaaagactttaacctccctgagtctcagttttctcttctataaaatggggatgtacctgtttctccggcttctttgtaaactggatgaaataacaaaagaagcacttagcacagtgtttgcctcaaagtaagttctaggtagctattatttgctaccatgttgttattattgtggttgttgctattttattattattgagatggataataataataaattacatgtaagatgagatagggtattgtctctttttaatctaattatagtaactaccatttattgagtcttgctttgtgccaggcactgtgcttggtactttatggttatattttctcatttaattctcaagacaatcctgcaagttaagtctgttactgcattgcattagtgatactaaataacttgaaggttgtcatacaaccagtaagtggttgaaccaggaatccactcaggtatgcctaactccaaaacccattttttcctgttaatttcacattgctgtttgtgttggaaaggacgtaaagcaacattctttctgaggttgactgtaattcatgatttagttccatcttgggtctcttagaagtcctcagttcctagagggcttgagatttttttataggtatcaaaattctccccatataaagagctttcctctttctacctatccaaaaaagcctcatccttcagagagaagaggccatttcagatggcacaaattcatggacagagaaatagtattggggggggctttcatagagttataggggctaaagttagaccaaaatagtaaatactgactctcatctagtagagaagctaggatggctgttcaatagggagtaatctcagggaagcagtgtttttagggagatcacctagcagtaggaaggaagggactcatataagaaacgtagaagaaaatgtgttgcatatatcgaatgtcagcactttatgtaagggtatttcattagccttatttttctccatttcctcttttgattttttttgttgctcttctgctactctacctgtttgtctattgaatacatttatttttttgaacagtgagtttacataaagtaaatatgtacatataaagttgaatttgaatgaaaccaaaacctcaatattacaaatatagaaaatgactcaactttcctagtaaccaaagaaatgacaattaatgtggtcttgggtaggtatgcattgtacctactaagttttaaaaaaaaattaataatagcatcctatgttgttagaagagcaattgttaattggtggtggtgtggtaaactggcacacatcttttaaaatataataagactcacacaaaacgtcacatgctttgactcataataacatttctaacaattcatccctgggaaattatatagtataatgctgaacaaaaagttactaagatgtttgttttggcattatatatgcgaaaacagaaaactggaactagtactggaacatttactaacctaaatgttcaataagtagaactcatttaataaatgacactcttcaaaatttacaaaataatattcaaccattaaaaaatgagcatgtaaaattggctgggcgcagtggctcacgcctgtaatcccagcactttgggaggcgagtcgggtggatcacttgaggccaggagttcgagaccagcctggacaacatggcaaaaccccgtctctactaaaaatacaaaaattagccaggcatggtggcgcaggcctataatcccagctacttgggtggctgaggcatgagaattgcttgaacccaggaggaggttgcaatgaaccaagatggcaccactgggcgacagagtgagactctgtctcaaaaaaaaaaagtatgtaaaattatacactaaaaacatagaatacgttcaaggccacccctaagtggaaaaaaagccacagaatacacagaaatctaaacagttatttgggtgatgagactggcaattctttttggtctttctgcttttataggtcttcgttatttctacagtaagcacatgactattaggataaaaaaaatcttggcctggtgtggtgctgtaatcctagcaccttgggaagattgtttgagaccgggagttcaagagcccctgggcaacatatcgagaccctgtgtctacaaaaaaatgaaaattagccaggtgtattggtacatgcctgtagtcctagctacttgggaggctgaggtgaaaggaacacttgagctcagaaggttgatgctgcagtgagccgtgatcgcaccactgcactccagcctggatgaaagtgagaccctgtctcaaaaaaaaaaattgtggtgattcacacctgtaatcacagcactttgggaagccgaagcgggagggtcctttgaggccaagagttcaaggccagcctgggcagtataatgagaccctgtctctacaaaaaatttttaaaagtaaagaaattttaagataactaaatactacatagacatatattttaaatatttattacataaaggtaaaccaaatagaagaggaaataatgttatgccctacttcatatgaccaaaaactggaagatagtgtctgaaaatgaaaatgattgtattgggaaggtagaattgtggccttttttttttttttttttttttttttcagttttcttctcattacattttcaatttagtctttgtatatagattttggtttattggagaatatataatgtgctctattaatgtttaagtcataaaaatataaatttcaagtaatttaagctccaatagttatctaacctgccttctaataaatgggaaataaatatttactttttgttttgataaacatatatttgttggcaactagcacatgattttaaaagtatagtggaactatacatttatgtcttaaaattaaaactataaagttatgtgactgggaaaggaaaaataattcattcaggattatctgacatcttagtattatagtagtgttaatactagcatatagtgaaatgtgtatccaaatgtagtaatcagttttgttttctttgttacccagcaaaactgttcattgtagaatcaaactcttcatcatcaactagaagtgcagttgacatgggtaagcaaaaactgaattttttatcttaatagtggactttaaattagtataggtgtattagttataacttgtgcttaggtccaggtaaaaagaaaatgagttgattccaattttaccttttaaagttctagcttagtttcttaaggcttctgtaaaatcatactgacttatgtagggtcatattttgatatgcaagaggaatgtaaaaggtgtaatgtacttaaatgttcactatccgtttggagatagaagttcttattcttagcccttttagtactagaggtgaaatatcaaaaccaaacaacggcaaaaaaaaaaaaatccaaaaaaaatccaagtatatctgtttttagcacttaggttattgtgatattaaagttattcaatacttaaataaaaaattattccagtatttacatatattgaaaacttaaataattggctctttaatgtaactttagaatgaataatcatttaaaataagctcttaaattatttttatagaattaagaaattatctacctctataaatatggattaagaccaaacattcagtttttcagtgtctcaagcttattctttgctgtgactactagttacagaatattaggtcataattcttgtgatcatccatatgcgatagtagtgagcaagtagaactggagaagaaaattttatgaagataagggagctactaaaaacttctgggacctaggaaacaagaagaaattttgttccctagaaagaggagcatgtagtagtagctgcaagctgcctaggaataaggcaggtcagagaaacccacttgtctgccacacagagcaagtaggtaaatgggcacttacacatttttgaaagatagaaatgttctaaatgaaaagtaaactatgaaataatctgttattttgaaaacaagtgaagaatatggacagaattcagtgggatactttgaaaacattagaaatatttgtttttatgatgtaagcatttattttctttgtgtcttccttcctatcagcctgttcagtccttggagttgmacagctggattctgtgatcattgcttcacctcctattgaagatggagttaatctttccttggagcatttacagccttactgggaggaattagaaaacttagttcagagcaaaaagattgttgccataggtacctctgatctagacaaaacacagttggaacagctgtatcagtgggcacaggtgagggatggcaggatcatgagcactccaggaagaacttgcccttttcagtctttgctgcacactgttgagcatcatgcacatagtggccacccctgcggggtgacttttccacatgtgggagttttgttttgtttctgcaggagttttgaggcaggttttatctaaatcatttgaggtttttgtttgtttttatttaaatatatctctgattgaactgaatgttaatcctggttaaaatgagtgacaaaaatactagaagatgtgtgttaaaacatttataccaaatgaattaaggccatttccttcagttctacttatgtgctgaaaacaataatacctaaagaaaaaccttacggccgggtgtggtggctcacatctgtaatcccagcactttgggaggccgaggcgagcagatcatgaggtcaggagttcgagaccagcctgaccaacatggtgaaaccctgtctctactaaaaataaaaaaattagccaggcatggtggcgtgcacctgtaatcccagctactcaggagggtgaggcaggagaatcacttgaacctcagaggcggaggttgcagtgagctgagattgcgccactgtactccagcctgggtgacagagcaagactctgtctcaaaaaaaaaaaaaaaaagaaagaaaaaccttctttttctttaggtactattagaccatggctctaatttcctaagtaagggaatattttatatataacagatattttgctgttattcaaagatgtgtaagactgtcagttcatacaacttgatatggagtgagtgtcataaattaattattcccactctctggtctaataacctacaaaattattaggaaagtcacttactagcgttttacctttactctcagtatttctttattccttttacttcttcttcagccttctccttttcagagctttcagagtttcttatggacaggaagacctagagaaagtatttccccttctccttgatgatagccagaatgaggacaagaaastattggagagacttagatgattcagaatgtaaattaaccagtgtagctactggaagctgtcaattcttctctttcaaaatgtgtctgattcatagccatattttatactttaacattaaaggtatttacttgyatttgatcctttacctttaagaactatttgctctgtagctgaaaccatcacacttaacaaactaacaaaaatcatgtttgtgttctaggcagatgtattagattgttaaatggttctagcaggagactttttaatagtgtagtaccaggctgggcatggtggctcatgcctgtaagcccagcactttgggaggccgaggtgggtagatcacctgaggtcaggagttcaagaccagcctgaccaacatggtgaaaccgcgtctctactaaaaatacaaaaaattagctgggcatggtggcaggcacctgtaatcccagctacttgggaggctgaggcaggagaattgcttgaacctggtatgtggaggttgcagtgagccaagatcacgccactgtactccagcctgggcgacagagcaagactccatctcaaaaaaaaaaaaaaaaaaaagtgtagtactgttggctttttcgttcccctagtgttacacttcctttccctattacatagggaaaaggtaatagggaattcctattccctattactactaacctgggttagaaaagcatatattaataaagatattaatgtaaaagtattttgtaaactttaatcactgtggattgtgatttttcatatgttctaaaattaagttattttattgcttattgctttctacttttggtattatatttaatttagyagtgatatcatgattttattttcacttctaggtaaaaccaaatagtaaccaagttaatcttgcctcctgctgtgtgatgccaccagatttgactgcatttgctaaacaatttgacatacagctgttgactcacaatgatccaaaaggtaaaactgatattttcattatagagattgatcataagcttttgtcttacaaaaaggtatttkttgatacataattttaaatgtggacagtgataaaaatacagtgttatctgaactattcttaatggttagttcaaaacctatatgccctcattttattttcagaaaactttatctctgtaccaatggggaaaaaaaagtgaagggatcatttcctgaacatctggtcttttgaggttcacaaatattaaactacacagaaaagatcttttgagacattctaaatagtaatatatataatcctatctagtatagcaaagactggaccaaaaggccacttgatttttwtagttttgagatggagtcttgttctgtcgcccaggctggagtgcagtagcatgatctcaacctgactgcagtctccacctcccggactcaagctctcctcctgcctcagccttccgagtagctgggactacaggcgcataccaccacacttagctaatttttctattttttgcagagacagggtttcaccatgtcacccaggctgggcttgaatttctggactcaagcaattcccccacctcggcctcccaaggtgctgggattttaggcatgagccactgtgcctggacaaaaggctactttattcaaggagataaatatctggaaaaagtggcacatgtaatttaattcaaaacttaataagcatcttaggataggtaagtaggtattttattaagacgtttagtgttaatcagaaatatttgattaatgagaatggcttgtctgccttttatagaataattttttacaacattttgtaagataactagaaagacttggaagataatattgaacataacttgcaaagataaatgtttcagagagcctgtatattattaagtaatgtatattactacatatttttggtataaatgagaaatgtttggttataagtgagaaatgtcttgtgaaagttttaattctcgatgacatttttatagaagttctgatttaataaatattagaggaaattatatttcatagataattcccgccgaaaaaatattcagcttttatttccatacctaaaaagatgacacaatatcagtgggttgattcagtttgctcattttaagaatgctatggataatctattaagactttatactatttattagcagtctacttcattctcatttcttcactgtttcatcagaggagggggagatggaggagaaagagttttaatagttatttttccttgaatgccaagcatcatgccaaatgcctcagagagattatctataatcctcacaacaacggaaactatacattttttttgtcaggaaatagagcctcagagtgaaaggaactagccaaggtcacccagctggctttgggcaaagtttgaacttggcctaagtcttggattattttggagccttttccactatacaatctctttgatttgaaacattagtattacagtattacagtctgaaaacttcatccattttcatttaaatcataccagaataaaatacagtgacttttgccttcccagtagagctttcacaatcaagtaaattgattttttaagccattttagtgaaaatctaacaaattgttatgctgatttattctgaactataagtcatttaaattttaactttccatatgttggcagatgtcatgtgtctgtttactttttggaggctcttctaacagtaattgttaccaacagctgatgatccagcctgtaccctcttctagcttcacttgaaaaaaactcaatccttttactagtaggaaaggaartaggaaaagattaaggttcctagtgttttattttcacatatctaaatgttgacatttagaatgtgtgctaatacattattgttatggcaaaatatattgcatatgtatatgaggagagagatttaatccttttttatattttttgtattacataatttgatacttagttgtcttttttaattctaagacttttggtgaaaatgtataggcttatcctgcatttatcattaatgaaccttcagacactttaatctataatgaagcaactctcgatttaatttgtcatgtttactgactaaagagttcaaccataattaaattttaaaagcagttaaatgaatagcatagtctctgattttgtgtcatattttttatttttttaagcaaccaaactgaaaaaactgtaaaacatttaactctgtaaaatttaactctgtaaaactgtaaaacatttaactctgcttgtcatctaaaatagaattttgtttataaattccctgaaggtctacccctgttctaaaaattacccttactccccataatgggtttattttccattaccctttgttctagaagtgtaataacaatttaactagagagtaaaattgtaaagtagatgatcctgaatttagaactttccatttttatttgttccccgccccccatttcgattaaatccaatctgtattatgtctctttccctcagggtcttctctgttagaaaatctgataaacaaatccatattaatgttacttttccaaggagacatttgtgttctatatatgaaaactaccatttactagtggtgtgaccttggccaacttaccgaacctctctgccttggtttccccccataaagagataatagaatctatctcatagggttagcatgtggattaactgagttaatacatgtaaagtactcagaaaagtacctsgcacatgaaaatagctaacattgattgagcgtttactgttaatgctattcaggtatcacagcagtttgggagtaggtgggtcctttagcactccgaaatcaaactgtgaagatgctcacttaatccctatctgtaggttgcttctgaccccagtggaatctttccatattgattgatgcatttaatagacgtttgagcaccatttgccagccattgttctgggtactagagataaaggatcaagtcagacaaaaaccaaccctcatggaatttatattctaatgggaggagacagacaataaaataaatgttacatatgataagtggtagtatatgctatggagataacttggctgaaggagaaagagtatccaagttaattgttgttttatatggtacagtcagagaggcctctctactaagggaatgttaatcagagacctgcaggaagggagtgagccatgtgaatatctggaaaaagtgtgttcaaggaaaaggcagaagctaattcagaggctccaaggtgtgaatgtgcttgaggttttcaggatacagcaaggaggtgaggccagtgtggccagaggagtgaggcagtgaggagaggagtsgtgggatatggcatcagagcagtcatagagagcttggatataaacttggaatttgctgggcatggtggctcacacctgtaatcccagcactttgggaggccaaggcrggggatcacttgagtccaggagtttgagaccagcctaagcaacatagtaagacctcatatctacaaaaataataataataataattaaattagctggccttggtgacgcacacctctagtcctagctactcaggagaatgaggtggaaggatgcattgagcccagaagtttgaggctgcagtgagctgtgatcatgccactgcactccagcctgggcaacagagtaagacattgcctcaaaaaaaaaaaaaaatagaaaagaaaaaaagaattggcactgcggcactctcaaattatcaactgctggtagaagtgtaaagtatagcctttctgtaaagcagttggcaatatagcgtgtatctagctttaagaatgtacttgtactttggcccttcattccacagccaggcatgcattttaaaatgttcatcatctgcatcattgtgacggtttgtttcttccatatttggagataaatttatgtgtagactttttttttgtaagacatagttgataatgaaaatttatttaaatggtcttgcaatgatttaagtattcaaatgcttaaagaaagcattgctggtacaaatatttctatttttagaaagggtttttatggatcaatgccccaagtgtcatcagagccattggtgttttcatttttaaaatgtcacctgtaaaatgggcattatttatgtgtatatggctttttttggcattcctgataaatgtattatataaagtctatacattggataataacactagtatatttaaacttacagacttatttgtaatgcaaaccaccattttaatgtactgtaattaatatggttataatatatatatagtccttctgtcctaccatcacacaactttttgtgtgtgtaataaaccgcttttggtttgaaaatatttttcgaggccgggcacggtggctcacacctgtaatcctagcactttaggaggccaaggtgggtggatcacctgaggtcaggagttcgagaccagcctgaccaacatggtgaaaccccatctctactaaaatataaaattagccaggcatggtggtgcatgcctgtaatcccagttacttgggaggctgaggcagaagaattgcttgaacccgggaggtggaggttgcagtgggccaagatcacaccattgcactccagcctgggcaacagagtgagatgccatctcaaaaaaatatatatatatatatattttttaaaaaaagaatgtttatcctggcattattcttattagcaaaatattaggaaaaacataaatgttttgaccaataataaggaaatatatgaattatgatatctatgtaatatagtaatggggaaattattaaaaatgatcttttcacagactattacatgggaaaatattcacaatataagtggaaaaagataagcaaataaggctttaactacagtgtgatttctaattttgtaagatatggatatacacacacacatacagatataagatctagagatatatagagattcaagatatggatgaagatatatatatatatatgaagatatatactcatatacaccaaaaaagttgtaaggaaatgcatgacaatgttatatcatctccaattgataggattatcagttactttttttttctttagactttcctgtattttccctgactatacattagaatcacctggagatctttaaaaaactgcagatgtctaggctccactcaccaraagttaagaattaaataggctggggtacaggtgtagatactttttaaataactgcctgggaatttctaatattctggttcagattcatagcacacacatgaagaataagcatattatatattaaatgttgaggtgtttcttttgttatgttaaatgcttacctacatactaaagtgcttttttgttttccaatttaacacgctggagttttgtttgttgttgtttcttttagaactgctttctgaagcaagtttccaagaagctcttcaggaaagcattcctgacattcaagcgcacgagtgggtgccrctgtggctactgcggtattcggtcattgtgaaaagtagaggaattatcaaatcaaaaggctacattttacaagctaaaagaaggggttcttaactgacttaggagcataacttacctgtaatttccttcaatatgagagaaaattgagatgtgtaaaaatctagttactgcctgtaaatggtgtcattgaggcagatattctttcgtcatatttgacagtatgttgtctgtcaagttttaaatacttatcttgcctccatatcaatccattctcatgaacctctgtattgctttccttaaactattgttttctaattgaaattgtctataaagaaaatacttgcaatatatttttcctttatttttatgactaatataaatcaagaaaatttgttgttagatatattttggcctaggtatcagggtaatgtatatacatattttttatttccaaaaaaaattcattaattgcttcttaactcttattataaccaagcaatttaattacaattgttaaaactgaaatactggaagaagatatttttcctgtcattgatgagatatatcagagtaactggagtagctgggatttactagtagtgtaaataaaattcactcttcaatacatgaatggaaacttaaatttttttttatgtgtccttgcttatagtttagctgtaataatttaaccttgtattcttgtgccatattctgtctttttattacttataaagacaaaccaaagtaaatctgaaaggagactagaagctttgaaattattgtttgggggttttataaaagcaactactgtcacctccatccagattcttttaaattattgatccatccatagtatatattgctactcattcaagaatcctcaataagtattgagtatttaccatatgttgggatactgtgggctctggagagaggagggggcaatagagctaggaattaagaatcagttgagtaaaatgtgtaatatttattccccattaataactgactaggaaggactaaaagccagaaaggggatgaaaaaaaaatccttaattcagggccracattatctacttaaacaactttgagatatggtcttaattattttaaagcagaataatataattgaaagtttatagctaaaagagactatataggtcatttagtataattcttcattagtttamgaaccacaaaattgcaaataaataagctatgaactttgatgtacactataaatctccttaattctataaatttgtgtctgtaacctgaatagtttgaaaacttctttaaaaatctcttgtatttcatccgggcgcagtggctcacacctgtaatcccagcactttgggaggccgaggtgggcagatcacgaggtcaggagtttgagaccagcctgaccaacatggtaaaaccccatctctactaaaatacaaaaattggctgggcgtggtggcactcgcctgtaatctcagctacttgggaggctgaggcaggagaatcgcttgaacccgggaggcggaggttacagtgagccgagatcacatcactgcactccagcctgggcgacagagcgagactccatctcaaaaaaaaaaaaaaaactcttgtatctcaatatttttaaaccacaggcctaaataaaactaattttgctcaagttttctcaacctagggaaaaagaactatggttccatattcaaaataaatattatagacccttttcctaagtaggattttgtggtttactgattgggtaatttgatcattaaaattatgtgaaatctgcccgggcacacctcatgcctgtaatcccagcactctgggaggccaaggcagatgatcacctgaggtcaggagttctagaccagcctggctaacatggtgaaaccctgtatctgctaaaaatacaaaaattagccaggcgtggtggcgggctcctgtaatcccagctactttggaggcgaggcacgagaatcgcttgaacctgggaggcggagtttgcagtgagccgagatcacgccattgcactccagcctgggcgacagagcgagactgcgtctcaaaaaaaaaaaraaaagaaaaattatgtgaaatcatgtgatttgcctgggaaaacttgtttagatattgagctacttatgccttctagcctttatattaattgtatgtaatgttattaaatatatatatagttcatctttacatttggaaatgcccaacatttttttcatataagtccttaaacaagcgttcattttattttaaatctatacagtgaactggccaagatattttaagagggaactttaatatcccatttattgtttttataaccctggacttataaaaatgggttgtttgaagggttattttgaaagtgggggaaaaaaaaacttagttgctaatgtatctaaacttcagcagagctttttggtgatctcctacctgcaccctcaactcttgacaaagaagcaagactatagattcattttctgaaggggatcatgtatggaattttttgatgagtttttacttttacctctctactcttgattttctattattgaatactcttttaaaacactgatttttaaggctttatatatgttttccaggctgatgttcacatctttttttcatgaactatcagaatatagtgaacacttttcaaatatttaaggacttaatgtttaaaaagccataaaatagagagtggtaatactaccaaataattacttaaaactgaaagctaagttatcaatagtttatataagagatgttttctgaggagatgtgcatccagtgagaccaaggtagaaagtttatataattgttttttttccagtaaatatgaaaaaaaaaagctgtagcttgtttattacatgtccaaaatacagtggagccttactttaacacaatgtactgtaacttggaatttgttctgttatgagtctatcttgaattcccatccatgaaactgtagtcaccaaaagcaacaagtattttcacatgatgtaaaagaccatactatgatggccattgctagaaattgaatcacaaataatagctaataatttttcatttttcaaaaaagatcatttggatagcagctatgtataaaatggaaaataaaaaattattctattttgcatgaatagttcagactttcccataccacagccaagcagtaactaaaattaggatcttaattttcaatgataaaaggtctaaggttcatttaattatgctcctttaacactgtctttctagatttttcacccagtattttcaaaatttgggaatrtaaacaattgatatatttattgtatgttggctagcagttcatccttctgcaaaatatgcattcagagaaatgtgaagcttgttttaatgaagacttaaaccatttgtgtcatttgtgttttcatattcaaatacaccaaattaaaattctgaacctatatttttcatcattaacttcctaatataccagaacatatacctttttcatgtaaagttggcaatgggatatggcagttttatttttgaaaaatatgtaacatgactttaatatttttatagttttcagaattagaaacataggaagggaaaatgttttaattagataagtcaactttttatgtgtctgtagtggtgtactataatagcaaattataaagcattattaaatgtttataataatttttaatattacctacattatgaatttaactaaaataaagtgtgagttgtatattttttaattgggttgtttcaatagctggaagcatcctgaagcattatattgatttttgaactatttgaactcaaactgagtatgatttgaaaataaattaataatttaaaaacatccaaatcataaagctatttatgcattmattcattccacaaagatttattgaatgcctgctatgtgttaggcactgtgctacagatggacacagatgaaaaataactcctatacccaaggaatatacgatatatttggggggaaagggaggaatctgtatgtgaataagagcaataaaaggctgcatctgttggctgggcgcagtggctcacacctgtaattccagcactttaggaggccgaggcgggcagatcacttgaggccagaagttcgagaccagcctggccaacatggtgaaacccagtctctactaaaaatacaaaaattattcgggcatggtggtacatgcctgtaatcccagctacttgggaggctgagggataagaatcacttgaacctgggaggtggaggttgcagtgagccgagatcacaccactgcactccagcatgggtgacagagccagactctgtcccccaaaaaaagaaaaaaggccgggcacagtggctcatgcctgtaatcccagcactttgggaggccgaggtgggcagaccacgaggtcgggagattgagaccatcctggccaacatggtgaaaccctgtctctactaaaaatacaaaaattagctgggcgtggtggcatgtgcctgtagtcccagctactcaggaggctgaggcaggagaatcgcttgaaccagggagttggaggttgcagtgagccaagatcatgccactgcactccagcctggtgacagagcaagactccgtttcaaaaaaaaaaaaaaagctgtatctgttgatagaagtaatgaaaaggactggggcatgtggaaggaagtgggactgagtagcaggttaaggataagaaaaacttccctgaagaaattagctttagactagggtcagatgacaaggtgtggtaggcattctgggcagaaacccttgtttgcctggtttgtaaatatgcccctattgaatgatggagtagttaatatgtaaactttagaagttcaaggaaaacatcttcaaaagcttattcttatagaaaggaatggcttctgttgagataagcgtaggttaagtttggaaaagtcataaaaagatgaaagcttgctaatttcctctaaatatatcaggatatggtcatatgtagttccgctaccagagaagtcaacaaaagctttaacatgtttcctcagcaatgactaaatgtgtaaaatgtcatgcaagattttgatgtgtctgctggtccattattttaaggttcatgttttacaatgaacattacttattttgattattttccctctttctttgctcactgttgattcttgcattctattcaagttttttttttttgttttttttttttttgagacagggatctcactctgtttcttaggctggtgtactgtggcatgatcatggctcactgcagcctcaacctcccaggcttaagccatcctcccacctcagcctctcaagtagctgggactacagacatgcaccaccacacctggctaacttttatttttgtagagacaggatctcgctatgttgcccaggctggtcttgaactcttggactcaagtgatcctctcaccacagcctcccaaagtgctgggattacaggcatgagacacagtacctagcctccttagtaattctttaccaaaggtctttagtgacagtaaattttctagatcccatttgtctgaaatgtctttattttgcactcaacctttgttttttgtttttgtttttgttttttatagagatcagttttcattatgttgcccagattggagtgcagtggttattcacaggtgtgatcatcgcatactactgcctagaactcctgaactaaacaatcctcctgctccagcctcccaagttgctgagactacaggcacatgccaccacacccagcttagtttgcactcaatcttaaatgatcatttgacattacagaattctaaaagcccccaaatacaatattgaaaaccagatacaacccaaatgtctatcaacagctgaatggataaatccattgttatatagtcatacaatgaaatactcagcaataaaaaagaatcaactactggtatacacaataacatggatgaattacagaaacactatgctgagtgaaagaagctagacatgagtacatactgtattatttcttttttcttttttttttttttaaracgtggtctcgctctgtcacccaggctggagtgcagtggcatgatcatggctcactgcagcctcaacctcccaggctcaagtgatcctcccacctcagcctcccaagtagctgggactactggcgcatgccaccatgcctggctaatttttatatattttgtagagatggggttttgttatgttgcccaggctggtctcaaactcctgggctcaagtgatcctgcctcctcaacctcccaaagtgctgggattacaggtatgagcctctgtacctggcctgtattatttattttacttgaaattttaggagagatgaagttaatctataactactggttatctattgttgtatctggatgactttgaggcatccagatgcagcaatggataagtcaagactgcagtctcacctgaaggctggactgagggtctgtttccaagctcactcgtgtagttgttggcaggactcagtgcctcacacgttgtcagactgagttccttaattcttcactgggtgtaggccagaggcctccttcactcagttccttgccacagtgttctcttcaaaggacagcttataacgtacagctaggttcctacagagtgaatgattgagagagagcaagatagaagccagccttttgttaacctaatcctgaaagtgacatccatcatttttgtcatactcgtttcattagaactcactaagtccagcccacattcaaaggtttgaagaccagaaaatgggatcactggacatcttacaggtcaaacttaattttaatagtaatgttttacatgtaacaatgcagaatgaccatgaatagtatgcatttttagaaggctcatgcactaaaactctcatcttttggttaatgcctaaaattccagggagctttgacctttcagtttaaggatttaattagtaaaatatagattatttaaggtaaatttccttttgggcctgagtaatagtactggttaccgttaaaaaatgtgggggttggggcattgacccccctgcacagttgaaaatccacagataacttttgactaccccaaaacttaactactaatagcctactattgaccagaagccttgcagataactagttgattaatacatattttatatgttgtatatattatatattgcattcttacaataaacgagaaaagaaaattttaagagaatcataaggaagagaagtggaagtggatcatcataaaggtcttcatccttgtcttcatgttaagtaagctgaggaggaagaggaggggttggtctttctgtccaggggtggtggaggcagaagaaaatcactgcataagtgaaacttcccagttcaaacccgtgttgttcaagggtcaactgtattgtatatactatatatacctaaaattaaatatactgtatttgccctaaatccacttcagataaagaagataggcaaagaatatggcaaacctggtaagcccacgtaaaaacacttcttttttttttggcctatggtagatttgttgatagaccagctcaatcttctcatattataactatgtactgacaattttagtatcttacgtttgtttcttgaccttagattgtatatgagttggttttctcctttttttttttctttacttgaaagggccatgcttgcaagtgagtattagacattgcatgattttctaatattctctccagttttctacacctacctctgtcatcttaatttctattttcatgcatttgctcaaattaaagatgtggagattaaatgaatgaatacatgtaaagcacgtagattagtatccagcagatattaagtggccaatactattatgattgatgctgttgttctttgatgctttgatctccacaacctacatccaattggttcactttccttctacacgatttgtctcctcctcaaatctaacctttctcttctgttcatcttcttacatagtctcactgctacttggccctactaaaatttatttttgcttcttaccacatttgccacaaatgttgatataaaccatttccattcttctgagatgtatcacctacttacagaggttattatctacccaaaatcttctcttcttcactccacttgaacatacttgcattcacattctcctctctgtttcagatatcaactctttcctcctggctcaaaggaaggtgcattcttttctgactacacccacatctctgtttattatccagttcagttagcattaggctcggctgcaaatagaaaaatccttaattaacagtggcttttaacaaggtgtttccatcaggtgaaaaatctagaaggcggctcttgagggctcatagggcagctccacaagttgatttttccatctcactgctatgccatctctaaagcatgccttcatccttatggcacaaacttgccgcctgaaaaccagcgaacccaactttccaggaagtaaaatgcactttaaaagatcaggagggctgggcgaggtcgtttaggcctataatcccagcactgtaatcccagcactttgagaggccgaggcgggtgaatcacctgaaggcaggagttcaagaccagcctgcccaacatggtgaaaccccgtctctactaaaaatacaaaaaaaaaattagccaggaatggtggcgggcgcctgtaatctcagctactcaggaggctgaagcaggagaatcgcttgaacccgggaggcggaggttgcagtgacccaagattgcgccattgcactccaccctgggcgacagagcaagactccgtctccaaaaaaaaaagtcagggacggcctcctctcttttagatgccgtccctaaagacatgcacacaatttatacctaattggctaaaacgtagtcacatagccacatttggctgcaagagagactataaaataagctattttaagctgggaagcagtgtgtccatcgacacagtgttctgtgactttaaataaaaaattggttttctgtcatgaagtagagactaggtttggtgaggcactcattcatcctttctcacctccaacaataatttgcgtttacttattttttcaaccccttcccatcccctcaaacatagttctctaccttttatctcaaaagataaccaaagaaacctcttgattctggtcatactcttcctttcactgtgacaataacaacaacaacaacaacaacaaaaccttattcttctcctttacaatttctttaacgtttttttcttttctgctattcccaatccctaaacaccatctcacgtttagattatacagctttccacttcgtctcccagttcctgcgagcaccttatatcccttttaccccaaccaagtccttaaattttatttatagttagcgtcacaatacacgagtaaatattgtctttctttaaaaagcacaaatatctcaaacttctcccttggacataccaatggctacattaagctctttagaacgtagaaatgaaagaacgcctcccgggttcaaacgattctactaaacaaatgaaagaacgaatggcatgtaagtgcgtttttacaattcatgtgaacgggtacgctaagaccctctgtcactgcgggcttcgccgccccgatgaaggtctttcccagcaaaaatctggcttgccttctacagctctgaaatgcacacttaaacccaggccctttgtctctgaccgccctggcctgaactggctgggcggagattctcgcgaattctcggatctgcgcggaaaacgcgctcgaggcagttctctgacgcatttccggagcgcca

SEQ ID NO: 95535 - DNA, 12985 bp, Homo sapiens
atagtagttccccttatccatggtttctctttccaaggtttcagttacccatggtcaaccacagtctgagaatattaaatgaaaaaattccaaaaataaacaattcataagttttaaattgtgcactatgccaagtagcacaatgaaatcttgctccatccggcctgggacgtgaatcatcccattgtccggcatatccacgctatttatgctccctgcctgctagtcacttagtagctctctcagttagcagatcgactgttgaggtggtatggcagtgcttgtgttcaagtcactcttatttcacttaataatggcaccaaagcacaagagtagtgatgctggcatatttttataattgttctattttattattagttattgttgttaaactcttactgtgcctaatttataagttaaaagttataggtaagtacgcacaggaaaaacatagtatatatagggtttaatgctatctttgctttcaggcatccactaggggtcttggaacatatcccctcaatcaggggggactactgtactcttatctcatgctcttctttctctcaagtaccttgctggggcttccccatagccaaaccccaccagaaagtagagggcaaagaagtctattgatacagtttatatagactttggcctcccccaacacagagctgggtagagaaggatgcaaagttgctctggagaggcaaacagagagccatccagcctagtgagattagagacacaagctagagcagggcaaactgataatgcatatttctgacaaattggaagagattgagattcaagtctcaaatagttgaatggaacttaaataggaaccataactttgttattctgagaagagagaagtagtagaaaatgggttatatttgcagacagctttttatggatttcattttgtctgtgaagacatctattgagacatagtgcagggaggatgagaatggtgaaagtttcggccaggtctgatttgtgtgaccatccctggaggaagaggatgcagtggagagggaagtcttgtaactgacagtctttccagtgtcaaaggggtgagtgagaggaagttttcccaagcaaaataggggtgtagagaagacagtagctgcagatacccatcacagagctgaaacaacatgttgagcctggcagcagcatgtgacagctcatttgttttctcagaaagactgctttatatgacaatactcgtggtatgtacatgttccaattagttctttaaaagtctcagtactttttgtcacacatattattcaattcttaatattttatgtaatggctaatgagcgttaaaaagcagcattctagtgatgcttccaaggacaacagctaacacttcttgagcacttatgtgagctgggcactatgcaaactgctttctatccataatgttatctgattctcataactcctatgaagtcctgaagtaggcagtcacttattgctgttctactacccattcccctttcttttttcttagtagtgcccagattttctttggggacaaaggggatcttccattcttagcaacattgctaaagaagggcagatagttccagagggagttacgctcgtcagtcacccatctcctttgtctcaataactgactggtcagagctgggcacatgacatagagtgtttcatcaggaacttgggggttcttgttgggaatgctgggactccctcttcctctgagttgtgtgtggtatgagcataggaggcctggaacggctgcagcaatgaggggagctggcctaaggatgtgatgaccacacagaaaagggcagagctgagagaacattagaggtgctgaacttggagcccaaataacatagtgaacctctaaaaccagccagctggggcagcactacctccaaactgcagttccatgagccaataaagctccttctgagaaagctatcgattttctctgagatgccattttcaaaatggtaatgataaaaagaattttgcttgcttatttttagagttaaatgaaataatattcagcggcaaatattgatactctaaatacttgtcgttcttgtagattgtgacagtgtaccatcctgaatacactttcatgggattgattagtatgtagctctttctaacttatgtacgtatactttagaaagttttatactgcagaagtataaagaggcaaaattattttaagtaacgtgcatttaatttttttctattacaatattgtacccattatagaaaatataaatggtctacataatttatagctgtactaagtgtttacggtctttctatagagattgagcattgggtctttgttcagcatctaaattcttcattatttattgttccatgggaaattgccttggctttgactattttcaacttttaacgattgcaagagcattagacattagagacgtgaggattacctgtattcaagtggtctctcaatttctctcttttggtttctcagattctttccttaggtttgggtttatagcattttacacaaaacaagataggtgtgatccttaaaagttgtttttggttttgtttttgcctgcaatatattcattaaaacaccaaagagaaatgagatacatttctgttcttatggttaaggacctataatgctatttgtcacaaaaatagaaagatggaaaagtagaagagtaaatatatatataacgagttcatttacatggtttcacatgcttaatcttgcaaacccaactcatgacaataaatttatgaaaacaaaacattaaaaaacttagaaagtaataataaactataaacacaatgctactgaagctcagctacaacaccacattctcagctctagtttggatagaacacaagwgttttaaattgcattgggtggaggccctggcaggaaggaagcatcggatattgctggaacatatctttgtttgagcaacagctaatgagaaaggtcaccattatgctttgctttcaaacactgggtctgttttgaaattagtactgcacatttcatcacaaatgctggtttataatcatcgaggtacataatcctgcagtattaatgttgttttctcctaagtggcaagtaaaatccaaagcttatgttctcaccactgttttgatcagtatgtcagtaaaagataaaatgactttctatttatggactctgggattcctgattatttacaaaattccaatcttgaatttagaggaaattcagccttctaatttttttccttcagttttagtgttacttgtactcttgttaaactcatcgctggcatttgaaawasaaggctttttggaatttgttccctaaaatttattgcatttgtttagtggattatgtgagtggcacagaaatcctaagaaagagcttaacttttctctgcaaagtgtttgctgacaaatgcgataaactttagaagaccaccttctaggaagggctgacatatcaaggacagtaaaaacagtagtaccagacatttctgccacaattttttcggtggtgggggggaacagaaatctattaaatatctcagtttatatttttggttctccctgttggctaggctgttgtattcccatgtccacagcacgttccactgtgggagcctggagctcttagaataaactttgggaaaggctgggtccaccctctggggataagggagccagagggaggaaggggagggggtaaaggaaaagggaagggggcggctgtcttcctgtgtttggatgacctttccttatgtttatctggagggactgggcagccacgctgtgtttggtgtcagcctgccatgttgtcacatgtgatctctttcttagctttatgtgtagagaggacctttgcctctactgggagaactagatttaactctgtgaattatgaaagaaaaaaagtgtaccagtctgttaggcattggggcccagagatagaagtcttatgaaacatgcacatatgccagtgtgcagcagattccctaagggaaaggcttaggcatctcttggagctgtctgaaggcgggcccacctgtacttcttccttcttgctgagagctgggctggaggctgtcttgcttctcctgaagcctcatcatttagtacaatgcccttcacttgtggatattccttaactatttcttgaatgcatgagtgaatggatgaatacatgagcagagtcacagagaggtgactgggcaacaggcagtgaggttcctacaatacttaattgatttgccagtccctgctctaagagccctaagtagctccactttaaagaaaccagtttcaagcctctccgtctcacattcctggtgggtgaatcacttgtttcttatggttgggtgagaataacacctctggtttccacctttctttttcattttagtgctgacctcatctgacctgaccttagcttgaatgttattttcccagagaagctatcccttaatcatcctactctcctccgcctgaattagatccccccatatacctcttactaatctctattatcttcatagaatgtaatacaatttttaattatattcatgtgggtgataatccatcctatgtctgatttctccactagattacaaacttcttgaagataggggaccatatttattttctcatcactgtgttcttagcacctggcataatacctggcatataggtactatggcatataggcttaatacctggcatataggtcctctatacacataagcactcagcaagcctgtgttcaattaatgaatgagcagattaatgaataaattatatttggaaggagaattcataccaggttactgagcagggttggggataaagatcagagtccaaaagccctatcccaatcagaccttggacacactaacgagtttgagattctgaagaggatgaagtgcttagcagacataagtgacattgggcattttacctttggaagctaactagtagtctggactcctgggagtaccagaaactttctcgtttaactctacccaaagtagcaacttcttccaccttctcagtaatagcagtattcttggttaccaggtatctgaaccacagaaagactctcgatgttttcctctttttcacatcacacagcttcacaatacctcttgttagttttttccttttcattcccatgagggccttttgatctagtgaattagtcagtttctttctcttgcaagttccagacatgcaattccaattagcttaaaagcaaaaacggggaatcacgttgtagggaagttgatagggacaactggcttcagacgtgtctagatccagcggctcagatattgctcaggactccacctttcttgccatctccctgctaagtttttaaaatgaacacctacaactcctgactcacaatctcctcatagcaccaggaaggactctgattgcacccatgtgaccgttcctgaatctgtcactgcaatggggagggaaggaaggctctgatttcttgacctgggcaatatgttcagctttctgccccttgtatggtggccaggggggatgagggtacagtcatagacagagctcctcaaggaaaagaggagttgtgttacccagataagctgtggaagaggtgctggataatcaaaaacaatagaatgcctttctgcaacagccatcctgatccaggtgcagtgctaggcccttaacctacatgcatcaggatatacaagggaaatgaggctgcactgtggaatcagattgctttggcccaaatcctagctctttctcttactctctctctctaattttggataagttaacccctctaagtccagttttctcatgataaaacagtgatgtaaaatattcagtagaatattactcagccttaaagaggaaggaaattcagcctctcagctcctcccatcaacagatggcccagtctttagtgaggcaccagctatgtccctgaaacaccatgatgaaagtgaaggccagagtaaatggatttggccatactgggcacctggtcaccacggctgcttttaactctggcaaagtggatatcatcaccatcaatgacctcaactacatggtctaccatggaatcacatggttccagtatgattccacccacagcaagttccactgcaccatcaaggctgaaaatggaaatcccatcaccatcttccaggagggagatcccaccaaaatcacacagggtgacgctggtgctgattatgttatggagtccactggcatcttcactaccatggagaaggctggggctcacttagagggtggagccaaaagggtcattacctctgccccctctgctgatgcccccacgttcgtgatgggcatgagccataagaagtataaaaacctcaagatcatcagcaatgcctcctgcaccaccagctgcctaacctcctggccaaggtcatccataataactctggcatcatgaagcgactcagcatcacagtccatgccatcactgctacccagaagactctcatggcccctctgggaaactgtggtgtgatggccatggggctctccattacatcatccctgcatgtgtctactggtgctgccaaggctgtgggcaaggtcatccccaagccgaacaggaagctcagtggtgtggccttccatgtacccactgccaatgtgtcagtcatggacctgacctgctctctggagaaaccagccaaatatgatgacatcaaggaggtggtgaagcggcatcggagggggccatcgggggcatcgtgggccacactgagcaccaggctgtctcctccaactttaacagtgacacccactmttccaccttcaacactggggctggcattgccctcaacggcctctttgtcaggctcgtttccgggtatgacaatgaatttggctacagcaacaaagtgataacctttatgatccacatggcttccaagaagtaagagcccccagaccaccagccccaacaacagcatgagaggaagagagaagcctttagttgctgggaagtccctgccacacagtcctccaccacactgagaatcaaccttcctcattgtttctacatcagacaccctgaaaagggaaggacctagggagcctgaccttgtcagataacattaataaattcccgtgtacccagccaaaaaaaaaggaaggaaattctgacatatgatataacatggatgagccttgaggacattatgctaagtgaaatatgctagtcacaaaaggacaaatactgcataatgcaacttatgtgaaatgcccagagaagtgaacttcatagagacagaaagtgaaatggtggtgctaggggctggggagtggggtgaatgggcagttagtgtttaatgggtaccgagttccagatttgcaagatgaaagtgttctggagatggacggtggtgatggttgcacaacagtgtgaatatacttaaaaccccctgaactatacacttaaaaatggttaaaatggtaaattttatgttatgtatattttaccacaatttttaaggaagtgacataagggttaaatgagaccacagatgtaaagtatttagtgcagtgtgagtgaatacatagtaagtgctcataaatatgaaatattattctcataacagccctacagatattattatcttcatgtttatagttgagtaagtggagatttgggggttaagtaagtggtccaagcccacccagctagaaagtggtgagaccagactcaaacccactgcttaagtactaaggccctgctattttctattatgccatgttacttcccagcactcttcttgccagctaccgctgcctaatatttttaaatattgctttgattatgttaagcttctgcctaacaaaacttaagggatctacctgtggtctaaaacacaaatgccctttcctgatacaattctttttgcagtctgaccccagttacttttctagcctcattttgatgtcaaggctctgctttaccttgttttgtgttttctatgctcgtagcatatgctagttattctgctggaacactgttgaaactctacccaccttttttgggggatgggggaagaaggtctcactctgtctcctaggctggatggagtgcagtggcgccagcacagctcactgcagcctccacttcccaggctaaagctatcctctggcctcagcctcctgagtatctgggactacaggtgtgtattaccacgtcctgctaattttttattggtttgtataaatggaatcgcactatgtggcccaggctggtcttgaactcctgggctcaagaaatcctcctgccttggcctcccaaaatgctgggataacaggcgcgagccaccacacctggcctctacccatcttttgatgctcaactcaagactcagctcctccagaaagcctcacctaactggaagagagacaggtcatttcctcctcttcactactacagtgtttattatttgatagcaacacataatgtactgcttaaatcagagttattacttcgctgttcatgtcttagcttcacagcagtggagagcaggtattgtatctattgctgctttaaatttccctcaatgccaggttagtgttttgcattgagtagcaacttgataacaatttcttaaggatgctgatgcaggaaatatgattaatgatgactagttcaaacagtcatgatttggatttaagaaaagcatgtattattcactttttattagaaaagatactggaatttctccttgtacttttaggtcagttcaggacataatgattcctagtcagcatggaaatgaaaagattgagcctggttaaaaaagcaaatctgctggtgagcctgtgtgagaggtagatgtctcttgctgattacattctgagaaacagaagcaggcaaaagtgtttacagagcaaccagagatgaggcagtggttattttgagaatatctcaaaaaacaaaagaggtcattttaggttctgcaaatagtgcccactatgcaaatacatcagtctctacattggtactgaaaatgttaatcatgtataagcccctaaacctttctaaataatgctgtccctcacctccagcccctgctcaaaggtcctctgtggaccatgtaagggatctgcagtcatgccagggaaagaatcaaagccacggtgctggaaatggcagcatcagccaatattcaccaggatgctcttgtgtgccaatcctgagtggtcatggggtttgttctgactggtcagtttctgttctttaaatatgttgaatatcacctctgggcagagagaacagcactggaagtaaaggcagttctatgtggtaggaacgcaaagcaccaatgagagaatgacagaagatgggtcaggaaacacaggtaaggaccagaacttgaaggaattcagaccatttgggcagatgagccatagataactattaggcagagaggtattataagcagctgtacatttttgaaggatgaacaagactatttattaggcttttgtaatggacctgatgagaggtgaggaagacttgaatcaagaactcggcagtgccaatagatggcaggggggatgaatataagagatatattttgaggtaaaattgactggatttatgattgaatggagagagtgggaatagaggtgtcaaaaggaatcagaatctgaaatgtgaatattctaattggtggtatgtgctaagaatacattgatggttcaagtttattttcactgtcttacctcaaagttcaaggaataagttgtggttaatcatacatatgatacatgagcagagcagttgaatgtgaggttgctggcagctcttgaaaaaggcaatcaccctgcctgaccacattctggttcagtgagagtctacactggaacaacaactcatttagaattgcatgagaccagcttcccatagctgaaagaaatatggagaacgttctgaggctgatgggaactatgaaaacagcagtcacatacctttggacaaggccattttataaccaatttacaaggcatcatttctgcttccctgcagtagtcgggccctgggtatcattgggattggcacagtttctttgagtctttccccacctcacaggcagtcaggcttagagagctgtgatggggatgggcagggtcttgggtctgggaagccccagaggaaagactgcgttctttccccaggttgaagctgttaatcatcctgctgaaggctggattcgcagagagagaaaatgtaaaagggctgctttatgatatccatggatgtgccctcatggccgtgaacttcaatagttcttaactttacttgcctaagtaagggaaaacataataaaccagcaggcaatttgaaacattagcagactgttatatttcatctgaattttaggtcttcacttttgtaactcaggattttatgtgaagctatatttctttaaagatggcagcattttcttctcaaaatgaggatcaagactatggtatctttacagtattaaaaataaactrtgctttggacctgcaaagaaatattcagatgtcataacctgaaaataacctctgaattttcccacactctaacaaatctccaaactgccaaatggatatgcaccaacatttccagattcccctgggaacacatttgagaatgcttagttccaaagaaagaaaacgttaggggaaaatatccacactcaaaaaataggggtttacaccaaaagtgctctcctgtcaaaagaaagtatctcaagtgtaacatggtaaaaaatatatatacacacaagataaattatttatacaatatgaagttcagttgtaattcagtggctttcttgtccacaagttaacacttccattatataaagatgtttaaaacaacaacaaaacaaaaaagttacacctctcttcatttattcgtatatattattatttggtgaaagaaaaacacaattatttctattctgtctttactgaaaggaagacaaagaaataaaagtaccttcattttttttcccctttctccttctgctatgcttgtcttgccaaacccgatcccagtgtaagaccaaccaaatcattctttacgcctgctcctgagtggctgaacattgatgaaaatcacctaaactgcagattgatgccactataaatacttggttgcctccccatctacaggacaatctgatggactagctcttccactctccacaactgtttcatattgtcattttcttcaaacatcttatcacttcctattctaaatatgtaactttgaataatatttcctctagaaaatgtgggcaaatcatgaccaaaactccaatgggattttataatggaatataaagcaattataaacactgtccagaaaagtaaatacataggaataatcaataaaatgagaaaaacaagaaaaatgggagtaatgttgacctaccagttatcaaacaaattatagagctaccataattaaataatgttaaattcctgctggaatagacaatacatcaatggcacagaccagagaccacatgtaagggtaaaataagataaaggtagcatttcaaaatgatgagaaaggataggatatttaacaaatggtgttgaaaagttggctatccatttgaaaaaaataaagttatatgtctactactcatcaattttaaaaagttaaatagattttaaaagctatacattaaatagaaaacaaaatttcaaaagtactaaatggacatataagagggtagttataattttcttaatgggaaaggccttataaagcaagacttaacccaagaaaaagcaaaactttgtttctgtacagttctgcctagcaaagcactgatgctccttctttttcttcctgtaatagcagtcttgcctagtacccaaggattaacattactctctgtccctcctcttaatgcatctttttatctttaatggattgcacggggcctggcacaaagtatgtgctctaggcttattgatttcacttgactgaactcaaattactttgattgtgctacaatcctggggagaaatagactttaatcatcaatacttaataatacccaaatgataataatccttcctcatttataaaaaagtttttcatagtttattttatgaacctcctctccccttccacacaaaagcccccaaaacactagaaagtaggcaggaaagatggtagtagtaaggttctcaatttaccccccttccccatccgctgcttcagagacattgagcaatttccccaagatcttggtctgggtctcttccagttaggtcatgcagtctctgattacaatttgttgcaaaaagccaggtggggcatttgagattccattccttaattctacagaaacacatagtgtctagaaaaataggttaaaaactaatgtgtaaggcctaccctctttttctacagagatggcacataatccctgctaaaaatacccaagccaagtcacgtcatcatttttttggtttttgtttctgttggatggggttgcatcttgtgcaccatttcaaatcctcctgatctcacctcttagtccagccactgcgccaggatcccattttgagccagtttcaaaggtacaacctgacatggccttgtctcctcctacaccttctacctttcacttcctcccctgaggctctgtggtgtccacttggcatttatgtgtatgtaaccctgaagagaggggagtcagtgctcgtggaccacccctgatagatgggaatgggaacctttgggtaaatgctgcccctttcagttcccagggtggacagttctgagacacatttcataagtttcctcaggaggttgtgtgggtcaaggctgcctgcagccctgagcaacttagtgacccgaatttgcactggactgcctccttcccctccttctcct

SEQ ID NO: 95536 - DNA, 17535 bp, Homo sapiens
cagtcactgggcagcagccttgccttagctggctttgctaagcgtaggaggcactagcgtgagcagaggctcagaggagattctgcccaggagccctgtcaccccagagccctccttgtcggtgtctcggccttcccagcaggctgcctggccaccacctctcccttctcccaagaccagtcccagggctccagccatgccgtgtctagttcatgcacgggaagtggggcccgcggggtggacccggcaagcgcaggctccattgatcctgggaagtagagccaggtgggagctcctccagggtggggaagtagaccgccctgttccccgtgtagtgggagccccagcccagcccagggccagactgggctccttcccagcctccagtggggtcctatgccctgacctcagcagcctcctgggtggggcccagccctgagctgggggtgtggttctcctcatagtggaaggcagagccagcccctcctccagccttggtggggctggagagcaatggtgtctgtaagcccactgccttgtccggaaacggttaggatgggcaggcttgggtcctcccagggctgaagggccagggtgtgtctccacttctgcgtctggaggagcaggtaagggctgggatctggcctggggagcctgaactgtccccgcctcacccctgcagaggaaaaacgtgcacatgaacgacaacgtcctgcactcggccttygaggtgggcgcccgcaaggtggtgtcctgcctgtccacctgtatcttccctgacaagacgacctacccgatagatgagaccatggtgaggggcagggcctggctgtgggtggggccggggagccggtgggcagggccaggaagtagcggcctctgcctctcccacgcccgcagatccacaatgggcctccccacaacagcaattttgggtactcgtatgccaagaggatgatcgacgtgcagaacaggtcctcgcgcccatcctgctgaggcccagccaggagtcggggagagggcccccaggggcgggtggggccggctggtcgggtcttcgtgccagcctcagtaagaggccagcggcagcctggggtgggatcgcgggcccaggacgagggcaggagacgctgtgcctccgcagggcctacttccagcagtacggctgcaccttcaccgctgtcatccccaccaacgtcttcgggccccacgacaacttcaacatcgaggatggccacgtgctgcctggcctcatccacaaggtgcacctggccaagagtgagtgcgtccgtccgatggggtgcccgggctcagctcgggaggaggtgacccagtgcctctgacacctgctccttccccaaatctgcaggcagcggctcrgccctgacggtgtggggtacagggaatccgcggaggcagttcatatactcgctggtgcgtaaaggaaggcacagctctccccagagaacctgccctattgagccctgggctggcccctgctgggctgtcggggaggtggtgcaggagggaggctcctaccagcagagaatctgggctgagctccgagaggagccatctctggtcctcgtggaggccccataggctcctgtctccaggagtcactggcgtagctctgagctccaagggagaaaggagggacccctgttccccaggctgagcccccactgaacaaggacagcagtatggactccccagcaggggcgtttgggagagggttggctatacccatggtctctgaccctgcctgtctgacctctaggacctggcccagctctttatctgggtcctgcgggagtacaatgaagtggagcccatcatcctctccggtgggtacctcagccctcagcccccttcctccatggtaggacaggatccaaggctgtcctgggaggctggctgaggggtgggagcaggaatattcatgggccgtcgggtggcaccaaggggaggcctgacccggtggctccccacagtgggcgaggaagatgaggtctccatcaaggaggcagccgaggcggtggtggaggccatggacttccatggggaagtcaccgtatcctctggctccagtgctgggggttgggcgggggccccttgggcgggctcagtggccacccggtgtagggccagcgtgggtgggacactgcggagggaggatgctcaccctggcaggcggaggagctctgctgtggctcccctgggaatggcagaggttcaagggcaagctgcgggggctggggtggaggtkctcttctcgctgtggccttgacaaagcctccagtttgatacaaccaagtcggatgggcagtttaagaagacagccagtaacagcaagctgaggacctacctgcccgacttccggttcacacccttcaagcagggtgagccctgaccccacagccctccacttggtggaggcctgccccagcccctccctcatgctcgctaccagggcagaggtgaggtgccccctcagagcctgtactgccctggaggtgggacaccaaagctctgaggggtgacttccctgtccctgggcctcctccccccacttcctcccatgcggccccgaccctccctgtccatggccctcacctgcctgcctctgcagcggtgaaggagacctgtgcttggttcactgacaactacgagcaggcccggaagtgaagctggaagacaggatcaggtgccagcggaccatcggctggcagagcccagcggccaccacccgtcaaccctgccaggagctgagggcaccacccagcaacctgggcctgcattccatccgctctgcagccccaagcatctttccagtggggcccccattcacgttggtcctcagggaaaccagggtcccgggcaggcccggcgctttgctccccacaccagccccctgcgcgtgtccactctgatcctgcatcccactccctgggagccaataaagtgcattttcacaggcctggccttggcagctctgtgctgagccgtcccccacacccagggactgccccctagcctggccagtcccaggacccactatccccctggcttactgttcagcccccaagagctggtgactccctggggtggaaaggccgcagaggctggagatgggaaggcacacgtgggcaggcagcaggcaggcagcagtgagactggtgtggactgtcagctggacaaggatgtgcagggcagggccagtcccagcccctccacatgtggccacctgcaggcctgagtaacttgagctcacccggacctccctgcctcagcctgagggctctggggaagctggtctagtgggccagaaacgtctagtgagccagccgagctgagcccatggatggatatgaggggaggctgatgattgggtggctcgggcttcccctggcctggcccctcctctctgtggctctcaggcttgggcgtgggtcccccacctggccttatcccatggagagggacaggtgcctgctggacaggtcagctccagccaccagaggtggggtgtcattgctcgccgcccccgtccattctcagaggggagacagcaaagtccagaatggttcccgggccagtgcctcagccaggcagggtggcgctggggtatggaccaggagcactgggctccaggccccggcttgcccgtcgccccctttctcagtgcctcgcacagagggagcccctatgccagaaccctctggtccactgcatccaggacccagatgccctccctggctcctggcccaactctgggcccacgtcctcagggtccctctcctgggcgccctgtgccgtcttcacgcacatgatgccttttggctgcaggtaggacctgctgcttcacttcttcgttcattccggcagcggtgatgtgtcctccctgtcccggcactgagtccagaccggtgtgtcctgcacccagccaaccgctcacctcatctctcactgtccctttgtgtccagcaagccgaggtgtcctccaggcctcccctgagactggccccctcttgggtcaaggcctccctaccttttaggcctcagctgaggtggcccagcctccaaaacaccttccctgatggcaccttcacagcgcctctcggagcatccaccctgccctgctgggattgtttgtctggaaacctctgggagccccgcctcaacccctaaccctcccgctgacaccccaggacctcgagctccaggagacgggttggcctcgttcacagtgtatcccctggccccagccctttgtggataaaggctctgcccatgtgggggttcaggaaaggcctcctggagagggtggcgcctatgtggctgcttggatccaccaggtgaacagtgggaagaagcccagccaagagcagagaggtgccctggacacaagccttggctggctgggtgtccacgtcagctgagggctcccagctgatgctcagaagcccagcccggcatgggatggagaagctgaacggggctgggcccctgggcctccttttacccactgtggccctgggcactcagccagcaatcctccttcacctcgcctcagtccacttgtttatgatgagctttgtccttatgtatgatggcatggcactggatgcctctggcccctctcacctccccacagccttggtcctgagccatcactggcccagggggcctgggagaaaatccagggagtctgtgggaaggggctgggaggatccgaggtggcaggagatacagctgctgacgctgtgtgctggtgcaaagtgtccaccacccacatttctcggctgcagtggccgaagcagcctcctggtggctttctgtccctttccacctcatttgcttcagaaccttgacacactggctgtcctgcgtgtgtgctgactgtagtctgtctacactgccaccaagcagggctgcagggtggggtccagcctgtcccatctgctgccgtggggtgatcttgcccaggcccagagcagggcccagaggctgcagctgcacagtgaatgttgaatcaatgagaggatttcattactgaagagcttagaaaatgtcaaaggcttgggccggcacggtggctcacgcctgtaatcccagcactttgggaggccgaggcaggtggatcacgaggtcaggagattgagaccatcctggctaacaaggtgaaaccccatctctactaaaaatacaaaaaaataagccaggcgtggtggcggtcgcctatagtcccagctacttgggaggctgaggcaggagaatggcgtgaacccgggagacggagcttgcagcgagcccagatggcgccactgcactccagcctgggcgacagagcgagactccgtctcaaaaaaaagaaaaaagaaaatgtcaaaggcttcaaaagaaaataacatatgtaacatgcagctttagattggatgatgaaaaaaccgcactcagatcttcaagccttgttttccttgtgtcattaaaagtgacgagtaccccctccccgactgtcccctccgtcggtctcaggcccctggccctggcctgctctccgtgacctgggtctccgcccctagtgcttccccgcagctccaccgtctgtggtcggcggggcctcagtgaccgcacgctctggaccagccccgcaacccgcttcgctacccctcccctccggaaaaccaacatgtgctcctcgcacgcgcgaccgggacccctccccgctcctccggcctctccgagcgcgagtaccccgccggccccgccccttacggccccgcccccagtttctctcagycaatgggcagtgaggggcggcatagccctttcgggccaataagcagcgagaggcggggttcccgcgccttgcgaacttgtagagtgcggacaaaaagccggccggagtgtgccgtcccagtaaccaatcggcgagggtggggacggggaggcgagtcctattggagggcgggggtggggcctagatctgtgggcggggcgcggcctgtggatgggcggtgagcgcmgcggcgtccgaggcaacaagatggcagctgcggagccgtctccgcggcgcgtgggcttcgtgggcgcgggccgcatggcgggggccatcgcgcagggcctcatcagagcaggtggggcggcgcggggctaggcctgcggtctggagtgggagcagccccgtgggaggtgtcctgccgcgagagtggggccgggggcgcgggcccagccaaccgggtctccgctccgstgggcgcagccggggccacgcctgtttgctcttacttttttgacgtggctgcgggaagatttgagtcacacgtggctaggtgccgcttccgtggccggcttcctggccgcgtggccttggccaggctcacctcttccagcctctgattttctctttgcgcgccagcccctctcatggggagcagcagggcttctcccccagacaccttggctctagggacacctgggccagactatccatcctgtgccagcagcacccccacgttgtgacagccaaaaatgcctccagacactgccgaatgtcccctgggtggggggaggagacaggcaaaatcatcccctgttgagaaacactgctttatacccggaatatttatgctgaccatatactcctccaggcatttagaagcctctctgcagattgtggatagggagagctgggtgacttttgactctctgccttcagccatacttcagggtccagaagagtcaagatcaatcgggaaatagcttactatgagtctcaggagtcttccctgtgaaacctggcagtaccgcatgcctcccagagctgtacaggttaaatgagacataaatgtctagtgttgagcttagtactggtgtgtgtggctgccactgtcatgattaattgctgtgttcaggttgtggtgtacacttgtgccttcctgttcgaccttaccaaaatctaacccaatctttccaccccgtacccgacaaaagcagataatttctaccaagtaggcatttagccttttcttagacattccagcatagactctccctctcgaagaacctgggccccgattgggccttctgtggccaatcaactgcctttgtacccaccacattcccccaaggcctggtgttcctccagaggtactgcctcttctgctccaggcagccttcccttccctggaggcagaggccccagggatctgtgtcctcaccaatgaggtaagctcctggcctccatacccagcagcagtcaggggcgttgaccgccaagtagaatcagtggatctgattgcctgggcccagtgaatggtgcatcccgctttgggttcctggggccaggagggggcccaggatgggccaggcgtggctgagcctgagaggccaagtgagctccctctcctctccgtgccatcctatcccaccccttcaccaacccctcttccttttcctttctttccaggaaaagtggaagctcagcacatactggccagtrcaccaacagacaggaacctatgtcactttcaagtgagcatagagcccaggttcttcataccctcaggagcccaggatagctcttggctcctgtcccactaagacacttatcagagccagggatgggtggtttatttagctgaagtttgcagactggctggtctgggctgggaaaagggagattagaggccaggaggaaagtaaggttgtggagggccaaagcaaagtgtttgtgtgtgtgtgtgtatgcgtgtgtgagtgcatgtccgtgagtgtgtgtatatgcacgtgtgtatatgtgaggctatgcgtgtgcatgtgtgtatgtgctcatgtgcgtttgcacrtgcgcttgtgtgtgcgtgtgcacgtgtggtgagtgcatgtatgtcagtgcatgtgtgtgcgtgtgtgtatgagtgcatgctcatgagtgcatgtgcacctgtgtggtcgtgagtgcacgtatgtgcttgtgcatgtgtgcctgtgcagatgtgtatatgagtgcgtgtgtgcgtgtatgagtgcgtgcgtgtacacatgagtgcatgctcgagtgggtgtgtgtgcacgtgtttgtgctcatgagtgcattcatgtgtacatgtgtatgtatgctcgtgagtgcatgtgtctgcgtgtgtgtatatgaatgcatgctcgtgagtgcgtgcatgtgcatgggtgtgtttgcatgctgggtggtggtcacagacattcactggggatggagggctcagggcttggggaggcgctgacatcaggatggcctgtgaggagtagggctagtctgsgggagtcttgggcactggagaagtcrgggtggtctagacacttgcaatgggagaggccctgggaccatgggaacgtgtggcatccagcaggaagggctgtgatggagagggtgcgccgcttacatggcccctgaggcttggtcctggtgtccctggcgcaggctctgggttgccrgaccacgcactccaaccaggaggtgctgcagagctgcctgctcgtcatctttgccaccaagcctcatgtgctgccagctgtcctggcagargtggctcctgtggtcaccactgaacacatcttggtgtccgtggctgctgggrtgtctctgagcaccctggaggaggtgagtgtcccttgggctaaggccttggtcccagtataggctctgctggccaggcttgggcggcaggcagccccccagagagcctgagaggtggccgtgtggcccacctggatcaagtggctggatttagggttccctcctggtgctgtacctgggaggcagacgctggagcccaccgcgagctgacgtggacctttcctgaggcccctgctggggcctgcccagcagggcccagtcctacagactccctgattctgacctctctctggccagctgctgcccccaaacacacgggtgctgcgggtcttgcccaacctgccctgtgtggtccaggaaggggccatagtgatggcgcggggccgccacgtggggagcagcgagaccmasctcctgcagcatctgctggaggcctgtgggcggtgygaggaggtgcctgaagcctacgtcgacatccacactggcctcagtggcagtggcgtggccttcgtgagtattgcctcgtccatccccggccccaccctcggcaaagagggggcccaccccagtccctctgacagcctctgccctcagagtccaaccttgaggcctgcgtggttgctccccaggcccactgggagctctgcttgtccccgggacttcactgccttggggatctttgaggccagcccctttgcagaccgttgggctcargccttggttctggccacccacggctactgctctgggcattgttcctgaaggtcctgagcccccaggctttgacacctatcccccmcmaccaccatgccgcggctacaggtgtgtgcattctccgaggccctggctgaaggagccgtcaagatgggcatgcccagcagcctggcccaccgcatcgctgcccagaccctgctggtgagtgagggtggcccctggggaacatcgggaaggcccaggcctgtacctcttccagtgyrcagggaaacagcaggctcgagaagctggggccaaggttgggggatgcaacgagggcaggccgcacagtggggaccgcaccacctccccccgtcaccaggccctaacgctctcctcaggggacggccaagatgctgctgcacgagggccaacacccagcccagctgcgctcagacgtgtgcaccccgggtggcaccaccatctatggactccacgccctggagcagggcgggctgcgagcagccaccatgagcgccgtggaggctgccayctgcmgggccaaggagctcagcagaaagtaggctgggctctggccatcctttcctgcctctgtgcccctgcctctccctgtgtcccttcccctgaggactgcggctccctccctcctgcatgagggtctcctactgctccttctccccttgcacagggaaatgcagggggcaggacttgrgaggttccagcaggcgggggagccccgaccagtggggacactcctccctccccagtgagcagaaggcaccgtggtggtggctctgccccttgctgcagtgagcccaccttgctgcaacattggttctgaggggcccaagagatggcgtcttggtcatttgcccgcatggttgggcagttggttgaggccatgaacagaacttacggtaacaggcacggctggcccaatgcctggtctggagctggagcttgcctttggctttccaggtggctccgtgcagctacagccaggccggctgcctcatctcagctctagggggcacgagccatatggggtctgcacaagagaccctctcccctgcagtaaagccaggggccctggcctgatggggcccccatggggagctggagcctgccctgcagcctggagaagagggtggctgtggtgggcgtgctcatcccctgctaaggagcaggagctgctgggccaggtctgcggcagtgctggggtggcaccaggtgggcagtggtaggtggggtggcttgaggtctgggagggtggccctggccagccaggacacatgcagacccctggctttagtctggatacaggctccctctttcctcccratcctaagctcctgacaagtggccaggtggctctgggccctcctgccccgtgcctaggtcaggggtcctggaataccccgtagctctggcaccaccacactggcctctgatggcaagacttggcccctccacctgtccctaacggacggcaggtcaggaaagccaggactcaggggagaagcaaacccccaggattgaaggctagggttctagggcctttgggtggggagggcccgggccggacagcctcagctccgtcccctgccccacaagattcacctgggcctccagtcccacgctggccccaactgctgcagctctcggcttccgcccaacagcctctggaggtgaggcgggagcatgccctcagcgaggctgggcggcgggtcctgctgtgccatctccctgtgcgcctgagcagatcaatccaccagtgcaaaacagggctaacggcacctgcaggacagcagcacgctccatccctcatgctcagctgcctctgcggccacggacttctgcccttcatctgctctctcttactctcctgagcctagcccgtccgtaagctccctcccctgcytggttcccagggcaggctgactcagttgactgcttggtccaagcctggccctggcacttgtcagggtcagcctaaggagatgggaataaagaggccagagagcaccaagtgagctcatgtttcaccagaggtggataaaaccaagttctgggctgggcccagtggctcacatctgtaattccagcactttgggaggccgaggcgggcagatcacaaagtcaggagtttgagaccaacctgaccaacatggagaaaccccatctctactaaaaatacaaaattagctggatgtggtggtgcgtgcctgtaatcccagctacttgggaggctgaggcaggagaattgcttgaatccaggaggcggagattgcagagagccaagatcatgccactgcactccagcctgggtgacagcaagactctgtcttggaaaaaaaaaaaaagaaacaaggtccaatgcctgccccataagttgaggcctggaaccttggtcaagcacaggtgtcagccgaagggggtgctggcactgtggacagcagaggtctccccatgcctgctacaggcctctacatcacctgggggctttgtagggcatggaattgcagtttcccctgcacgctgtcaccccaggggactgtatgccaagcctgggcaggcctgggagcctggggtctggtgcaggcggccccctgaaggaaggtggacagcccttctgacggccacctgcattcacaccaagcccatctgcaaggagaaatcattgactttgcaccaacacctgtctccccctgggacctctgacaagccctgggcactaggtgagctcagctcgggaggtggagatcccaagccagccactcctggcccagctggtgagggcctgtgacaaagacacgggctcagttctcggcacggcagggagcgttgtggtgagccaggcctcccctgtgccttctacttccaggtgaaaactgttcttcaagacagaaaacgatggatatgattacggtatctttgatcaatgttccacttttatgccctatgccccaactgttaatctagggggtattcctgatccaagcgttggatcaagagtttaaaaataagacttcaaaacagggatgctcatgaagtggacatgtccagcctttattagataaagccactgggcccatctgaccaggcgagctcagctgtaaacaagctcgccagttagaggaagggccctcaacagagcatgaccccgcaagcctagggactccgacatgctgttggggctgctccccatgggtgtctcaactaggtaggtaaggggttggggtctctgcaggacccccccgtctgggggtgctccccttcctttcctaccacagtgtgatgtttcatccgcagcccagtggacatcgagggggtcccccaagcctgcaggtccttgggccaaggcagtggcctcgtccccctgaaaacgcgggtcgggtggtttcaacaaaacctgcactcatctttccctcctcagcgccttcccttctccagcccccacaagcccaggaactctgacaatgatgctgacacgggggtcactaactggaagagcagtgaacaggagctgggggctcttgggggccatctgagctgaggacagctggctgtacctccgaggccacaggcacccccacccacccctgcgcctgcagggaatgtgcagaatctgccagagcggaggccagagcccgcaggcagccacggctgttagaggaagcagatgcagcctcaccccagcccacgtctgtcaccacagccagggcctggcaggcgatggcacccgcgcagctttgggaaagaacacttggcctcccaaagggttctgccacccctgggggccgctacagccaccaaccctggggtctttccatcacttcagacactgagcagaacccagagagggttagtgagctgcaggtagggctgggacggggccccaggttccagcccagggtctcagggatccatggctggcactgcccacagggccaggcatgggcggagcagccttctcagcagcggggcccagcggccaagcctctgtcacacagcaccctgtgccagcatgccccgtgctagggagatgctttttaagccctctttagggggtatttcccgtctagtaagtgccagcaggcagacccactcttgacaggctcctaatgtccccaccagcgtgcacctgcactttttttttttttttttttttgagacagagtctcgctctgtcgcgcagactggagcgcggtgttgtgatctcggctcactgcaatctctgccttctggcttcaagcatttctcgtgcctcagcctcctgagtagctggggttacaggcacctgccaccacgcccagctaatttttgtatttttagtagagacggggttttcaccatgttggccaggctggtctcgaactcccaatctcaggtgatccacccgcctcagcctcccaaagtgctgggatgacaggtgtgagccaacgtgcctggcctcttttaccttatagcaaaaattagtgctgccttgtttatagaaagtgaccattgagggactgggggacaggccacagccaccccgatgagaggagcgggcctgccctcaccgacaccagcctcctgggacccgggccaacaaaagggctgagatgggaagaaaggttggaaatgaaagcctcgccaaagacgcagcggcaatgagtagttgggctgaagggcagcgccacgggccgcccagactacagacaaggcctggctatgcagccctcactggcaccgcggccgtgaagtcagcttctcctcagagccctggaggcaggcctggcagagcagaggtggtgtccccgccttgggggcctgtgcccctgggaaggtgctggcccaaatgtctcaggctttctgcagcccatccccagcagttcaggccagaggctcttcctgcaggtggcggtggcctgatgggctcagcaggcatgcctggagctgctgccctgagctctgctcagggagtctgtttcttcttccccaaatttccacggcctccctgagctctcagattttgagatatagatatatacatatatatgtatatatttcttcacttgcgggcagttccaaggaactgtttgttcctggacctgtataaaggtcacttttgggggacaccctccagctgccccactgccaagctggtgcacagcccttcccttccccgtgcaggcctccagcctacccctgcactccacaactctgggttttcaaggttccctctcctaggaggacactgggggcagatggggacgaggggtcaacacctggaggcaagcaggccagctccctgcccctcacaccagctcgggcagcatctctgcaaaggcagttcccaccctacctgaggaggcatgggcatccctggccccagtccaaccagaaggactgtaggtctagacctggccagagcagaacagaaccagggtttgacaggccctggggccctttcctcctttcaaagtaggcctcccaggagcagcttgtcagccacatccttggcagtcccaggagaggcagaaaagtctgagggtggggaggagagcccacagagggtggcactgcgtattgccctgggggctaatgccagggcctgcttccaggtaagtcaggtggctccaggccctgggactggacagaatggtctgtggctgatgaggaagcaggggaaactctcctgccgttggccaagtcaccagggcccaaagccaggcagctgccaatcccacggaataagagatctgttcagttttcttagggaaaactaaaaatccaaggaaacggaactctacacctccctgctgcacccagaacctaatacagggctccacccctcccactccacagtgatgctccagtacctggggcctctgacctccagagaaaccgcagggcggcccgagaccagcccacccggcccctgttctcacggcccctctgaagagtatctttaaaaacagatttaatgtgttaaaaaaaaatagaatcaagtggtgtgcttcgccactgagatgattgtgctgtggctccggggccacatagcaccagggctcgatagcagacaggagtttcggccctcgtccagtgcatgtgactggtgcaggggcggaggcccagccgcacgggggccagagcaggaacacagccacctgttccaacaggcgctgtgccttgtatgccccgtacatgtgcctgccctgagaggagcatgggccaggcctctcttccagctgtgcccccagggtgccagtgaggcagggcgacctctcaccaacagagctcctccaagccatgctggatttggattcctggaaccccctgtacccatgcggtgggccaccccagggggaggggaggagagatgggagactgtgtgtatgtcccctccctccaagtgcagcaggagaaaggtcactgggctggcctggtcacacaccgtcataggggcctgctggggtatgcccgatgccccccagcctccgggccatgctgatgagtgagcgcaactgcaccagcctcagtggccccacctctctggggtcctggttctccagccaccgcagagctgtttctagcccccgcacggcctccccggcagtcggcactgaggtccctccatagtcggtggcctcctcctcgtcctctccgcccccmatggcagagggcagactggctggggccggaggcgctgcagggggcagggctgggcccacctcctccctgcagccctcgggcggacccccatcatcgtccaggtgcagccactccgcaacctcctccggagccaggcacttgtaggccagagccgccaggtgggtgaggtcgctgagcaccctgctgtgctcggcggcttcctcggcctgggccggctgcccagcactgtcctcgccgggccggggctcgaaggcagcccgcaggcccagcagccagcagcgctcaatgctgcccgcctgcaccaggtcccaggagaggccagccaggtagagcatgtccttgagcatgaagctgcgcatgaagtccagcggggagccgctggcgcaggacacagccagtcgcagcagctcgcgcttgtacagctgtttgaaggcggccaccacgccctgctccagcggtgcggggatatgtgcccggctgctgcctttggacaggaacagcacccgcacagcgccatccggtgtctgcagctcctccgggggaccgaggggctccggcctgcaccgcacgggggcatcctcgctgtccagggcgggcatactggcagctgggcttgggcagggcgggtgggccaccagcagcacggccttctgctgcaggcagcttcggcgcaggtagcgtttgacgcctgggacaaattcctcaaagaaccagccccgcagcagcgggcggctgagccaggcgtcggggctgtagcggtaggaggccgggaacttgtcctggttgtggtggcgcaggctgggcgggtccggcagccgcccgatgaccagcggcttcagcttgtggctgccggtcaggtttgcggccagcagcaccgttacgcggtcgccccgccagcgccggccacagccccccgccccggggtcccctgcgcccgggggcgcagcctgctccggaagcagcttccagtagaggccggtgacgctggcgctgtaaatctgctcgtccccgtagccgccctcggccgggggcggcggggccggggcgcggtcgggcagggggccggcgccggagggcagcgcgggctcctccttgacgggcgggccgggcgcggggctcggggctgggggcccggcctcgccgtagaagcgctggctggagatgccgtggcgcttctgccagcgccagaaccagccgtggctggccttgaaggtgcactcgggcccgtagatctggcgcgcgaaggcctcggcctgcgcctggatgagcgggccagacagcggcaccccgtgctggcgcagcgccaggaaccaggcgtacacggcgcggtcgatctcctcctcgttggccagccgcatcttcttgcgctgagtgcccacctcaccgcccagctgctccaggaaccagcgcagcttgggctcgtccttgagccagccgcgcagcgtcccgcccggcacgccgaagtcgcggcacacactggcctgccgctcgccgcccttgacgcgctcgatggcctgcagcttgtccttgatggagtaggcctt

SEQ ID NO: 95537 - DNA, 16152 bp, Homo sapiens
agttatctgctcccaaaatacaattgtgggacaggcattccctttcaaaatgggaaaaagaagaaggaaacagggcgtcactagtcccaggcagtttcacagtccagcccggcgggtcacgtgaggtttgaagggagcgctcctgtgtggcccatggtcccccccgctgtcattttttaacatccctattcctaccaacagcawgttcgtggcagtttaggtttaggttgttctagaagatgacgtgttttctctgccctgctcctcacctcctctgagtcctcaccgagggccttagcatctgaattctgccaacagggtgctcaagacaggctagggtttttcttttggagggggtgggtgagttgtggacagagtcttgctctgtcgcccaggctggagtacagtggcatgatcctggctcactgcaacctcagcctctggggttcaagcgattctcctgcgtcagcctcccgagtagctgagactgcaggtgtctgccaccaagcccagctgacatttttttttcttttttttttttttttagtagcggcagggtttcgccatgttggccaggctggtcttgaactcctgaccttatgatctgcccacctcggcctctcaaagtgctgggattacaggcgtgagccactgtgcccggcccagtctaggggttttctgtcacgctcctcaaaattcttcccgcctcaccactgcccaactccaaagccatctccacattgttaggcattccagcagcaccccacttcctgggccaggatctgtgttggtttccacttgatgttgctgtaacgttgccacacttccgtggcttaaaacagcacaagttcctcaccttacagttccgggggccagaagtctgagatcatcttatggggcaaaatcaaggctgtggtccttctggtgtctctgcggggagaatccgcttccttgtctcttctggctgctggaagctgctcacggtccttggcccaaggctcccaggcagctgtcttgtcactcagcctccctctcccctccctcgctcctgctgcctagtgtgggcccttgtgatgacagtgggcccacctgggtgatccagcatcctctctgccgcttaacttaatcttatcacatctacagaatccctttgccatgggagaccatatttacaggctctgcggactcgtatgtggctttgtgggggccattgttctgtctgccacagccacagccacctaggggtgtgctggctcccgggccataagctgggcatccctgggtgggtgggcccaggaagggctgccactcctgtctgccaggtggggtgctcctttgtgccttgcgttctgcccactggcttgcacccctggcttgcccaggcacctgaccaagtccaggctaggcagacatgagattaagggagcacagatttttgcgcccaagtcaggcatattgcactccagtgcccagaaggcagcggtcgggggcttggccctggggctgcaggaactcttcagccctggctgtgtggggtcaaccctaaggtgtctctgggacaggcaggtggtcgcactgttagggcttagggactggtttgctgctataacaaaggtccatagactgggtgacttaaaccacatgtattttctcacagctctggaggctggaagtccatgatcgaggtggcagcaaggctggtttctcctgaggcctctctcagcatgtagaccgtcttctccatgtcttcacacggtcatccatctgagtgtgtgtgtgtcctgatgtcttcttattggacaccagtcagattggattagccccctgcccctcagtgacagttacctctgcaaaggccctgtctccaaataaggtcacatcctaagataccgggggataagactccagcatgtggatttggaaggacattattcagcccatggcaggggcccagtctcatcttggatttggggtgggagtgctcagcagacactggggtttcagaactgcagggtttctggtagcgtggtgctggcacagggttacaggcatgggtctggctctgaagtgtttgcctttggcatcccccaagtccctgaggggctctctgaggcccgctgtgactgcactgggtgacctgagcctgcccgttgaagctgtgctcagggattctgatgcctggcatccctagtccccccgagtcagcatcaaaggaggggactctccctgtgtcctgagtgctgtgggctctggcctagtggcccgcagagccaggcagtggtgaaacggcccccactgctcatcatgcagcccggggccagtgctgacttagtgcctcttccagaggggaccttttccctgtccttgggcctgctgtgtggggtgcatgaggcctcaggtgccactcacagactccggcctcctcaggacccagccccactcccgcrggaggtctgctgtgattctccatgccccctgacgccccaaagcctggccctcccgtgctccagcttctgcccccgagtttgtcagtttctgccggtgcctcccgtacccccaccaccattcacgcgcctctgccagcctggcctttccctgtccatttcctcctggccttgctgccaggtgggcctcctgggccagtttggctcggccttgcccatgatctgcggggcttagctcccacaccctccagatacataaacaagcattccccacagcatggtcccaaggacggtggcaggagggccccagggatgggtttgcacgttgggcaaaggcctcagtatgtccgcacctgctgcaaggagcggctttgcctgcccggctactccaggcccctccccacagagagggagccccggggagctgccgagatggggtttgctgagagctccatgcagccaggtgcaccctgtccttcgagccatcctgttggagggtgggcaggctaaatggcccatgcgtgcaggtagatgcttaaggactggctagtgttaagggccaggaggctgggatcctgtctgggccccgaggtatcagtctcagctatggcagagtatgaggtgggcttggggccctggatcacctagagactggcttgctgagtgagatggcaggcgtgaggcccagggagacaaagctttgggtggctgctgtccacacaggtgggctccttccttcttcccccactgggccctcagctgctcccgcctcccatttccagtgctgcctggtcccctgaggcgtgtcccaggttgtccctaggactgtgagtccttcagcacctcccacccagcctctgagcctggctgctcagcaggattccgccgggcagcagcagccatggcccagctccccacagcctccgtctctggggcaccaagagcctcctgtcctggactttgcctggctgagaatttcactgtggtctgtggtggctgccacctctgaggtcataagtttgagctgggcatcagcggggggcacctcctgctctcccgagctgtagttttccttccgtgagttcctgcagtcctgagcatggcagggggaccctaggagcaggctgggcactgagccctcccctcctcctgccttgcagagctcaggccccggggcctccagcggcaccagyggagaccacggtgagctcgtcgtccggattgccagtctggaagtggagaaccagagtctgcgtggcggtgaggccccgggccagtgggttggggctgtccctggcccctgccatctaaccgtgctccccttgcccccccagtggtacaggagctgcagcaggccatctccaagctggaggcccggctgaacgtgctggagaagagctcgcctggccaccgggccacggccccacagacccaggtgaatgctctccccacgcctgacactgcaggggacyacgtggccctgctggcttccacgtcgccctgtgggctggccccagcagcagtgatgagctggcagccaggatactggagtcctcaggtccccaggaaggtttacagttagccctgggcaggtggaggcagtttttgtctttcctggggccctgcatgtacacagctgcggtacacaggggctgcccttcctccagtcaaaggagggaggagggccaggaggtggccaggcagctctgggccctggttggggcgtctcagccgtgcctcctgtcccttcccctgtggcagcacgtatctcccatgcgccaagtggagcccccagccaagaagccagccacaccagcagaggatgacgaggatgatgacattgacctgtttggcagtgacaatgaggaggaggacaaggaggcggcacagctgcgggaggagcggctacggcagtacgcggagaagaaggccaagaagcctgcactggtggccaagtcctccatcctgctggatgtcaagcctgtgagtgggcggggtggggcttcagggggccaggcactgccctggtgcccgcctagccggctcagcctgtgaccctccccctgccctctgggttctggggagactttaaagccgagtttagaagtcttgggataaacacaaacttggaggcaggaaggtgtgaatttggattgttttctgtgggccctttaaggaaacagaattgtggacacacagtggttgagggtagggtgcatgcaggtacttcctgggtgttctgagggtggctgaccccagcttttcctcccctttccccacagtgggatgatgagacggacatggcycagctggaggcctgtgtgcgctctatccagctggacgggctggtctggggggcttccaagctggtgcccgtgggctacggtatccggaagctacagattcagbstgysgwgraggacgacaagrwggggacagacttgctggaggaggagatcaccaagtttgaggagcacgtgagtgagccggccggggagaggaggggagaggagactggggaccctggcccataccctgcactccaccccacggcagtggggagcgagtcccagagtgaaccccacctcagaggaggctcctggctccgagtgggctgtaggggaacagccctgaccgtcaccctccgcctctcctcaggtgcagagtgtcgatatcgcagctttcaacaagatctgaagcctgagtgtgtgtacgtgcgcgcgtgcgtgaggccctgccacgattaaagactgagaccggccctctggctccgtcctggtcatttcctgctcgtacctggcctgtctccctccctgtctcagccccatctctgccctgctgttcccacacagtcatcctggctgctgccaccctctgtggccatgtcaccttgcccccagcagacctccgcctgtccctccatctcctggccactccctcccaaagctctggccctccctcttctttccattgcaaaagcaagtccagttcagggggtttaaaaagccagaaacagaaactgttaggtcactatctggagaggccaccaccccaccactctgcctcctgttggcattgtccccatgggagcaagcgtgcaagcctggaattgtccaggaaagaagtcccagtagcacccggccctgctgccatgccctttgtcatgtgctgtcccggccctcccctcacctcattcattcctggaatccctgccccttgctccagggactgtgcccctcccatgatgttctggggtggccagagcgtggctgcctgggctctgtggagctgtgcctcagcatcctgacagccgtatgtggtcagcatgggtggccacactccctcccctggaccacccgtgtttgcattggggtgaaagaggatggggtgtaattacttgattacttctggtcagactctgtcctcggggccccaagccacaggggaatggattctccctgggtagtggcccctgactttgccctcaaacctttagaaagtttcctgtggggcttggactgcaggaccccataaaagccaccactgagggacactgggccttcatagccacaaaaggtcttttggtgccagccgacagtgggcatgcgcccccctgccccacgccgccctttcctgggtgccaagctctttccaagcgacatttgcgtccatctgggctgcctcgtcctagcctggctgctcaagctctaactaaggcagcctctggcctccctccccaggcccagggcaggagctggctgctggccagcggttgtcttctgggtcggtgggggtggagtctggctggtctgtcctccaccctttccgcctcctggcaagtcctgagctgcacctcattgcccggccaaagggcagagacacgagcgactgggggcacctctggtgaccaagaccgggctgcgctccaaagaggccgttgggcctggagtggggttggggggtccgagaggagttgggtgacatcccccaccccatcccgggtccagctgtttcagcccctctcggcgcgccgatactattagccccacccgtcctccatcgagtcccgtgccgctcccaaacsgcacgataagccccacagggagtgcgccataggccggggcgcgtcacggggccgggkcgggscggagtccggacgtcgggagcaggatggcggcggagcaggaccccgaggcgcgcgcggcggcgcggccgctgctcactgacctctaccaggccaccatggcgttgggctattggcgcgcgggccgggcgcgggacgccgccgagttcgagctcttcttccgccgctgcccgttcggcggcgccttcgccttggymgccggcttgcgcgactgtgtgcgcttyctgcgcgccttccgcctgcgggacgccggtagtmccccgtccgcgcgacgagccccccacgcccggcagaaacccccacctatggccggtggaagtccttgyccccccgtggaaccccccatgtcccacgaccggtctgtccccgcgctggtctcagcgcagttacctcgtttccagacgtgcagttcctggcctcggtgctgcccccagacacggatcctgcgttcttcgagcaccttcgggcyctcgactgctccgaggtgacggtgcgagccctgcccgagggctccctcgccttccccggagtgagtaggggtaagcgggcggcgcggcggccacggkgtgctgggccgagcgcggagctgacttctctccccgcaggtgccgctcctgcaggtgtccgggccgctcctggtggtgcagctgctggagacaccgctgctctgcctggtcagctacgccaggtgggctgcgggccactggcagggagcgtgggcatgggatgggcccccagcgccggggctccgtgctggactgtggcggcggggctggctgcccaggggtcccaggactggcctcccgcccccactcttcagggtgtaaggaggggctgggtgagggtggagctcccaggttggaagttccaggccccaggtaaccgccgtcttgggtggcctagtgaycctcaccctgggaccccctgactcttggctccccacagcctggtggccaccaacgcagcgcggcttcgcttgatcgcagggccagagaagcggctgctagagatgggcctgaggcgggctcagggccccgatgggggcctgacagcctccacctacagctacctgggcggtgagtgtctggtgcggggcaaggcaagggccgggaaggaggagccccatcttggcccgaggtcccccaatccyaccgccttcctccccaggcttcgacagcagcagcaacgtgctagcgggccagctgcgaggtgtgccggtggccgggaccctggcccactccttcgtcacttccttttcaggcagcgaggtgccccctgacccggtcagtccctcctctaaaccctgctgtctccaggcgacaggccccaagccagcccttgccctggcgagaggtgtgccacccaggcaggtcaccccagtgctgtcccaggaagctggcacgggctgcattacctttgctctcaaactagggtgtccctggctgctcccaggcctcatcctgcattcctggcccccattcttcaccgactctgttccacagatgttggcgccagcagctggtgagggccctggggtggacctggcggccaaagcccaggtgtggctggagcaggtgtgtgcccacctggggctgggggtgcaggagccgcatccaggcgagcgggcagcctttgtggcctatgccttggcttttccccgggccttccagggcctcctggacacctacagcgtgtggaggtgagcccgggcactttaggggtgggctcagcagaacctcagcagcctctgactcccttatctatttctgcaggagtggtctcccyaacttcctagcagtcgccytggccctgggagagctgggctaccgggcagtgggcgtgaggctggayagtggtgacctgctacagcaggctcaggagatcygcaaggtcttccgagctgctgcagcccagtgagtttcccggggaggaggtgtgcctggtgggagatccccggggtttgggaatgggcagggaaggacagtgaggtactctgctgaagtttcagcrgtgatactgcaggccgtggcagggaartaagtggtggggctccytaggagctcccaagcagaaggtgagcacaggtgtccttgactgaggcggggcggggagcagggggacaccagggtgaatcaggaagacccraggggtggcccccaccctttctccacccacgcggcaggttccaggtgccctggctggagtcagtcctcatcgtagtcagcaacaacattgacgaggaggcgctggcccgactggcccaggaggtggggtggatgagtgggtaggcggagggtggctggggggctctgggggcccctgcaggttctggctgggctcattgccacctccttccccgcccagggcactgccacccccttccccacccagggcactgccacctccttcccccacccagggcactgccacccccttccccacccagggcactgccacccccttcacccagggcagtgccacctccttccccaccyagggcastgscacctccttccccacccagggcactgccacccccttccccacccagggcagtgccacctccttccccacccagggcagtgccacccccttccccacccagggcagctgggctcacggccacccccttccccacccagggcagtgaggtgaatgtcattggcattggcaccagtgtggtcacctgcccccaacagccttccctgggtggtgtctataaggtagggacagtgtcgggggcccaggtgggggcaggtctgagggatggtgctgggtgggggataaggaccagccagctcaacgccctcttcctgcagctggtggccgtggggggccagccacgaatgaagctgaccgaggaccccgagaagcagacgttgcctgggagcaaggctgctttccggctcctgggytctgacggtgaggccctcccatcccccctgctgtccaccttcaaagcaccagggcccccgcttattcttgccccgtccacacagggtctccactcatggacatgctgcagttagcagaagagccagtgccacaggctgggcaggagctgagggtgtggcctccaggggcccaggagccctgcaccgtgaggccagcccaggtggagccactactgcggctctgcctccagcagggacaggtggctgccccaccgccctcatcctgacccccagccccggtagagccctgactgggagctagccccaagcttctctttccttacctcctccstgcagctgtgtgagccgctcccatccctggcagagtctagagccttggcccagctgtccctgagccgactcagccctgagcacaggcggctgcggagccctgcacagtaccaggttsgggggaggcccaccctgtcattctgccctgtgcgcccccgccctcaccctgcccaccgctcctgtcctctgctccctgcaggtggtgctgtccgagaggctgcaggccctggtgaacagtctgtgtgcggggcagtccccctgagactcggagcggggctgactggaaacaacasgaatcactcacttttccccacagcttgtcctgtgttgtttgtgtcgtttgttcacccagcccacgggctgcgcctcccgggctgcggctgggctggagtcgggaatctgagctcgaggtagcaggaagatttgcatcccagtgaaagcacaggccctgccggcgtgggagacagccctgtgctgaagcccgaagggcagtgaggagttcccyggctttgggtgggctgtggggagtcagatcccacactagaactacaaagccacaggcagggagggctttggtgtctgccttggagttgagggagttgctgcagacctttccttgctagaggcaggctggggacaggacagggttgggggtagtgccaggtaagagggtccagccgtggccctgggctcccacgcctgcctaggcactgccccccaggctcagggtcagtgaagacgtctcaaactccccaagtcaaaagggagtgctcaggtgtctcctgccactgctgctgccaacccagcaccaccctggcatctggcgtcagggacacagctcctgacccagcagcccacggaaggagaggaagaatggggaagaagttgaagctccaggagatgactcagccccagacacctggccggagtggcactgcacgtggctgtgctgggctggccctgcctctgcaccagcaagttcctgatctcagggttccgccagtttgggcaacgtgagcttcaagaggaactgcttgggggagaggttctaggcttggcaggaagtggaggctgggggcctgagcctctcttgtcgaagcagcctgaggtggcacagacaggcaagggtgtggggggaatgctgaccgcctggggcacttccgtctgcccaggcattccaccagaccagctcacctggctccccgggcttcagggtgggcagcaccactgtgtggttggctgagggtggagggtggggacttggagcagaggcccagtccagccagccccggggagtacgagctaggagagagatacagactcacacacattggacagaacacaccacaccccagggcacccgcgcactccgaggggcccagccagagtggctgtattcttccgttcttgcactgctgtaaagaaatacctgagactgggtaatttctaaggaagagaggtttaattggcctgtggttctgcaggtacaggaagcatggctggggaggcttcaggaaacttaccatcttggtggaagcggaagcgggcaggtcttacatggccggaggaaggggtggggcggtgccacgcacttccagacaaccagatcttgagaagtcttatcatgggaacagcaccaaagggggaagttgcccccaggatccaatcacttcccaccaggccccacctccagcactggggattacgtttcaacatgagatttggccaaggacccaggacccagaggggcctgcacaagctctggaggggccaccgctcctctggtgtcttcactgccccctccacacctccgggctgccccaagctcacccagtcatgcctgttgcaaggtgtctgacagagccagcgtgcagggggcggagccagcgtgcagggggcggggccagcccctagccccaggcccagtggggagctgactgctgcgtgggggctgaatcaggcctcgactcagggtggggcccagactcctggaccctgcgaggacctcctcagagctgtccacaactgccctgagctccctggtcaacaggggctggtagtcagggtgggggcccttctccccctttcttcgtggatctgccagctcttggggatcctgttctcagggccctggtgggtagagccacaccacaggcactcaggctgcaggtggccactcccctccagcagcccaggcaggagggcccctcaaaggcccattgtaggcacgtccgtgtggctccccagcccccgcaagctcacgctagcgcacgccaccacgcccgtccgtggtcccgcccggggcggcttctaggtcagtcctgggcacaacttcgcaggaggagcagcggcaggtgctgcaggcaagggccgccatggctgggggtgtgtggggccggagccgggcccgggaggctcccgtgggggctctaaccctgacagcactgactgaaggaatccgggccaggcaggggcagccccagggacccccttccgcaggccctcagcccaagtcctgggaggtcaaacctgaggctgagccacagacccaggcactcaccgccccgtctgaggcagagcctggacgtggggccaccgtccctgaagctggcagcgagccctgctccctcaacagtgccctggaaccagcccctgaggggccccaacaggtgaggggtgagggaagggatgttgtgcgaaccggcctgggggtcctgtggatggtaggtggaaggcggggtggcaggggggcggtgctggccccgggggaggtcagcgtgaaacaggctggtgagcaacagaggagcaagggattttgtaggaagccaggtgggaggccgagggaccaggaggagagctaggagaggtttgggcacttcagacgccccacccatcctgccctaggttccccagagttcctgggaggagggagttcttgccgacctcgcgttgtacacggctgcctgcctggaggaggctggctttgcagggacccaggcgacagygctcaycctgtcctcagccctggaggcccggggcgagcggttggaggaccaggtcagccttcacccacttcatgccctacagaatcctgccggttcgggcaccaaggtggtgggaggggcctggagagcgcagccwgaccctgccatcttcaggctgctcctgccaggcgggatcagggtgggggtggaggtggggtgcaggccagaggggaatggacggtggaggaggcctgactgctgaagtctgcccccttccccaccaggtgcatgctctggtgcgtgggctgctggcgcaggtgcccagcctagcggaggggaggccctggagggcggccctgcgagtgctgagcgcactggccctggagcatgcgcgggacgtggtgtgtgcgctgctaccccgctctctgcccgccgatcggtaacccaaccgtcctggccctgcggtccccacgcggcttccttccctcttcccgcttggcggtggagtctggccccagaagagggagctgaaaaggggcagggcctccttattccagccccgcgatgactcatgccccgtatccattcccgctcccctcatttttagctccgcaaactccccccacactcctgccacagagtttctgatgctgggctcctctcttggagccaccttctatcttcgggtggcctcccctggagaccgtcctggggttggctccggagtggggtgaatgaggctggggggctaacgtgcctggacacccctggctctttggttaattggccccagaagttatctttggttttattctctgtggcaatttttttctttttaataatgccaggtttgtttcactgtcgctgacccaacgggactcccagtgggtccccaccctgcagctcagcttgagataggctatgttgtggtctgcacaattaacccttcatttgtttctctgagatttggggatggggggagatggaggggtttcctgcccctcccctgctggagtcctactggctgcctccaccctggctggggactccctacatcccctggacacccacccatctcttgtctcacaccagccccctccaaaccctcagggtagcagccgagctctggcgcagcctaagccgtaaccagcgtgtaaatgggcaggtgctggtgcaactgctgtgggcgctgaagggtgcttcggggccggagccccaggcactggcggtaggtggctccagccattaccagggggtgggggcaggggtggggggtggcgaggagcggggaggatgggcatagggagtttgcacctaggtaactgctcctggaatgtcccatgcgtgtctgaggctgtccccatcctgttgacagcacgcctgtccctctgctgcccagtgcagctccaggcgtgccccaggcctgagtgggccacttgctccacaggccacacgtgctcttggggagatgctggctgtttcgggctgcgtgggwgccacgaggggcttctacccacatctgctgcttgcgctggtcacacagctgcacaagctggcccgcagcccgtgctcccccgacatgcccaagatttgggttctgtcccaccgagggccaccacatagccatgccaggtgagaggcaacaccaggttacgtggggcgggccagcatgctgtcaccctctcagctcccactgcccacctgctcactgtccccaccaccagctgtgctgtggaggccttgaaggcgctgctcaccggggatggaggccgcatggtggtcacgtgcatggagcaggcaggaggctggaggaggctggtgggagcccacacccacctggagggcgtcctgctgctggccaggtgaggagggtgaggaggggccccagggtgtcacaccaggaagagagtcgttgctggccaggtgctgggcagggggacagggaaaaggcaggggcatgagggtggtgttgggatggggtcttctcgaggagaaaggccgccaaacggagcgagagctcccatttccacccaccccagtgctatggtggcacatgccgaccaccacctgcgaggcctcttcgcagacttgctccctcggcttcgcagcgcggacgacccgcagcgtctcacggctatggccttcttcacaggggtgagcctgcttcccggatgggtggtgaagggtgaccctggacttgatccctgaatcgcagcggcctgcacggggaccgcgggcgtgctgaccccatgtgcctcgcctagctgttgcagagccggcccaccgcacggctcctgcgggaggaggtcatcctggagcgactcctcacctggcagggagaccccgaacccactgtgcgctggttgggcctgctgggcctgggccacctcgcgctgaatcgcaggaaggtgtgagagaaggggaggggtggagaggggcttggcccggtcgcggcgaggtctgcaagaggctgaccccgagtcccagcaggtgcggcacgtgagcacgctgctgccggcgctcctgggcgcactgggcgaaggcgacgcgcggctcgtgggtgcagcgctgggcgccctgaggaggctcctgctgcggccccgggcgcctgtgcggctcctgagcgcggagctgggaccgcgcctccctccgctactggacgacgtgagcaaacgccccgcctccgggtcccgcccctcccgctgtcaccgcccccgcccctccagtctctccctcccaggccccgcccccgtctctcccgcccaggccccgccctctcaggccccgccccgcccttccagtctctccctcccaggccccgcccccagtctccctcccaggccccgccccgcccctcctgtttctccctctcatgccccgccccgcccctacagtctctccctcccaggccccgccccgcccctctagtttctccttcccatgccccgccccccagtctgtcagtctgtccctcccaggccctgacctcccaggccccgccccgcccctccagtttctccctcccaggccccgtccccccagtgtctccgtcccagatttcttccctcctgaccgcccccgcccctcccgcctgctgtcgcccagctccgcccctccaaggccgtgtcccgccaagctcctccccgctcgacttttccttccggaccccatcccttcaagccccaccccctgcaggggctctccaggcttcccaaccaggtccagctccaggccctgttccctgtccccagatcacaccgagtcagcagccttccctagacccgccgcttcctcgctccgcgctggccgccccctcccacccttgcagcccctct

SEQ ID NO: 95538 - DNA, 17361 bp, Homo sapiens
gttccattgatctgtttgtctttctttggcccaaagcagaatgtctcagttattatagtttttaaaataggtcctgctatctggtacaagtcctcctttgtttttcttcttcaaaaatgttttgtcactctcagtcctttgcacttcttttctacatatacaactatataaccatgtttaatgactgctttttttaaaaaaaatacttctcaattgtcatgtctttcatttctttttatcatcttattgcactggctaggatacccaatacaatgctgaataattaaagtgatgatactgggcattcttgtcttattcttaatctcaaaggaaatttttcaatattttaagaaatcattgcttattatattttctgtagacattttgtcggtaggttttaataagtatgtcttcttgtcctagtttgctaaggagttgaattttattaactgcattttctacatctgttgagatttttcttcaatttgttgatgtggtgagttaagtactacaagcaagaatacttgataatgctaaaaactgctattcacagtgacaatgtaacatgtaagagtatctgtagacatagatataacacctaatatctatgctcgtagcaaccacctttataaagcagaaactgcagtggatgcaacaaaatcaatagaaatacagtaataatgacttcaatgcaatgttgttgcaacgatctttttacagaaaacacacttgccacttgatttttccatattttttatgtgatgaaatagacatagcacaaaatttactatcttaatcatttttaaattttttttaaattttttacaagacgtggtctagctctgtcacccaggctggagtgcagtggcacaatcatagctcactgcagcctcaaactccttagcacagtaatcctcccacctcagcttcccaaagtgctggcattacaggcatgagatcctgcaccttgcctatcttaatcatttttaagtgtacagttaaagtggcattaactatatttattaagtacattcatattgttcatattccaccaccaccaccaccaccaccaccaccaccaccaccaccaccaccaccatccatcttcagaattctttatcttgcaaaactgaaactgtatgctcattgaacaataactccctatcccccttaaagctgtccctggcaaccacattctactttctgtctctatgaatttgactactctgggtacctcataaaaatagaatcattcagtctttttgtggctggcttaattcacttcatgtaatgtcctcaagtttcatccatgttgtagcacgtggcagaatttgttctttttaagactgaataatattccattgtatgagtataccatatttcgcttatccactcatctgttgatagacacttggattgcttccacattttacctagtgtgaacaataccgctatgaacctggatgtgtaaatatctctttaagaccatgctgtcagatattttgggtatatacttagaagtggaattgctgaatcaaatggttattcttagtatttgaagaattgtcacaccatgtggttgcaccattttacattctcaccaatagtgcataaagattccagtttcttcacatcctcaccaacacttatttcttcttaatagtttccatcctactggagtggtgagaagtggtatttgattgtagtttcaatttgcatttccctaattattagtgacgttgagcattttttcatgttctcattggccatatgtgtatcttctttagagaaaagtctattcaaatcctttgcccatttctgcattggattgttttgctttattgttgtttttggaagttctttatatagtgtgggtattaatcccttatcagatacatgacttgtaaatattctgttttttactctgatagtgtcttttcatgcacaaaggtttttaaattcttgtcaagcccaatttgtgtagttttttcttttgttgcctgtgccattgatgtcatattcacaaaatcattgccaaattcagtgttgttaagcttttgccatatgttttttcctaagagtttgtaattttagttcttatatttaggtcatgatctattttaatttttgtatatggtgtaagagaccagcttcattcttttgtagtggatatccaattttcctagcaccatttgtttaaaaaactgtctttatgccaataacacacttgttttgggtaatgcagctttgcagtaagttttgaaatcaggaagtgagtccttaaactttgttctttttccaaaattgttttggctatttgggagtccttgtaattccatatgaatttgaggatggagttttctatttctgcagaaacatcattgggattttgataaggattccatagaatctgaagattgatttatataatattaacatctaaacaatattaagtcttctaatccatgtacatgagatgtctttccatttatgtcttctttaatttcttttagcaatgttttatagttttaattgtacacatcttttactttcttgattaattcctaaatatttttttctttttgatgttactgtagatggaattgttttcttttctttcttttttttttttttgagacagagtcttgctctgttgcccaggctggagtgcagtggtgcaaggcacaatcttggctccctgcaacctccacttcccaggttcaagtgagtctcctgcctcaccccctgagtaactgggattacaggtgcctgccaccacacctggctaaattttgtatttttcgtagatacagggttttgccatgttggccaggctggtctcgaactcctgacctcaagtgatccatccaccttggcctccaaaaatgttgggattacaggtgtgagccactgtgcctggctggaattgttttcttaatttcatttttggatagcttcattgttagtgaataaaaatgcaactgatttttgcatgttgatttcatatcctcctaccttgctgaattcattagttataaccattttttaaatggaatcttaagaaggactggtgttggttcttccttaaacatttagtagaattcatcagtgaagccatcaggtccagggcttttctttgtcaagaggttatttttagattactgattgaatctccttacaagttacaggttgatatggtttgtgtgtgtcctcacccaaatctcatcttgaattgtagctcccataattcccacatgttgtgggagggagccggtgggagaaaaaactgaatcatgggggcagtttcccccatactgttctcatggtagtgactaagtctcacaaaatcttatggttttataagggatttcccccttcactgttctctcattctctcttgcctgctgccatgtaagacgtgctgtttgccttctgccatgattataaggcctccccatccacgtggaactgtgagtccattaaacctcttttttcttaaaaacaaaaaaattacccagtcttgggtacgtctttattagcagtgtgagaacagactaatacacacgtctattcatattttctatttcttcatgatacaatcttcgtaggttttttgtttctaggcatttgctcatttcatgtagttactcccatttttcagcatacaattgttcatagtactctcttataatcctctttatttctgtagaattgatggtaatgttcccattttcatttctgattttagtaatctgagtcttttcctttttcgtagtcaatttagctcaagttttattaacttttttaatctttttaagaaccaacttttggttttgttgattccatttttgttttatctgtgttttgatcttttattattttcttcctctgctagttttgtgtttgccatttgttcttgatatttaatgttaataaatgttttactttttaataaatctgttaatattccaactgttttttaatataattcctttcctttgtaatcctatgttttaaaaacacttgaaaacattgaaacgacataggcttcaccacacttgtaaaggtgccatagcacaaaaaaggttaagaatcttactcctatttagaaacccccttcccaaatccccaatttccattacatatcctgctattttcctcttagatcactggtttttagacacataaatattcctgttattccttgaacagaacaaagcaaaacttctagtcaggtgcggtggctcatgcctgtagtcctagcactttgggaggctgaggtgggcagatgtcttgaacccaggagttggagatcagcctggacaacatggggaaacccatcaccacaaaaaatacaaaaattagctcactgccaaccacttccacccagaagggattcttgtgcctcagcctcatgagtagctgggattacaggcacccgccaccacgcccagctaattttttgcatttttagtagagacggggttttgccatgttggccaggctgttatcaaactcctgtcctcaggtgatctgcccgcctaggcctcccaaagtgctgggattacaggcatgagccacagagcctggccatctccactttttcttatcccccaaaaggattaacatccctggctttatgtagaatagtgtacgctgccacatcagtgtttgagtcattccccagaggagaggggaatcccccctccatttttttttttgcaacatcttgtcttccctttgctgttgcttcccccaacacacttggttttgttctatcctgtacttcagatttgttttttgttttgtttttttcatattgaaaagatgacattgctccaagaggcaaaaataaatgggaactgaaaaaaaaaagctttttatcttatttatttaatcttttaattcacctggaatgaatattatgtcaattgggagcttaaatgcttaaatgtatttttccccaaatggttaactaatcctcccaatagcactcatttgaataatctgtcctttccccatatatgttacatgtcttttacaaaatacagcctatttgaggtatgtttctgggcttttgttctattgagctgtccatttgcttacaccagaaatgccagtttatttttttgtagtcttgcaatcttttaatttctactagtgctttttaatttaaccttaatccactgtatttgtatttttttcagtggtggtaaaaggaaaaaattaaaaatctaatgaaagcagccaaaagcacacaatttatgtcctgttaagacttccgcatgtaagtatcatgctccaaatatatttttcatctttactttttatgacggaaagggctcaagtactttgggaagcaaaacagaatcgagggacgccgagaagatacacagcaggcatgtagggtagcgtggttggcaactgttcttacaaaattttaatttgaattatacgtaatgtacgtaataaattactatttggatttccctttggcataaacagccagggaatataactaacatcaaagatcccagactctcgacacaatatactactaatcgtaacacaattctagagggtcaaaaaaggtagagaagtttggaccgtggaacagacctggtggaatgtcgacacaaagcgtttcagggtagacaaagcctactcagaacaccctaaacgcggagttttgctaagttgggacgctaaaaggcaagggaatgacaggamgtycgcaggctaattcgccattaagaaacagaaccgcggcttcttccacctccagcgtcatcggcccccaattcgctgtaacaaacggatagtgtctcgcagcatcagacaacggacttggaaatcagtttgcgaccacgcatctgcgccttttctaggaaaagaggaaggcgggtccaacactgstaacggcagaaacatagttcacaagggccactgcaaacgccccgccagcagcggaaccgttatctcgcgagacgacggatccccataaggcacaaacctagcgccaaggttggcygtcaaggtagattccagggtgtggaagtggctttgtggtgccacctctaaccgctcggaggtcaacccccattctacaccgaaaactaggccttggctgctatggaaggacagcggcaagaaagccacgcaaccctaacactcgcccaggctcatttcaacaatggagagtacgcggaggccgaggcactgtactccgcttacattcgccggtgcgcttgcgcggcctcyagcgacgagagtcccgggaggtaactatcgcgagacctggggccgcggcgaccccgggtggaggcgacgttggggttgtttgggctcctatctttgcctctggagctcacggtcggcgcttgtyataacccagcactaggactgagcgggcggacgttcgtctttctagaaaggcctaggcgaggcctaggacgagggcggcggagaacgcggggagaagcccacccgtgaggagccagctgccgcgacggtgcggagagatttccgggaaccaagccctctgcgcgatcctcgggcgcgggccgccgcctctcaccccgccgtctctccttccacgttcctcattcgcacccagagacttaggacagataggaattttccactcgtgattttagctggcgggaaatccgcgacctgggaagggaaggggtcacggctgcgtagggccacagtaccgcgactcccatctcagtgtcacggcgcaggctcttggtggtgtttttcacttgtgaaaaacgtttaaatatgtggaagagagcataacgaacgtctaggtgtttatcacttggcttaagcattatcagtttacctattgtattcatccatggatgtttcagaaggaaccaccatgtcatcatcacatagttacttaatatcaagtcgtcagtgttggaaccattctgatcgactaataaggtgttttgttctttggttcccttttcgcagttagttcaagtcaggatacacatcaagtctttttaagtctcttctccaccttcccctctttatttgttgaggaaaccgattcttgtgtcctttgaatttccgtgttttggacttgctgactgaatctcttctgtcgtttaatgtggtcatctgtctcatattgctgtgaattggtggttaaaccttgaggtttgatccaattgaattcagattcaatatcatggcaagaatactttttaggtgggtgtgtgtactttcaccaggaagcacataacgattcgctgactttctctttgtgatgtgagcggcttcacctgttactgtctgcttgcccaaagcatcttttcggcttgtgcctggatgtgtagcatttgtttttactccaagtcttgcctcgactgggcttgttgatggtatggagtggatcaggatgagaaaagaacagaggggttggttgaacagctttttgaatagttgtgagttgtctgttgtggatttgagttttctggacaggatgccagcttgtcttttgtatgaggcttaactaaacactaaggacttgattcttaccctgtttgttacgctacatggaattaaaccagaaagaaaattgccttctcatttcaataacacacaagaataataatagaagtttctgaacaggcaataagatgataccatctactttcctcagtgcacctcccccataaaaaagataagtaaacatagaaagcgaaactattcatgtttcaagctctaagagtagacttacctagtagattttaaaaagtatttatcagcatcaggtatgctgttgctgtctagtcttgttattcttccttctttgcacctctcagcctaagaacacaagtgtctgtagcatatataatagctatgccttaccagcacaggaaagacagtttgtcatagcgcagtagaagggagttcatcatgcctgaattccagtcttggcactgccacatggctaatgtctcagcctcagtttttcatctgtaaaataagcttttgataaaattctaggaactcaaggattgaaactgaattctgtcatttcaactttttcccttcaatttatcttttggagcttacatttattttctaagtattgggtcactaaatcattttgaaacaatatttgcaatttttgaatgcctttcattctgaatggtttgtgacgttttcttttaatatctaaagtatagctttagtcataaacctaatttccaaagtgtgtgtgtatatatatacacacactttatatataaaaaatatatatacacacactttatatatatataaaaaatatttttttttgcgaaagttagcaaatcctaaaaattcacatttgggttaggtaacttgaatgaattccattataataaatactatcattacaaaaattttaatattacagaaaatttcggcttcaactgttagtccatttctttaaaatatgaaacaaaatttccacatgaaaacgattttagaatttgatttaatgagatctaattctaagtctaacattttatgattctctatattacgaatatataattagtattaaaaacttataacaataattttgaaacttcgatttaatgactaaaaccttactggcatcctgagattgcttttttctttaaactctctactgggagcagttcaactagtgtcatgtcacacataggtgaaggggagtggtaccgtcttgtaatctaggttttaacgggggtgcttagtggcatccagaagtatccctacatccagtctccatcacagctcatagaatagacgttttctaaaattgcgacagttcctctccatcgttagcaaacttggtttgaaggaggcccttgggctgtgagtgcctcttagggtagcagtagttacagtccctgtctgaaatctcaaggatcaagatattaagagaagtagcttttatttacactaactgccttcacagatactttcggaggactatactttttactacggggtattacaaagaagtgacagatgaattctctgtttggttctaatttgagaattgctttgggaaaaaagaaagggaaacagaatcatccctgactcagagcagaggcactaatgttctctgtgcagactatttgtcctgtgcagagaaaggttcaaggcagccaggggctgtgacctgttgagytggtggctggtcagagctacctggctgtacagcccaggaatggctgctaatttaaagctctttgggcaacctctagttccctcaggtgcagagccagttctgcacaaaggacatcaaaattgactggagccctgagggggtctaaaggagcccaccctcctagcaggaagccagcctggcattggggaggatgccagctgaggctggagggagggcaactctgtccccagagataacttcctggggatcgtagcatgttgaattttcacttagcgttaactttagttttttattggtggaaaatgatttcaaatcttattgttttaagatcacttaaaaatttgagaatgaaattgattcacattgtgacatatccatagcaaactcgggctttgggctggctttccctctttgcttagtatttatctgttctgtcttctttgccctgctggtgtgtgcttagaaaaatgaacaatcattttaatgttatattcagcagaacaaattggcagtgaacacactgtaaagttagtatgcttttcaggttgacattgcagtggtataaccctacaaaagtagataacagggttaaacaaaaattgattttagctctttatttgtacgttttttcttcagcttggattttcagtgttgatgctgcatgttataggctgtgaagtttgacartacccaaaagagaatgaaagtggaaatgagaggaatttggtaacacggtgtttttaatgtgaactttttgtttaaagcaaatgcagccctgaggatttggctactgcatataacaacagggggcaaatcaagtacttcagggttgatttttatgaagccatggatgactacacatctgccatagaagtccaacccaattttgaagttccatattacaacagagggttgatactgtataggctgggtaagaattttttttctttttgagttttgtcattgactgtattctgttatttcagagctttcaaatgttgtaaaactaacgtggtaatcaaattttaaagttctgtgaaatttaggtttagagcttggaacaaaggaagtgtccytgagtttattttaggcttttgataggcgttatagatcacagcagagcactggggtgggaattggacctgggcgcaggagcaggggtgaccccattactttgtgcttgtgcattcccagctgtgaaatgagggcaattcagatgttcacctgtgaaacttttctgagttaaaatctttgaagacacacaagacaatagaaagtgaagtttagattcttggattaaagggaccataggtagtgtttcttcatttaaagtgtcaaaaagaaaattagttcccgtttcttaattttactgcaattatgtaaaacaggtgatacagttttattaaaattttaagatgattgataatatttacctgttaaatctcaataaataaacccatagctaattttaggtgtattattccctaagggcacacaaaattactttgatatacacatctctatattattaagataaaaagattcctttactagaagtgactgaaagctcataaatataaaagcaaaagtacatgtatcaaagcttttccatgaataatatatagaaatactcggtttcttttctcttttccattttttgggttctggtacaggatattttgatgatgctttggaagatttcaagaaggtcttasacttaaatcctggatttcaagatgctactttgagcttaaaacagacyattctagacaaagaagaaaaacaaagaagaaatgttgcaaaaaattattgayatttttaacttaatggaagtattgattcatgatccttacatctgcatctagttatcagtaatttagatattgagctattttgatttatatttaagaaattaatacattagcactgaaagttaaatagtgtgtttaaggtagttaatttcaggttgaaygggttttttttaatgaagtgtaaataataccaatgtataagtgtatattattatattaaatattatagtaaaaaggaatgtgtggtattttcttcagcaaaactatttttgtgatttttttattctcaactttttatttaaaaaatgttacatctgcagaaaagttgaaagtataataaactcttcagttaaattcatgagttgttaatattgtgccacatttgctttttctatttaaatatataactttttgctgaaacatttgaaaataaggtgacgaggtcacagtacttcgcccctaaatatttcagcctacattttctaagattgaggacatcctcctttataaccacaataccattataatacctaataaaatgaataattctgtaatgtcagccatatccagcccatattccaaagtgtgtagatttttatttggatctagagccaatcaggtttcaattgcattttttttttttatgtttctctcagttcttttaatctagtcccctgtccattttcttgccctagcattggctttgagagaaaggctattttatatagctaggctagagagacataacatttaggcttaaaaataaacatgtcctacaatttgaaagagttcagcttgaattacacttgattttctcaagtaatcattgataaaaataggttaagatttaaatattgaacatattttctgtctctggataatgacaattgttatcaacatttactgaatactataagccaagcactgttcaaatctccataataatttggtgatcaggtaggaatgtatagagaggtgaggaaatgacaaaaagcacttagtaagtataaagtttaaaaatcttttattttggtgctgccaacaattaggcccttatgaagctatcaaaaaccgggaagaacttgaagggaaaacagactaacaccagccatatgccatctacattttttgtattttattgttgtttggcttccaaagattcccaaactagtttattactgctatggaaaagctgttctgtggtggaaattacccgaatcaggagaaaggaaagtttgctttgtgtcttcagaggaaggcgcagggtaacttctgtggcctcagatgcaatcagcagcagcagccttaaaatgctttttttgtgtgtgtatgagtaatctcatgaagcagaaaaagtaattgccctgtttgtagctcataagtaatatctggcaaaatacatggagagtttgggctgtaggtaagtgaatattaagaggaaattaagtttcatggcctagaaacaaagtctctgtttctggaattattcatactttccaaaacggtttatcttatatttgttggaaatctaaaaaaatttctaaaattgcattaaaatgtagaaaaatccttaggaaaactttttttttaaaaaagcaagtttcctagaccttgggagggaaagctttaagccattccacccagagaagcaaatgcttaatgtttaattttattttctcttgactcatattctctttactcttgactgggatcagatggaatatgaaaaggaaaaattgtttaacattttcatgtggtttgttagattatattcaaaatttcttcatcctttatcagaaaaaaaaaaaaaaaagtcacttaagttcagaatcagcagttgctgattgtagacccaggcactcattttctcttgtcttgttactggaaataaagaataattcatttaccttgtttagcgttgaaactttaggcattattcagattctaagtttctgattgaccaaataataccttggatatttaccttaaaatatattcattaccgttcatatttcccacatttcagtattcgttatttcctttttctactagaaaagtaacttatgttttctaattttttcctttgtaaaaacaaaagaattgtggtttgttataaggtttctctttcacaaagtgaggtaagataggataaaatggatttaagttacttttgagtttagaatattactcctaacagtagttgaaaagtgtggagctatttgtttttttctgaaatttggaactgaataaaaccctttactttatgatagcaaagcaaatatccaagttagtctttagtcattatctatttgctcttttgctctgtcatttgctcttttgctctgtcttttttggttttctgtttttcactggcttctctaccctctgaatcctaaatgtagccttggctccctgtcattttgtaggtcttaaatctttctccgtgggcatgatatatttcaaccccacctaccactcagcgtttacactgattcttgtctcaatgtctccctttctgctaagtctagcccccttaaaaatttaactcagaagtaaacagtttgtatataaaccgtaatagcatgttttttttttttcttttttgagacagggtctcactctgttgcccaggctggattgcagtagcttgatgacagctcactgcagccttgacctccctgggctcaggtgatcctcccacctcagcctcctaagtagcttggactataggcatgcgccatcatgcccagctaatttttgtatattttgtagagatagggtttcaccacattgtctaggctgagcatgaatgtttactgtgctagttttttgttttattgagaataattcatatatcatgtagtttacccatttaaagtgtacagttcaatggtttgaaggtatattcagagttgctgcaccattttttcaaggtttttgggtatactggtcttgcatgcaaactgcacttaaagttacaacacagaaaaaattttatgcaaattaatgactaaacatgagagtgtttcaaaaacaacagctcatgcacaaaacagatctaagagtcctaaaaagtgctgcttctggcttcattcaaatatgtggcacgattccactttgtctcatgtgatgctctctaactagaaatgtgttgagtaaatcagacggctcatctctgcctgaaatggatgctgaatttagtgtgtttaggttaacatattgctacgctaaacaaattgttgacaaatgtgtaatagcttttcaagagcatagtgaaaagttgactgaatatttgctatttacgctaggtgtgtaattttaacaatttctatataaattcacattttggtgttttctgtgtttctaaaaaatgtgacagtaaattgtgagaacagaatgcccataatttaaaatggcagttggtaaaagagggagagtgagatttgttaaatttcaaatctaatgttaagggacttcaaatgacaccatttcactctacagaaaggaaagaaggatgagtatagtctaatttctgtttttgaaaaaacaaagcaattgatacaattaaaacacatagtttatcctttttaaaatcacaagaaggtaaaagaacacgtcatgtagcaagacaaattataaaacaagcaacctgtaaggaagccccgaaactgaaattatgaatgtggatataaaagtaaaataggaacacaacagtgtaatcccaggtttatatgtgtcatcacaaaatcataaatatagcagtttagtgaaggtcttattctgcatagaggatgaagctaagaaattgagtaacttgtgcaaggttgtgtccaaaatccatataaatatttgaaactgcaatgagtatcaatgtttttgctgttggcatcaactcacagcagatatgtggacttttttttttttttttggtcctgataaaaaatttaaattgctcataaaatgttttagtacccagcaaagtgagtatcagaataatattaaagtatgtttttaaataatggaatgttattgcaatgcccacattgcttggtggtcatttttcttattaaaaacagacacaaaagatggtgaaaagcagattaattttaagagcaaactccatttggaaactagatagctacagctgccaatatgtaaatttttatcttatgtcaaaaaaagcatccaatacgtagaaataaggcaaaaggatttgcatggcatttcaatatcataccagcagacccactcaacgactgtttaattcttttggggagccatgtgtgtgcctttctttgattttctatttactcttgattagggcccagactctgggaggttgcatgtaacttgcagatttttgtccagaggagatgcaaatgaactctggtagaaaagataaccccaaaagttttggctgtattgccctgaagaacgttaaccagttttgtatttaacctagcaactttattcccaaattctttcttcatggaccataagtactcagttattctaatgctcttttaccactctggcggttctctattaatgagttaaacatttttcacattttcattctatattcttataagaatcgtgcttaacttcaaaaaacattttggccctactactgaagaaacaacaaaaaacccttggtatggtttggctgtgtccccacccaaaatctcatcttgaattgtaatccccataatccccaygtgtcaagggagagaccaggtggaggtaattgaatcatggagctgtttccccgatgctgttctcgtgatagtgagtgaattctcacgagatctgatggtttttaagggtttggcaagttcctccttctgtcattcttcctactgccttgtgaggaaggtgccttgcttccccttttgccgtgattgcaagtttcctgtggccttcccacccatgctgaactgtgagtcaattaaacctgtttcctttataaattacccagactggggcagttccttatagcagtgtgaaaacagactgatacaacccttaagtagaatttattattacatagtcacattatttctagcaggaataagagccaagggggactgaaaagcttcagtttttttttctgttgcttatttattttttttttttgagacagagtctcgctctgttgcccaggctagagtgcagtggcgtgatctcagctcactgcaacctccacctcctgggtttcaagggattctcctgcctcagcctcctgagtagctgggattacaggcatgtgccaccaagcccaactcatttttgtatttttagtagataccgggtttcaccacgttggtcaggctggtctcaaactcctgacctcatgatctgcctgcctcgtccttccaaagtgctgggattacaggcgtgagctaccgtgcccagcccgcctatttctttaaactattcaacaattcttgtttggagtgtgtggaggcttgagctctggctgaagcgaagtagagggaaggccatcacattcaatttaaacacatgcaaaaagtactccttttaaaagtggcaaacctgcagaatataaggtaaaaagcagttcctgtctatccttctaggcctttttctttgtacaaatacatgggcacaggtatgcagatacatgcgcagaattatggtatacatattatttggtaacttaaatcacttattattttgaacattcttttgtgtaagaacttagaagtctaccttattctgctttgacacataatttttaaagccgcatgaaaagtgcttgccaatttcttgatatacaattaatacatggctatggtaataaaaattaaaacagtacaggaggtataaataaaaagaccccccgcctttcatatttttctctacagctaaccatttttagccagaataactagaaacaaagggttaaaaggctccctttcctatggctgctagtcacctcttgaaaaaattactattagttgtgttcaccacctgagtgcctcttttccctctaggcaattttgactcctgtgtaccaagaatacctttgaatgtattcttttggcaccacgttatttgaacctatttccactttattggaaagctctttttaagatcacagagttgatgttgtgcaaacttaaagcatcccaaacggagttcctggtcctcccccagcacagctaatggcagctgtactgtcccgcctctcatgccagacttggtcccagtgctccccagcggcaaacactgtgggttcctaccttgaaacagatcccgattccagcaattttcatctcatccgctaccacccaaagccaagacatcagcccctctgtattgcgagtatcctgctttgtc

SEQ ID NO: 95539 - DNA, 61718 bp, Homo sapiens
  misc_feature (1)...(61718): n = A,T,C or G
ctggggaatgttggcatgtaagctattcacagttacatagttttgtgttctgtttattgtcgtaacatcagttcttcctgaggtttttcagtagagtaggcttgggccgtggcctactgtagtcccatgtaggatgtcaaatatggttttgttgtgaccactttccttttctgtgctcagggcagacattactaatcaatcacaggctcttttcctaagccgggttgtagctttagaatcctcaatattctgttttggccctgaggaagggcaatccatcccttaccaatgggttcattcatccactccttcattccacaaatacgtagagagcacctacagtggacgggtaccatctcctaggtactggagatattgcaaagaaaaggccatatgtccattactatggagttcacattcttatgggaaataaaggaaataagcaagtaaatgaacaagataatttgagacagccataggctctatgagacaactaaaacagggtactgtagttgagaagaactggggtaactactttggacagagagagcagagaaggttaaggatatactttttgtctgggagctgactgaggagaggcaagtggtttcatgaagagcattccagagatggggcagggcaagtcaaagacgccaaagctgggaataagtttggtttgttccaaggacaactaagaggccagtgtggctggagcagagtaacgagcagggagatgggtagaagaggacgaaaagcacagccgaggaaacaatcaatagattgaagagacagcctacagaattgcaaaccatacatctgataagggttttatatccaaaatatataagcaactcaaacaactctatagcaagaaagcaaataacccaattaaagaatgggcaaaggatctgagtagacatttctcaaaaggagacatacaaatggtcaaatctatgaaaaaatgctcaacatcactaatcatcaggcaaatgcatattaaaaccacaatgagatatcacctcaccctagttacaatagttgttataaaaaaagatgaaagataccaagtgttgacaagatagagaaaaaagaaaatccttgtatgccattggtgggaatgtaaattaatatagccattatgaaaaacaatatagaggttcacccaaaaatttaaaaatagaaccaccatggccaggcatggtggctcatgcctgtaatcccagcactttcggaggccaaggcggacagattgcttgagcccaggagtttgagatcagccttggcaacatggcaaaacctcatctctacaaaaaatagaaaaattagccaggcatggtggtatatgcctgtagtcccagctacttggggagactgaggtgggaggattgcttgagccccagggacttgagactgcagtgagttgagattgtgccattgcactccagcctgggggacagagtgagaccaggtttttttaaaaaaaaagaaaaagaaaaaagaatcaccatatgactcagyattcctaattcctattacgggtatatatccaaaggaaatgaaatcggtatgccgaaggaatatgtgcattgtgttgtttactgtattaccattcacaatagccaagataatgattcaatctaagtatccatgaacaaacaaatggataaagaaaatgtggcatatatccactatggaatactagtcagccttacaaaaaaaaggaaattctgtcatttgtgatgacatggatgaacctggagggcattatgttaaatgaaataagccatgcacagaaagacaaatactctatgatctcagttatatgtggagtctgaaaaagttgaactcacagaagcagagaggagaacgatggttgccaaaagatgagatgtgggagtggaggggtggggagatattgcttgaaggatgcaaaatttcaattagatggaggaataagccaagagatctatagtgccacatggtgactatagttaataacaatatattgtatttttgaaaatctcagagtagattttaagtattcttctttttctttctttttctttcttttcttcttttcttttcttttttcttttttgaaacagagtcttgctctgttgccaaagctggagtacagtggtgtgatctcagctcactgcaacctccgcctcccgggttcaagtgattctcctgcctcagcctcctgagtagctgggattacaggtgcctgccaccatgttggtgaatttttstatttttagtagagacaggagtttcaccatgttggccaggctggtctcgaactcctgaccttaggtggtccacctgcctcggcctctcaaagtgctgggattacaggtgtgagccaccacgcccggccagattttaagtcttcttaccacaaaaaaaataagtatgtgaggtaatacatacgtttattagctcaatttagccactctacaaatgtgtatatattttaaaataacatgctgtacatgaaaatatatataattttttgtctgttaaaaattaattaattaattaattttaaaaagaggagggcagggaatacttgtgtattttgttaactggacaaatgaaactctactttcatttgctcattaaacaaatacttgttttgtgctcagcatgattctaggcactgggactactgcattttggtccattacttccttgcgcacaaaaaccctttcttttcaccacgaatacactatgaacatgtttttttcttcagtgttggcatctcttgattccttccctccaggtctttgtgcgagttttactctttaaaccccagatattgtcatatttttctctgttaaacttttccaaacaactcaaaatagggtaatttcttcttcttctgaatttctctgacaattattctatgggtcatttattaacacagcataatcaaacaacttatttattttcatctttcttgatcctttcttcagttggatgttgtctttgagggcagaggttgtcctctatgttttgaagtctccacacagctcatcgttgccttgcccgtagttgtagctcagtgaaataaaaatctgtccgtagaaggtgatgtctgtgactggtgagccgagagcttgtggggttggtgttgtatttgggtgcatgtgaatcagtgcatctcctgctccattggtgttaaaaggctcccatcgtcctgggaacacaataggaaagagaacaggtgggaaggcactggatgaaggaatgtggagaatggaggaaaagttgatcagattgttgacaactttcagtgttgaaattgtcaccaaaatcaaagtcagtaaataaatttacaatgtccttttcttcaatgcatcaataacttcaccttcctgttcaaagcacagcaagtaattaatctcttatttgcatttgaaacccaagtttcagatgtttgaaggtggttgtaaaaaataaaaaccaaaataaagccaaaataaataagcagcagcactaggccgggcacagtgtctcacacctgtaatcccagcattttaggaggccgaggtgggtggatcacaggaggtcaggagtttgagaccagcctggtcagcatggtgaaaccctgtctctactaaaaatacaaaaattagccaggtgtggtggtgtgcccttataatcccagctactggggggctgagacaggagaattgcttgaacctgggaggcagaggttgcagtgagcagagaccatgccactgcactccagcctgggcgacagagtgagactccgtctcacacttgtggaacccagaacttagtaaccatgaacagaaccttaataaacagaaagttctggaaataaagtttaatcatcatgcaatctttatcactgggttaaatgaacaatcatctgggaacatgtcttggaatgcttaaagctttgagatgcatgtgcctatgtggcagacaaatttcaaatgtgaaacgtttagttaacttggtcttgctttttaatcactgctttaaaatttaaaaaatgctgctggtcaagtaaaaatagcaatagataaaatctgccctgagcaaacagaccatacatcaataaatgaatacttagcttaagcgattttccatgagacccatgaagcatttctaattgaaacttaacaagctacaacccaacagacactccaatcttcacttctagaagggaaatgtgatactccatgtagacgtagctttttaaatttagctggaagacagcgtgacagtgaagttgtgtgctgtaattttttaaaattgctgaagtgtcatggtttgctatttcgtatttattgaaaaaatgtaaatgctatatttaacagaatggcagtaactctgtttcaatctgaagacttaatcttactaatcatggtaatatatgctggctggagttgggaatatttcataaaatactggaataaatttgtgcttatatttcaggggaattaataaaagcaccttcatctgcaacatttaaaatgttattgcctttaaatttgtattaaataatgcagggaagatagatcactgggggagaatggatgcacctctgtgaggatcttggtcattcaacacacgtgtacgggtgaggaaactaaggcacgacttactgggtagggaggtagggatattagcaagatccttcacttgtctgggctttctgtctttgagtcacctttgcgcagtttttcactggacttcacaagcctctgaggcggcagggcagacaggacatccttattttatagaggaggaaacttaggcttacagaggtttcctgccccaaatcacaaaggtggagcctagaccttctcagtctccaccaactgtatttcggttagccacaatcctatctacccacatccaaatggacacygtggctctgcaacttctgtcaaaagggctctttggcaacaggaaaaacgtcatggctccattgtattgtagaggatgggaatgggtgttccggctaaattctccctcccctttccctccacagctcagatggcaaatgtgcgacccagggacctcccgctccagcagacctgtgcgcacaactttgcacagattacctgctaagtcagagccgaaaggtaacacagatgccaaaggataataaaggtgaatgagatttactcaaaattggaaacttggtgtttggtttttcaggagaacaatcaacgactgtgatttgaagttcaccagggtattctgagagatctaatcaaagatagagtgctggtttgaaattattaaaaggtaacagtaaaagggagagcaaaaccccagtcccaacgcaacccataaatctactttgtcttcctcgaaagaggggcgcgggtgggcgcgtctccccgcgagcatctcacctaagggggaatccctttcagcgcacggcgaagttccccctcggctgtcccacctggcagtccctctaggatttcggccagtccctaattggctccagcaatgtccagccggagcttctttgggcctccgagtgggagaaaagtgagagcaggtgcttccccagcggcgcgctccgctagggcccggcaggatcccgcccccaagtcgggaaaagttggtcggcgccttttctccccgacgaagccgctccagggctgctctcagaggacgcgcggcaggcaaagagaatgaacctgagcgtccacgaaacgtcctgcacggctcccgggagctgggagaaacaggtgcctttctccgacgtccgcgggcgacgcctgccgcaccttgcccgctgccgcgcccctcccgggcacccctcgccctcggcgcccctgcccccacccccagtgccagggcggaggcagtcccggctcgcaggtaattattgccagcggagcccgccggggagcgggggtgggcgcgccggcggtgggcgggcgggcgcggcggggcgcgggcataaaggggcgcggcgcggggccccggagcctggctcccgcgcagcatgcccgccagcgccccgccgcgccgcccgcggccgccgccgcmgtcgctgtcgctgctgctggtgctgctgggcctgggcggccgccgcctgcgtgcggagccgggcgacggcgcgcagacctgggcccgtktctcgcggcctcctgcccccgaggccgcgggcctcttccagggcaccttccccgacggcttcctctgggccgtgggcagcgccgcctaccagaccgagggcggctggcagcagcacggcaagggtgcgtccatctgggayacgttcacccaccaccccctggcacccccgggagactcccggaacgccagtckgccgttgggcgccccgtcgccgctgcagcccgccaccggggacgtagccagcgacagctacaacaacgtcttccgcgacacggaggcgctgcgcgagctcggggtcactcactaccgcttctccatctcgtgggcgcgagtgctccccaatggcagcgcgggcgtccccaaccgcgaggggctgcgctactaccggcgcctgctggagcggctgcgggagctgggcgtgcagcccgtggtcaccctgtaccactgggacctgccccagcgcctgcaggacgcctacggcggctgggccaaccgcgccctggccgaccacttcagggattacgcggagctctgcttccgccacttcggcggtcaggtcaagtactggatcaccatcgacaacccctacgtggtggcctggcacggctacgccaccgggcgcctggcccccggcatccggggcagcccgcggctcgggtacctggtggcgcacaacctcctcctggtgagtgcgaggggccaggcggagggccacgcaggggagacagagrgcctccacaggggccagggggaagtgtgggaactgagtctcccccagacgaggcttcacttggacacgtgtatgtggtcaccgggggaaactgagcagttctgacttcccttggaaggcgtggaattaggagagaaatcccttagtgggcacacgagtgagtgccccttggagtccatctgtggaaaggaagcggtgataggtttccgcagtgaggaaagaaactcctttctctgggtgtagaggaattcctagaggtgagggcggggaggatttgctaggagtaactgcaggaagagaatgagcagggtggatgaaagaaacacgtttgttcttaagccgcacagatagcattactctctggagctgtcacgagttcagtgttaatccaataagatctgtcttgcttgtggcacaagttcacactgttgtgaaagtgtcaaaacacaactcccggagagtcagatttaaactgtgtttggaggtcccttctgcggcagggcagggaactgcatccaccaatcttattcaccggggtgtgaagaccgctttatacaatctcaaacaaagctagtcatagaaacacagaaacaactgcagggtgatatagattgttctaccacatctrtatttccacagtgctctctacagttgaaagggttcctcacttatgacattgttagcctgataaaattaattgtaacacccttgtgcaaaatattttattaattttgacagcaggaaatattgmtatgccatggtaaagttgtctcaagtatttcttcctccttttttctccttagtgttcaaatttaggcaccattgttttggggattcatttataatcatgtcagttgttagtacactttgtacagagttttgtatcacaataaaatattttatgtacatgtataaacattttaataaaagtgtttaaatgtacaacttttggtacccaattctgatsacttgtgggcctactggaagacttatttttaaatttagaattcagccacatattctgaacaaagtcagtactaaaaccatttctaaacacttttaattaaagccatagataatatggscagagcagtactgggttattgaggtgacttagtgctctgagctgctggtaatgttgtaataatggctaaattagattttatgtcagttccacaaaacctgtttgctgctactggccataaaagaatgttggatttgtttggaaacacattgtgatttttgtgatttcatacttatgtatgtcttttcataaggatgttttagagcggtgattcttatactttttcaayccttttatggatctgaaaaacyctaaagaccaccagtgtatggctggtgatagaaaaactatgggaagaatggtctcactttttgaagaaaacataagcaagttatcagttcatactggaagcaaataaatggatcagctggaggatctaatagatcatgcccataaaatctttactttagatttaaatcctacaagttctatttttagagtccctaggataaacttgcatatacaaagtagtcaattgttattatagtgacttataggatcattttattataagataaagacttgcgtgctctctggtgctctggtgttttaaataatcaacatgttttagatmtttttgcccactcatggccctctgattaacttctcagttatatttttcaatgcttacacaaaaaatttgccaaacactaaccatccttcctagaaatgcagtggactttgtatttagggaaattagtaacaggtgaatgctccattttgctgatgttgcaaacaaactgtyagttggtgtaaagtattaattttgctttcacatttcttttggtttggtgtttagtcattcttgtatcttatttagaagcgagttcccattgtcaaagaaagtatcttgaattaattttgttgtatgagatactttcattctgttttcaatgacctttctcggtgtgtatataggggttgsgggaagcgagaatagaaaaatttgagcttacctgaaaaagataaaacattctgcagattttgataaaagggcattttagctggggcttagatattgctgctgtacagatataggggccagttgtgttccgggatctgatgttggtgaaggataaagactggctagcacccttccctcactccctctgtgtttccactaacttacaaatgggctaaggagatcccctgggatgatgggaagcttgacccctcctagagagtcaagaatcattgatggcctggaggacaggaggcagaacaaacaaacagcaggacaaataatggaggccctgctcagaatggaggtcttggtgttctttgtgggttcctcatactggagtgagccttggcaaaaatggtgtgtgtgtgtgtgtgtgtgtgtgagagagagagagagagagagagagagaggagacagragagaaggagaagaggggagaggggaggagggacagagagagagagaggtctcctacaragagcttggagctcaggctgctttgctcatttgagtgtaatccaggaggatgcaccttttctctcggacttgaagaccaactgctcagccttcacagctcttgaaacaaagttcttaatgtcccctgaaatcagcactagggactgtagttggggagttcagccccagcagtgcctctgagtctttgttctgtatrtgggttctaagaggattagaatcaagttggaaatacacgtgttcccatttcccaccttcaactcccctcaccgcctgagattcttgcaaacatttgtgcaaggaacctgtgaaaaagacttctttcacgtaaggaagtagggctaggagatattaatctgggcattgttgagcattagcatcagtgtgcaggtctcagcccatctgtctgcaatgtttgttgaarccatcacttcttgtcccttgaatccttcctcaacttggatttcaggcyctggctctcccttgcttctcctctcagctccctggcgattccctcttagtctcctttgmttgttcctcctcaccttgcctgtaaatagtggagggctcagggctctgtctagattcactccaggccattgctttgaatactgctgcatcccgatgactggagattttgagtctccacccaggtttccccgagcatcagactggcatagacaaccgccttctccacgtggatgtctaatgggcatgtcacatygaacacatacatcccaaaccaaacccctgcttccccttctctattatgatgactttttactcttccagttgttggaccccgaatcttaactactcccctttttcatgtcttgtttctaatccatcaacaaatcctgcagctctacctacctccaggatgtgtccagaatcaaaccacttctccccttatctatgactacgatggaggtgcaagacaccatccaaccttgcctgggtaatgggaasagcctcactgctggggttcttatttctgccttgccccctgcagtgtgccatgatggatgctctacagggtgacattatgtgtggacaagacagagtccttgctttttcaaatcccacctgttcttctggagccagctaacacgctcccttgggccccatgcctgaatgccatctcttccttctatggcatcctgcacaggacttcrctttgctcagatgcctcctcccgcgctcttccctttatttaaccatttgtctccattttaccccttcgctakctggggtaatcctgttcccttcatctgtatctctgaaaatggcatcttgccctcccttggtgctcagaaggtggcttctggtttaccgaatagcctgatttcacctttataaactcatgctactagaattttctctccttgtcagtctttctagccactttccaatggaacagagactaccaaatcctaatctgataaggaaaaataggtaaacataacgtggcagactctgacatctgcagtgaaaatttaaggttcatcatcaaatgtatgattccattgtgaaaatgtccagttaaaagctatctgtagtcaccatgcagcattatgaagaagttttcagaataagggcaggtggtaaagtctcctggccagctttaggagtatatattggaaggggctttgttagctgattgaatttttattccccaagtaattagtatgagcgatttgtctactgtatatatgctcaaattacatatactatgcacttttgagaaatactttacaagtttttctttcattaaaatgtrtttggggccgggcgcagtggctcacacctgtaatcccagcactttgggaggctgaggcgggtggatcacctgagatcaggagtttgagaacagcctggccaacatggtgaaaycccgtctctactaaaaatatggaaaattcaccagacgtggtggcaggtgcctgtaatcccagctacttgggaggctgaggcaggagaatcgtttgaacatgggaggcagaggttgtagtgagctgagatcgcaccattgcacwccatcctgagcaacaagagcgaaactccatctcaaaaaaatgtattttgtacataactagaataatcaactggattgaaagttaatataaattttagaatactactgaattcaatagtgcatttagtcagaaatagttaaaatatctcccaaacagcttgaatcactcctttttgaacacattgttttttgaaggttacrgtcaagtccaagaaaaaattttaaaataggaaaagaattaatcaaatcatttcaaaatcatagcastgttttaacaatgccaattattttgagttgaagaaaagaaggaaaatgtaaactatgcattcaagtaatgtcaatgcaccttctcaggtgcaaaatgaatgaacaattaactgtgccagctgaatatgtagcaatcacggcttttgcacatagaagccttctgaattatcttatattctcaaaaatatcattgctctaaactagaattttattataattaatttgtgcaaaagttgtctttctttcaatgaatgttrtctttttraggcataaaggaaattttaggtggaggaggagaatagaatacatgcttactgggaggacaagtaataataggtgagtaaaaacacacagcttattgaattgtctcagatccacattttctccagaaatgcaaagttatacttgaaatctatatttaaacagataagcagaatgtgacttttatatgctctattttgatgtattctgagtatgaagataacctgaaggatgcctttttcccctctttatcttggggtaaactcttacttacccttcagagacttgactcaaatattttcattctgcaataaccacaggtagaatggatcatttactcagttgtggctctcttaagagcacagactacctatcatatttatttcaaaatttgtagtgcttatctcagtgcttggcacagaggaaagaaatacaatttttaataaaggcataagtggagaggtaaaatacatatttctggtttcaacgtgtccatattctttcttgtaaatggaatattgygcttgcagtctgctctcacacaatatctgggaaggagttttaaagagtgaggaagaacagtaaagattttcctaggcaratacgttatgtgacctttgttgatttccagagcacataatatcccaatttcatccagtggacaggaaaagagaggaagagggaaaaggtggcctctcaagtgcctgacctggaagctgcacctatcactgtcccttgggcagaactcagtcacatggtcaaaaggagtctgcaaataattgtcccctgaggagccgggtgctcagtgaatgattctattaagttgaaatcagatgggaacagatcatttaggataaccagcaggctctaccacattgcctaactcccaggcatattgtgagaattaaaagcaccttatatatgtcaacgtgttttgaaaaaatacaaaaagctctacaaaagtgagctataaatttatcattaataataatagtaataatagcaaaatacttgagaaatggtcctcttgagctgtttagaaggaatcatacaaatgcattagacatggtagcctcacttaactacttaatttgcctcttctttgaaattatttcaatagcatttgaccaaaaactatcaaatcatttttgaaataacgtatttttacataaaacacattatcaaatatctttctggatccagcttggtggtaaaaagatacatactaaagtttatgactgatataactttatatattgactaaaccaaagataaatattgattgaacttttgtggccccagtttcaatagatttttttattaacattttttgtttgaagtacagatgtcacgtcatccatgaaccggtatcattatagcttgataaaatactcaaactgaaagcagtgatgtacaytaattttaaatataatggttaagcaaatgttatttccatatctataagtgcattttatttgataattagaatgttagaatcagaaggaatttggaaaatcccaggttacacttctctccaggacgaactccttacagtggctctcctggggtcagctagcttttgcttgaccctttgaagcaggaggaactcagttccactcaagttgcccccttgattttctctttcatattgaacctgctgctgcacaggactcctccgtgactgtctctttgccttcctaaatctcaaagaataaagcaagtcactttttgacaagacatctttcacatatttgaaaagacatctttcacatatttgaaaagaccagtacgttttgttcttcctagaattttctccttcatgctaatgtctgctccaagaagacatggaggtgactggacatttagtcaggaacatttcttgagagcttaccctgtggcaggcaggtgcaatgttgaattctgagaatatgaatgtaacctttgaacaggtggctctgtcttctgacgtttcaggataaggtggaggagaggagaggggaaagtcgacctatctccccagcggggagggtttagggttgtctgtgggacctgcctctgtctcatcatccatcaccattgtcctgctgatgggtgcagaggactgaggacragtggttggagttctccctgtgccggaccctgtagagagtccagagccctggctcccaaaggaggcatatttgtagggctcttttcgtgagggtccagaggacggctgcaaagctgcaggggaggatgggggcatgggaggcaagcccgttgccctgtcagagcctcttggggatgctgctcttccccgcctgtcctctcttctctttgatktctcatcatgtggtcctctttcctctgccttttcctctcttcggtgtcccaagttcttccatagagacctgtgtccccttgttcccatcaggcctttatgccagccctgcacaggtgcggggacagtggtaggggcgtctcactcccgrctcaactacattctcccagaaattgtctgcagtcaaacacaactcagcgtggacattgctcaccaaaggtatactgcttgggctgcacgagagattcagttttctcctatctatctggcatgggctgtgagggggctcctaacctagggggcctttttactccttcctggccagagctgccatttccaagtttctgcactgtcagaaaagrgggataaggtaagattcctgccctcatgtcacagattagtaggggagaggtaattgtcaaataattacagtaaaatgtataaatgccttaagagaaataagtacttgcttaggaacctatttcaagaaaggagagataggttagcgttttggggaggtagtacrggagcagtcagggaaagcaatacttgtaagatcagaggctggcaatctttttctgtagagggctaagttttggactttgcagatcctacagtgtctgttgcaactattacacagttctgtggttgcagcatgaatgcagccatgggcaatgtgttaatgaatgggcacagctgtgtttcaataaaactttatttacaaaaataggtagtgggccctgctgctgggcttggcttgctgggcacacaaagtgagaagggcattgtgcctttctaggaaacatcccttgcaaagtcagtrcaggtgagacagtgtggccattcccaccacagcatgaggtcttttgaatggctgaagcgtcaggtgggaaaggatgaggagctgaagaagaaagcctgggaatttccaaggcctctcttaacatttgctgtgcagaaccaagcagtgccccaggtgttcagagtaggcttcagcgattacatttcttgttagacactgaattttgttcatgccgcccaagattgcattaacaattttggctgtcaccttaccgcggactcaaattagtttgcagtcagctaaaacctctcaggttttttccccccagcttgtgaattgctgtgaagccaaacatccctgtcatctctttggtagtttattttcaaactttcaatcttattaaatttcatctccaatgtgcaaagataagaggaagtttaccgcwgatggtggtttattctttaaaactggacatcagctaaatgtgttaaggtaatccgttagaggaatgttggtacgcttatacagtggaatactaattggttattaaaatgttgatgtatgattattaaaaggcagcccatgktatgtctcytctgtatgaataagtatgtaaaaagtatgtaaagattactgtayagttcatgggtgggactgggctctctctagcctctgtccttcattctccctgccagtgccttttcccttgcagtgtcccttccctggctgcatactcaagactggatttgcccagccaaaccccattaactcacagaagcaagaggaaaaaaataaattcttattagttcaattctccaaattgggggcggtctatttcacagcaataggtaactgacgtaaaaggaaaggaaacaatgaagtaattccagaaaatttcctatagctggwggacatgcattttcatattgaatgggaagaatggggtgggggggtcatacctctgtgttattgcagggtcctggctcctagggacctaggcacctcttcagtcagtgaattatagcttggaaaattggctaagtcggggaactgtacaaggggtcatcactttttatgtagccatgctctatgaaccatctttataactccctggcttctggcagttaagcaccactcactatctggcctctgtaatttcaacttctgaccatccccgtgggtggcaacaagcccagctctgtgacacctctgctaccagcagccctggcctggagagcggtgcccccactgaatgtctcagtgagattggcacccccatgagcatattcctgagggtgcagtgaatgctctttctccctacttgggacttctgggaaacactgtcctctggtgggttgtttgacctcacataatatactggttcttgcatgccagcttctctctgcttcttgattcttttatcagctgttagggcaacaatgtcaggcatttccgcctgctcagcattgggcatccctttttacaggcttctcagagccaccctagcagcaactttaccgcgtctcctggggtccttgctggatcgtgaaaacatacttccggagaaagtgttccctagataatgaattatttcttgtcctgtgttaagttccagttccttggtcaaggaccccagcgctactcctcaggatttgcagtgcatgctcaatcttgaagcaatgttgggatatagtatcttttcttctctatcaggcccagctgtctccaggtgggttatactaggatttaatcctcgttagtgccgggtcagctcctgaggggtgcacctgttgctttttagggacgaggcctcttcagcataaagaagtgctatctcttactagggaagaatgggccacctctgtaagctccaaatattcccaggtttccccaaccggggccttgaccttggcataactgatctgccttggctgagcatttaaacatccctaaatctctgcaagtctatcaggtcctaggcctgctgctaagtttctctactcttccactgtaggagagaaggctgtggctcttatattgagcctttaactgtttgttattggccctcagtttctcattagctctctgtagagtctcaatacaatatatcagaaagcattcaattccatctccttgtaggcagggaatgcctaaatcattgcacctacaatgacattctccaccaggatatttcccaggttactgctgttgaaatatttagcaattgaagcaccatttgtgcaaggggactatctgcccctacacaacactcagaatggcattctctttgctttccagaaagtgaatgagctggttccccaacccctcttgtgttagtttgagtcctgaaagaagtaaatgtcaagataggattagatgtacaagaamtttattggggaaagaattgtgaaggataaaggggaaggagctaggggaggcattgaacctttggatcatgatgtgtgtccaacaactatgaaggagagtgggcagggagaaggatgggctgggaagagtttcagttggcactgtgggtctcagaacaacccaggcataggctgatggggacgccttgagccaatgttgcccattggcggagtccacatcttgctgaaatgggcctgcattagttcccctgccatgtttagtcatctgggagtagccgatgagaatcatgatcttaggatcaactgcaatggcagattcaaaggggtagcaactgatggcctcagtcaactgtgctccttatagcaggaacactgagcagtgcatttcttggccatcacaaagactagtgaggagtgcccttcagagaagggaatgaaaattatttccagcctagaatttgatacttatctaaactgtcaatcattcatgagagtcaaagtcccaaaaaataaatcttccataaaccctttctcaggaagttattggagggtaaccgccacataacatgaggaagacaaggaggaagacatgggatctatgaaagggcaggtctaacccaggaaaaggatgatgaactgtagacccatgatgtcagatgtgcagcagactaagatcagccagtgcagaatgggggagattccagaagtgtgtccccccaaaatattggaggctcatgtgacttccctggggaagtttctgctgagaggctattggaaattgagggaagaattagccacagtcccaaagaaaacagagccaatcaaaaagcaatgcaattatgaacttcaaagaaaacaaaaataagaaggaaaacagtcttacttactacattacaaggtccagctgtgaatgatattcatgttggcagaataatgtcaataccaaatgtcggttaaacccaaaactattgtataactaaattgcctgtgtaagagagctaaacccttatctagcataataggaagtcagtggatacttcctgaagtgtggatgtgtggagatgtaaattccaaaagaaaacgtcttaagagtcaaaagtggttgcctctagagaggagaactgggggaattgtagggcaatgtaggacagggaactgtgatttttcttgtaagttgttctgacattttaaaccatgaacatatattacttgtatttttaattttaaaaagacataaatattttttctatcactttaaatattaattttgctagttatagcacatatttatagcattacactctgtagagctcttttggattcaagttttggagaattttcaaagttttagattaatgcctttgtgagttttcatccctttgatgataacaagttacaaagaaatagggttatgaataaaccttgtgggatattgttagtcaccttctctcaagtcgatctgtcccatgaatcaatgtttcaaacattgaccagcatttgatacttaataagcaacgagtaagtttttgttgaaccaatgaatactcttaaaatatattttttcaagtggcaacagtactatcttatttgcactctacttttctttttgaccctaagaatgtcacaaaaatgtttagcaactgtcaagattattacatacagagatgactattgtgttctcagatatgctgtatgtcttagytcatyttgtacagctataagagtagctgagactaggttatttatttatttatttatttattttttgagacggagtcttgctgtgttgcccaggctggagtgcagtggcacaatctcggctcactccaagctccgcctcccaggttcacgccattctcctgcctcagcctcccgagtagctgggactacaggcacctgccgccatgcctggctaattttttgtatttttagtagagacggggtttcaccgtgttagtcgggatggtctcgatctcctgaccttgtgatccacycacctcggcctcccaaagtgctgggattacaggcgtkagccaccgcgcctggccctatttttttttttttaaaggaatttatttcctcacagttctgttggctgggaagtccaagggcaagtctctggcatctggtgagagacttcttgctgctttctcccatggtgraaggtgagagggcaagagagagacaaaaggaggctgaactcatccttttacaaggaacccatgcctgagatattgaacccacttctatgataacagcattaattcattgatgaggacagagacctcattgcctaattggcctaaagtgagacctcttaaaggtctygcttaatactattacaatggcaattaaatttcaacatgagttttggaggggcaagcattcaaatcatagcaccatataatacaataaaaattttctgagctargtttggtaaatttattctaggaatccatgttgtctcctagttatcttcccttccatagtactgatgcatttttgttaaccattacctaattttgcttgagtctattatttctgaaattcacattatcttcccttttaaagttgagwaaattttcattcttcaagcgccttattttctataatctctcaaagtaactgatggctgttgcatgatcataagtgcaaattattttgctagaccacacttggagatgatgaatttggaatggcatgcagactcccgacatcaggagtcttgtctcctgcaataatcaggaacccaggcttaaaagggagcaggtacaacagaagggcaaggggtgacaatgctggtgaaagacatttgaggaaagctatcaacatgaaacagaataaaataaacagaaaagcaaaccagggaaaataaattatgcaggaaattaaacacatacacaaactgaaacaggaaccatcagaacatataaaaaattcttgaacatcagtaacacaatagttgaaacaaaatatttagtaaaatatttgaaaagtaaggtcaaagcaatgctgtaaaagtagtacaagatgataaagaaatagaacacatttttgaaagggaaaaagmtttaaaggatattcataaagatccaacatcagactaatagaagttctggaaagagagaataaggaaatacaggtcaggaaatttgtaaagaaataatataataaaatgccccagaactgaagaacatgagcttttaactttaaagagccgactgagttcctagctcaatgaatgtatagacatgtaagggtattgaaagttcaccttcagtgtcatgtttcctaagaagctaatggaagatatgcaccagcaaaattgtagtaaatacataggaagaaatagtatatagaaaaagtatggtttcaatccataagaaataaaggaaactcccaggacgagagcagctcttgacagcatctagtccaaactggacttggaggctggaaacttctagcagggaaggaagagctctgggtgaaaaagtagactcaacagaatagatacgatcatagaaaacatgatagagaatcactaacacattgaaaaaatcacatatagaatattctgcacgcttaataatgaggtcattatttattcaagggaaaattaaaagctgtttagaaaagggaaatgttatagtgccctatttggctctaaaatgaacatttatataggaatcttcatgtaaatactaacaatgatttaaataagaacagacatttcggaaaataagggaagaaaatggggcatgtaaaagagctaactcctcattatcctaatgaattattaaatttcacaatagcatagtatttagaaatatgatagttattacgagaagaaagagctaaaaggttgccagtggggagcaggagtgagggttagagacgggattgggggagatgcttactgttttcatgataagcctttggtactatttgattttaaactatataaatgcatttattaatttaaagtaatttaaaaaacccataccactggataatgcttgataatttctagagtcmtttttttttgtattttggggcaggtaaattcattgagagacccagagagtttagctractttcctgtgggtaccaagggtcagagctggggtcaaaactcaggttttctgaacccctattcccagtgtacattccatgactccaggctgcctcccgcattgcacaggttacatctaggggtgtgctagcaaatgcctagaccatcctcgtccacatcagcatctgaaatggacaagaatgttagtcatgacttgccactaacgtctttaaccttaattgacatctgagagtgtcatcattacatcattacaaaaacactaacccagatacatctgttcccattactatttctgcgtaattcccccagacttaattgctttaaataaccattttatttggtttacaaacttatgggtcaggattaggggagggctcacccacgcagtttttctctggtccgcagtcatctgaagcttgaacggggtggggcatgcaagacggctcacacatgtgatccgcggttgagcctggctgtggaccagagcatctctgttggcctcgcttacacaagtggtctcagattagtagcctctgtacatggaaactagcttmcctcccggcragcatcccaagagaactaggaggaagtggtatggacttcttttyttyttcttcttcttcttttcacttattcttgatatcatgtagcttcatttctatcagagcagtcacatgcccacagattcaagggggagggtccacagatccgccaatgggaggaacagccaggttatatcgtaaaagatcatggggcatgggagatacccatctattttctgtaaaaaatacattttgccacagcatcactggctttccagctcacagtgatctgcctggaatgcctttttccgtctctccaggatctacatctttcaatataaggtttagaaactacctcctacaggaagacttccttgatttccctcagcaagaaagaatctttccttcctctgaatcgccattgcattaaaaaaaaaatccatcttctggcgttttcactttcagacttatactgtaattattctatgtacctatgtttgacccctcacgatgcccagcataataatttgtctattgagtaaatatttgcttaatgaaataatcattacatgataactcaaatagcagtcctgaaaaagtgcatttcaattcagatctctcttttttcttccttcacaattctcatttccgaaaaatgaaakaagccagaggatcctttatgaggagttacagtataacttatgcgtggctgtttcctgtgtttactgctactcagtgagaaatacgggagatgggagagtgaaaaaccatgtcatttacaatttgattaaaaagctttttatcttttcctttcacgtttaagccttgccgttttaaaaatttccctttcgtcacaggggatcaagcagcagttaacgctgcagttccctgttctggaaacactctcaaaggtgtttcaacacattttgtctcaactctgactcctgccccgctgccccacgccatccagccacactgaaggtcttgcatttgtgccttggggcattatttttttttactcttctccctgcctggaaggttcttcccaacctgccctaccgccatagccacagaaccaacccttcactttccttaagtctatggtcacaagctccttctcaaaggaggcacacctctaaccacccccatttggtgacttcctgtctcctggaggcccccggaactagtcttctctacttccagcaacccactttacgagcagcggagaagactgactacttctgggggcctcgaggagacaggaagtcaccaaatttacaggtgctgtggatgaaactgtgtgataatgaatttattgggcttgtttttttagcttctgaatagaagaaccaataagatcatttttttaaaaaagataaaaacagacaaacacaaaccctctagtataaaagcatttttttttaaaaaagatgaacacacaccctcagattgccttcttttgaaaaggcaatctgagattccttatgaaatccccagacagaagctgtttctttgaatttaatatgctgtacactgtagagccaagaggcttatagagtgttaattaacaccccttgtcaaacatttgtaaatgaatctggctaaagctcaaggaaaccaggtttttctgtgtgataaaatataatctttggagattatttatgatcacaaagggagactgtacagaaaattttcctagacttggaaatgaggcaggattattggtgtccatctggactgaggcctcaggcaggcctgcctagttaatcccattctcctatcctcattctctgggggtgaagaaggcagtgcacctttgttcaatttgctgcttaccatggattagggcattttaaattctgtaagggtagtttttaacttgtagaaaactgatagcgatgggaaggattcttgcctaatagggacacaaacggattttgttctgtagagatgtaaatgaaaagatgaaaatcacaacacatttaatgaaaggaaaataaagactcttgtgagtgccaccaaaaaaaaaaataaataaaatgtatctcctctccgtggcaccccaggccttccttacctcactctatttcttcatagcacttattgccttagaacattctttataatttacatttattatgtttgttgttggttgtcgctcctcctgctaaaatggaatctccgtgagggcacgggtttttctttgatttgttccctgttgtgccccaaagtgctagaatcatgccaggcacacaatagatgctcaataaatacttctggaatgaaaatccccctccacttagaccagtgagttccaaacttttttgatcttgacccatagtaagaaaggcattttccatgttgaatatacaccattgaaacaaaattttcacagaaaaaacttaccattattacaggcagtgcactgtgatatttcctaatctcttctattttgattttcaaaattgctgaggctactcataggttgatttcacaagtggagtttgtgttatgaaaaactttgacttaacaccatgtcgaaactgctaccacaaaaaggcaaatgcgaaagaagggggaaagagcaggccgatgactttccgctatccaccactccataaagcatatttcattttcctgtaattgtatcctgttcaatgatgtagaaatcctcacacactcacatgccactttttctttgggtgaaaagcgttctctactgcaagatgaattgagttatttcaaaagcaaagagctataaatgagcctgttaaagaaagtctcaaggagagtctgttggcatctgctgttgataacttaaagcaggagaattagataaggaggcagaagtagaatgtttagaaaataaaagtgaccattatagaggaaaaactgcttgtctcagttttgttgatattggagagtagctctttcatgagggtattgtggaattattggcaattatactaatagatgtttactgaaaaaatcctatttgactgatgaaccatggaatacttttgctgaccttgtggaaaacatcacttatctgagttccttatcttcttgtctcttttttctcatctagcctatgcctccctacctgttccctcatggttctcattttgttgctattagaaaaacagagatacaaaaaccaggaattggaacccctctgtgtctccagtaataattctgtgattaatgggttagatggattctggtcacaagctggatattttgttaacaacctagcgtcaatgacttggaatgattttcaccgcagcatgatttagtattgaatagaatgatttaactaatgttaattagttctgtacagataaattaatgaagcaagaagctcaatctctgatttattgatgtatttacccagtgtaagttatgaaatcttttttatttcatttgaaggaagtttttatttaaatacaaataaataagccctttattgtcacctactttggaaaagtccagakaaaacaatcttaagtaacaaaactccaaaattacaacatgattttcaaaaactaccctgacctttgtcttgcctggttgttacagtgtacttttaactaaacggattcttatagaatctcaagtttggttatatttgtattaaggaactctatatttgcatttgaccagccctaactaaaacaagcttaaggaagaaaagggactttacgacaaggacaaaggattgaagaagaactccagggactttagatgttaacaactgtatttgtcactaaagtaaccattactgtcaaggtgggttctccttctccctcactaaacacatgcacacacaccacacacacatacacataccacatacataccacacacatgcacacacaccacacacacaccacaccacacacacagaaatacacacagacatacacacatgcacttatgcttgggtcagtttggcttttatcatcccagagagtctcttcccatgtcagcaactccagattcacttcctctcctaatataggacagtcacatgtctctattccagcaaaacaatctcagggaaggtatctcattggcctggcttgggtcattcaacttgaagtacaagaagagaaaacagtattcttttatttttatagatttcctgtaaaatcagtggataatggtaaaaatttcatgacagcaggtgttttaccttatttatgtttactatctctagaacccagtatgatagttcataataaatgcttactaaaacaattatcaaactgtacacttaaaaattaaaagagtaaattttaagttgtgtatgttttaccacagtaaaacaaaataaaataaacctattattgatcttattgtctatttctcaaaagtagcatacgtcataatttcatgtgatttctaaaggagatctaatctcaaacttagttcttagagtaaaataaaaggttttrgcaatcatatacagcagtagactttaccttgaagatttaacaaaggtttgaaagcaaaatgctatgatactgaatatactaatgtttgagggcttgtgaaaaggtcttaatataggaatcatatatcttcttttagattgtgtcttggggaacattgggggtcagtttttctatcagtgttagtatgtagtaagtaatggcatacatctaagcttgagattttgctcatttctgtattcttagcacttatatatccaacatataataggtgttggataatatttgttgaataaatgactaaataaatgtcttggcatragaattatgccatctacaaaaccgtcacttttaaaaaaaacaacaaagatttttgaacctgtagatccagccagaaagcaagaaatatcttcacctttccagactgacttattttttggtctagctgtgtactatgcatgagctgtcaactttaatactttattttttaatgcctaggtctagtgagttacaatgtgatgtagactgattgaattaaaggccccaatgttgtcctctcttcattgtatccatgccttttgtcatgtaactttgcagtgtcctctactctaggtgtccattcagcttatcctttgactctggccttcttctcctttgactctggctttatccatgtgacttactttagccaacaatcataatgctggcaaacactgagaaaatgcttattagtgtctgcttagtctcttgcttctctgcaattgccatgagaaaatgcccaagctagtacactggaggatgagacatgtggggcagaagcaacctgtcccatttgtcccagccaacaccatcctagattaaccagatgagaccagagcagaagacatgttcagtggagcccaacccagctcacgaataatatttcttcatgagcatgtgagcaatgtgtaactaatgcaccatgctctttttattctgcacttccaaacatctctcagattgccctgttgttttgcttttcagtagtcatcacctttgtccagaaccttaattgtatctgcattttggcagtatcctgccarttttccacatccagctgttcacattctaatgcattctgcaatggatgattttgagcatatgactgatcatcactgtctcagaaatttatgctaatctattgtgacctattctgtcaaatccaaataactttacattcaaaacttttcatattctggccccatactgtctattgtaatcttattttctaaaagccacaaactattaatcctgtagcctaattaggttgatatcatcattttcacaacacgttgggtaaattcttatatctgttcctttaatcatagtttccatgcttagacactccattgccctccctaagcaccagccagagtccactatggggggatattttaaaggctcttttcccctaacccatctgccccagaggtggcacaggctagaaaagatagtccaattatttggcttaattatttggatcttacagtttttttgggagagttccagatgatttgatgaaatgcaacatggtcaaaaacattttggtggagaataatttaatcaactagaccatttggtgaaaaataaatcccagttactagacttcccagtattaataattttggtatgccaggaatttttaaaacatttctaacaaattttttcagaaatcagaatgactgaaakgtataacaataggaaattaggaaatcaataagtaatcattgaaaagtgagtgattgaattagttggaacaatctatgccatccatcctgtgggggaaaaaatgaaaacagctaaacaagcagagcagacatcatcaacttagaaaaacaatatagtaaataatttgaactagaaaattttccaaaattgaaaattccagttttaaaaaatttgtgttttcttattcaaaaagcaatacatatttcgttacataaaagtcagaaaatcagagaagcagaagaacataataaatrcccactgtcctactcaatagagactataactgctatctctgtacaaatcctttaaaatcctgtcttatgtgtatttattttacatctgtacatatgattccaaaattaggtaatactgtacgtggtctatctatagctaactatagtttgtaatttaataagctatatttgtccatggtgatcatttattgctcataaaattaataaattataatttatttatcaacactgatcatttgttgctaataatttatttcatttaatgtcttattcctgggttattttaactaatccctattgttagccctttaggttgtttcaactaatttaagaattataaatggcccatagtagttacttaataaatatttgagtgaaaggataaatgaatgaataattccacattattggatgttcaagttgtttccattcaactttattgttgtgggggagtataatacaatcttggtgaagagccaccaacttaggaagaactatgaagaagcatgttatttactcctgcttgtgggtggggtgcattgggaaaggaatgcctaaatgcacgtggggagccaaacaagacttcacaggggagatgggaattgagccaaatttggaagaagtgagaattttcagttgataattggggaagatagtactaagagtaagtggggttcattaggaactacttcttagaagaggcaagtccagaacagaaggcagaaagggatatggatatgaaggaaaagtagaatgcaacttcagggctagtaggttggcatccaacgtaggtacagccctggatgaggagtaatgagaaactgacctggctgtagcaaaacagctaggctgggaagtgatgctgtttacatttatatgcgattctactggtcttcctgttactttgtagaagrctgtaaggcttggtgctcagagctagaaatgcaacttatttgatttgctaagaagtccaaagcaggtaggggtgccaagctgctgcctgttcacacatattcgtctaactgggtgtcagggaaagcagatatgagcccccttgcattggttaaatcctgagcaacttttaaggawctgcacacagagactactggctattttttgtggataaagttgtagatagttatttttgggaaattatttatgtgttctattaggtggttgttttgtgggaggctgtttgaaattctgtcttaaggaactgcagcttataaaccatagtgctgatagaaataagagaaataatttggtctgcgagcacaaacatcaggctagttggcatgcttatgtaaacaccacacagtagcagtgacttttaaggaagtcctcagacaatgtaatcccaatactcttcttgaagttgaggtaatagggtgccagaaagaaaaagaaaataaatctctagtgccttctaaaattttttcaatcctttgacctttttgaaaacggtcacctttaattcagaactaaagtaacatctggagggcccttttcttagatagggagaagacataaatgagctatttgaattattttctgcttatgggctgcatttcatttcttccaccattggtctcagtccatttaattaagattatttgtaggattaaattaatcctttaagaattattccatttcaatttttaaaaaatctaatgaatgatagataacaaaaagcggtccattcagtattacccctgaaacatatttgggtgattggtgataccatccatgtctctccaacttcagcttcatatactcagctgagtaccaggcatcttcattgaaagctagacttgtgacctaaatagaacttgatcccttcccttccccaactccttattttttgttttctttgagttccttgattcctcttcccctcctcacatgcaacatgtaacatccaattcatcagcaggttctacagattctgccttcaataatagcctaaatctagccacttgttactatcttttttggtccaaaccatcatgatcttttgcctggaccattgcaatagttgtctaactggtatccttgctcccattttgtcctcctagatcctattttccacgtagtagccactgatttttggaaacttatcaatcattacccagacacaatgagtacatttacatagttgtttgattccatttacataaagtcccacaatcactctatgtactgggaatcacaacagtggtctcctatgttgagaattgattaagagtcacaaggaaacaaggagtaatattccattgtattaacagaccacactgttcatacattctcctgtaaatggacatttatgttgttttcagtttttttgctattgtgattaaagctattaggttggtgccaaagtaattgcagtttttgccattactttttaaatggcaaaaactgcaattactttggcaccaacctaatactgtaagtatctttgaacttaccaatcaaacattactacaacacttgaataagaaacacttccatagcatttacaattctaagtgctttccatgtattgacttagttaatcctcacaaggatataaccatgaggtgctattactatccctactttacagatgaggaaatagaggcacagacttcagataatttgcccaaggtcccacagctaataagggggcagaattaggaaagcctggctgagtctatgctctcatcacttgctcaactctgcctggaatgcccttcccgtaccctctaccgcctctgcccaatcctccgggttctctgctccttccacacacccccatctcaggtcccagtcttttktagcattcttcactttttctgttacagatcctcagacaatgcttccttgaagaagacttgcctgtctaaactgccttcccatcccaatccctgttaccttctatcctttctctgctttrttttcatttgttatctctcttcttcccaakaatgtaagctccataagaacaggatcatattttgaatcccctagaaaagtgcctagtgtaatatttgttgaatgaatatgatccctgcaattaaaagctaaatatatatatttttttaactaacagattactgtagtagtttcaaagatgaatttatgtttcggagaaaatcagtattctcttgccacataaattgtaggtaattatatttctatacctgaatagctttgccaatgactaagatattaatctattatatatttattaatctatagatctttaaaattgatgcacatgttttataagcaatttgatgaattttgatgactacatacacctgtatgtgtatggatatctgtaacaaatatccaagtaaagatatagaatattctcattaccccagaaagtttctttgtgacttctaatcaattctcacctccgtaggaaaccgctgttgtgattcccatcaccacagactgattttgggactttatgtaaatggaatcaaacaactctgtgaatgtactctgtgtctgagttctttcaatctacacaatctttttgacattaatccatattactgcctagaagagtagttcactctttgcattaatgaatagtattccattgtataaacaaaccacactgtttatacattctcctgtgaatggacatttgtgttgttttcagttttctgctattgcgatttaagctactataagcatttttttttaattgygatggggtttcgctcttgttccccaggctggagtgcagtggcagcgatctcagctcactgcagcttctgccacgtgggtccaagcgattctcctgcctcagcctcccgagtacctgggattacaggcatgtgccaccacacctggctaagtttcgtattttcagtagagacggggtttcaccatgttggtcaggctggtctcgaagtcctgacctcaggtgatccacccacctcggcctcccaaagtgctgggattacagtcttgagccactgtgcccggccagcatctttgaacatatcaatttgtaagttttatcttaatattgtacaagtctttkggggggcttatgttgtcatttctcttggtaaatacctaggtatgaacttgctagattatagagaaaatctatctttaattttataagaaactgtcaaatagttttccaaagtggtggtactatttatactcccaccatcaatgtatgaaatttccgttgttttacgtccttgccagaatttgttggtagtctttttttttttttgaggcagcatctcactgtgttgcccaggcatacaatggtgtgatctcggctcactgcaacctctgcctcccaggttcaagggattttcatgcctcagcatcccaagcagctgggactacagaggcgtgccaccacacccagctaatttttgtatttttagtagagatggggtttcaccatgttgcccaagttggtctcgaactcctggcttcaagtgattcgcccgcctcagcctcccaaattgctgggattataggcgtgagtcactgtacccagcctgttgccagtatttttagttgtaggcatcttagtgggtgtgagtgctcgttggggttttaatttgcattttcctgatagtgttgatgttgaggacatttctatgtgtttactgagcattggtgaagattstcttgtgaaatatctattcaaatattttgctcatggtgggaaggggagttatttttcttttactactgataggtaggcttacgtatttatttcggatataattattttgtcaattatatactaatcataaacaaaaactgataaattggacgacgtcaaaattaaaacctgctcatcaaatgttagcgaaatgtaaaggcaaatcacatactgaggggagatattttaatatatgtatatttatatagtgctttctgtgttctaagaagtattttcctactccaagataaagagactattctcttacattttgttctataagttttatagttttagcttttagctttggatctatgatctgtctcaaatttttatgcaagattggggtttaattttttcatacacttttccagttgtcaaggatcatttgttgaaacgtctttcctgttgccacataattgctttgatgcattcgttagaaatcagttggctgtgggtttattttggaattttctgttctgctcctttgatgtatttgtctatccttatgccaatatcaccctatattaaataattatagctttataataagtcttgaaatcaggtaatgtgaatgtttcaactgtgtttttcctttttctagttattttagctgttttatgttcttattgtatatattttagaatcaacttattcatttctacaaaaagtttattgggattctggatgagatggtgttgattcagtaggtcaatctggggaaatctgataacaatattgactcttccaatccatgaaaatggtatctcattctttatttacatattctttaatttctgttagcaatgtgttataattgtagcaaacttgcacatcttttgttaaattattttctaagtattttacgattttggtaccactgtaagtggcattgtatttaaaatttattttctgtttgttttctgttcatatataaatgcaattgattttcttttttttttttttttttttttttttttttgagacagaggcttactttgtcacccaggctggagtgcagtggcgtgatcagcactcactgcagacttgaactcctgggctgaagggagcctctcacctcagcctcccaagtagctgggactatgggtgtgagccagtgttcctggccaaatgcagctgatttttgtattgacattgtattctgccaacttgctaaattaacttattcgttttaatagtttttctgtttttttaaaaatcttaggatttctacacagacaatcatgtttttaatgaacaacaaagtttgtttttttgtttgtttgtttttcccttttcaatcaacatgccttttatgtttttatttgccttactgcactggctaggacctccagtacaattttaatagcaatggtgagagtgtttaaatgtactcctgtgtatattttattcttttggaacttattataaatggaattgttttcttaattttctttttggactgttcattgctattgtacagaaatacaactgactattgtgtgttgatcttgtaccttgcaattttgctgaaatcgtttattttttgcaatagatttttgtgaattctttaggattttccatatgtagaatcatgttatctgtgaatagggatagttttacttcttttctaacttggatagttttttccttcctaattgctctggcaagaacttctagtacaatgttagagagcaatagtgaaagcaggcatcttcctttcaatcctgatgttaggggtgaagctctcagcctttcactgtaatgttggctgtggattttcataattttttgtttgtttgtttttttgtttgagacggagtttctcttgttgcctgggctggagtgcagtggcgtgatctcggctcatcacaacctctgcctcctgggttcaagygattctcctgcctcagcctccagagtagctgggattacaggtgcctgccaccacaccgactaattttgtatttttagtagagacggggtttctcgatgttggtcaggctgctctcgaactcctgacctcagrtgatccgcccrcctcggcctcccaaagtgctgggattacaggcatgagccaccacgcccggcccataaatgcttttcttaatcatattaaggaagttcctttctagtcstagttttctgagtgtttttattatgaaagactttcagatttttgtaaaatgcttttcctgygttaattgagataatcatatgggttttctccccctttactctattgatgtaatgcattacaacgatttttttwaatgtttacccatctttgcattcctggaataaatactagttgattgtgctgtataattcttaaaatatgctgctggatttgttttgttagtatttggttgcattcttttgcatctatattcataagggatattgatctgtaactattattttcttgtggtggctttatctggctttggtatcaagataatgctggccacattggctaagttagaaagtgttctttcttctattttttgaagagcttgaaaagagtcgtgttaattcttctttaaatatttggtacaattcactattaaagccactagtcctgggcttttcttagtttgawagtttttgattactaattcaatctcttttacacctagattagattttgtattttttccttagccacttttggtaatgtgtgtgcttccgggaatttggccaggtcatctctgttatctaatttgctggcatccaaatgttcataatgttctcttgtaatcctttttattatagaaatgatatacagaaaaggtcagttaccactttcttttatgattgcattaatttgcttcttttctctttttttctctagtcagtcttgctaaaggttggtckgttttgttgatttttttcaaagaaccaacttttgattttgttgattctataatttttctgctctgtattttgtgtatatccattctaatttttattagttcctttattctgttagctgtgagtttagttggctcttcttttttattttcttaaggtggaagactaagttattgagatatatctttttttttttttttgatgtaggtatttaaagctataaaatttcctctgagcattgcttttgctgcaatttataagtattggtatgttacatattcagttagttttttatatacacatttaagcttttgctaatctaccttgtgatttcttcattgacttattgcttgtttgagtgtgtcaacaatttccacgtatttgtgaatattctagttttccttttgttattgatttctagtttcatttcattgtggtaagaaacaatactttttatgatctcaacagtttaaaatttattaagacttattttctggtctaacatatgatctatcctggaaaatgtatcatgtgcacttgagaaaaatgtatattctgatttttttaggtgggtggcatgttctattaatatatatgtctgttagctctagktgaattatagtgatgttcaaagcytccattttgttattaatataaccatgccagatttttaatgctgtccatttgcataatatgtctctttccattctttttcttttacatgatcactttatatttatagtatatttcttgcacacagaatgtaattgaaacttacttttctaaaatctactttctttttttttttttgagatggagtcttgctstgttgcccaggctggagtgcagtggcacaatcttggctcactgcaatctctgcttccygggttcaagcaattctcctgtctcagcctcccgagtagctgggattacaggcacctgtatttttagtagagacggggtttcaccatgttggtcaggctggtcttgaactcctgacctcrtgatccacctgccttggcctcccaaagtgctgggattacaggcgtgagccactgcacccagcccctaaaatctgctttcatagcatctgtcttgtacttggaacatttagtccatgtgtatttgaatatttattgatatgtttgggtttatgtttacaatcctgctatttgttttctttttgttccatgtgttttttgttttttatttctgcatcttttggaaaaatcagattttttggtaattcatttttcttattttattggctttttagagaaacctttaatatctttgtgagttttagggattacattatttattcttattattattccatttagaattaatattgttaatcccattmaaaaatttgtttatttcgcttttcagttctagaattttcatgttttcttcagttgttgtttctctgttgttattctccatttgttcattatatctatcttttctttgaaatccttraaaatatttataatagctattttaaagtcctctgctaatcccratrtctgggacatcttggcttctgttgatattgaatacttctttttttccccttaattaagggtttcmttttcctgctttttcacatatctagtagatttttattatgctctgtgtgctatgaatgagatattataggragcctggtcaatattgtctctttttaaagggtgttgtatttagttctgccaagaagttaaattaccagatttacttgatgtggctttaktctttsttagagctggtctattcctgctttgttcttacttctcaggtaatgaccttcctgagtttcagctggatgcctgaagtgctcagctgcatttttctactctggctattctgaaatgcaatattttccagacctacccaacctttggtattcatctcccagacctgtggctgcttctctttgctgagcctcacaaaatcttgtcctgtgcatggacagccamggatccttgggaaatctyatgcagacttctaggtccttcctttgtgtagatttcttctctccagtacgttgacctgcttcagagtcctcatcattgctttcttccttttcagctcagcaatactgctgtgtattgtgtgrgcttcatttgcctcagccatacctagaacacaacccaaggcagaaagctggagtggacctgaggytcatcacctgtttccttccacccaccatttaaaagcagcttatttgtgtgaaactttttgttgggttctgtgggggataygwataggcaaatgacagggagcttataatttagccaaagagaaaatgtctatatgttctgtggaattcagagtattttcctcgacttccaaaattattttcctcgacttccaaaatttggggctactagctagttggtaggaaggaattccagatccatttttcttctagatttttttcagactccatgtttcaaaatctaratggaaggtaagaaggaagcaaggagggcatcacatacgagagagacttataccccaaagtggatcattagcacattatgagataatatggtattattctcagaggcctgccatataaaattccttctaatttattttttaatggtatgtgcctgaaagttttctgtctttcatgatcttgaaagcaaaataagaaccagagtagcttatgagagagttttcctgcttcagcccagaaaaatgttgcttctgtcctagaccctttgatctggttcttagtgccagccttcattcctctagatctgtttattgaatactggctctgttgcagagactttgctagaatctgagagataaaagactcaatgccttcaaaacacctacaatccagacacttaaataaatgcaataatatatggttaaggtcttggatagaggaccatcatagaaacacatagaacagacatttagtccatgctagggagagggaagatgtcaaggaatgcttcctggaggtggcnacatctaagctgagttttaaagtgggtgtaagagtgaaggaactgggaataggyaaaacataccttagagagctgcacctccaaagcatggaaggctagataatcttagaacttcaagtggggttcaatgtgcctgggacttggatttcaggcagagaccatagggcaagttggagaacaggtgggcagggtgagatgaagcagagacttttaataaccatcaarcaggcctgccatccaactgctatsagccattttccctttttgaattttatttttttaatctytagagcaatacatgtttatggtaggaaatgaaaaaaatatatagatgggtaaaatgaagtgaattataccacccacaatcctgctgtaaaacaggttttaacaagttataaatccctccagatcaaagtgctactaaactctacttgctattttataacctttttctgttcagagtattttagaaacgtttttacatgttaaytgatattcttttgcattatcctgaataatggtatttctttagttatactatcatgtattaaaacattcatacatggtaaacatatttgaatattagacatttcaattgttttcaatgtttggctattaaaaatagtatttagatgaatgttcttggccatacagttaatracttcactgagtccttgtcaataactttattaaatcccawtcttaagacaacaagcctataagattaacataccaggaataattagaaagcattgcaagactatatgtaaccatctccctgttaatcatccttakttgttgcaacatcctaaatagygaccttcccacactctgcctcataatatttaatctgtcaaatgtaccatcygcaaagggagtgaactggctcgtgaagaggtggtgaagctggttcaactcagtttaacagacaatgagggcctccgtgtgccagggagggagtgagggaactccacagggagctcattctggggagggatgcccctcattatctgcagtaaatgatattagagaagtatgtgtgagactcttggtgtccagaggaggggcatgcagcacagtatgggggtccatggggttgcagcgatttcttagagacggtgccatgcctgggatgaccaccaagttaggatgctgtaaagagtaatcaaataagtttcaacagggttttggcatgaggtgagcmgttaatccaaatgatatctgaaatgctttctaatgctgcaagtgtattcctctgtaaaataatcaactacttaaaagacactctcacttgcattatgtcatttaatcctcacagtgtccctacgggacaatagatgtcattcccacttgtacagagcagtaagtgaggctcacaccggtcatagttagaggagtagggaatctaaacctaagtctcttctactccaaaccccaagttttatcagtatgtcacatygctactgtgggctgaattccttagcaggggttgtttcctccacctgcaatattcttccttttggtttgttcatcctctagagagagaagggatacgcattcatggagatcctactgttgcaaactctgcattaggagttttacatgaattgtctcatttagtcctcacaacagtcctgtgaggcacaggaaagttagatttacctgcccaaattaaggaatgtggccaactcaagagtgacgaaggccaggtgcggtggctcatgcctgtaatctcagcactttgggaggctgaggtgggaggctgaggatcgcttgagcccaggagtttaagaccagccagggcaacacagcaagatttaatctctactagaaataaaaaagaaattagccaggtgcctgtagtcccagttacttgggaggttgaagtgggacgattgcttgagcctgggaggtagaggctgcagtgagccatgatcccatcacttcactccagtcagggtgacagagtgagacccagtcttaaaacaaaacaaaacaaaaaagagtgatggagcaggaactttatctgccatcagagaccatatatgtctttccttatggcccaggtcatttatcatgtccttgctaaacctcctcctctgagccttgttaaagtcctcaaggttagaagagtggtctataattataaaaaattccattgtatgacttcagctacctgcaaaactgaccgagattaatgcattctttgtttgctttcactctttcaytccctgttcagcgcttattctacagaaaggtgcctggtagatttaggacatgactgttcataggcctcaaatgcggtcaaattaggaaagtcccctggtttttggtctcaagaggttaattgctgagtactagcctggactgctcaatggattttatgtttaactgttgtgtttatttgtttgtttgtttttgttttgtgagacatatctttctctgtcacctgggctggaggtcagtggtgtgaacatggctcaccgaagcctccatctcctgggctcaagtgatcctcctgcctcagccttcctagtagctgggactacaggcacacagcaccatgactggttaagttttggattttttggtagaaatggggtctcactctttgcgcaggctagttgtgaactcctggtatcaagggattctcccaatgtgctgggatttcggcctcccaaagtgctgggactgcaggcatgagccatcatgcccagcctctgtttaactgttaacatcatgaggtttcctttcaatgaggaagggaggcctggggaggtgtgatggggaagatggagaagggtaggagacatcataaaactgacagaagtgtggcacgattaagaccctggtttcttagaccacataagcaagtgccactattcttttgatcaacatttgattctctatttccttcttagcatatagatagctgcttcaggtcgtgaaaaaatacatttagtgaaatgaaacatagtagatatgttcaccaagaaactaaaaagaaaagttagccacaaactatcttatttcattgaaatgtttggctgaacccataagaatgttgatgaggccattcttggatgcctgtactgaaatgaaccacgagaggaatatttaggatatgttgaagaggctgtttggcttaatgaacaaaggagtttctgcaggcccagggagtggaatgaaaattggcatgatcattttggagaatatatggagtcaaacagagaatttgaatggagttttcaaagaggatatgttaggggaataaaggctgataaacaacacttgtatttgtaggaaaatagggagagtaaatcaaggaattcaaagagaaagagaaactcacttcaagtaggggagaaaaaacccctataattttcactcttccttgtaaataaaaaggaaacaaatgaaaataagatattagaagtcagtaagaatttatgggagtataaagttggttttatggatgcaaagcccttttcactgctgtacgaaactcctggctgcatgctaacaatggacaactgatttccttgcagctgtattttgctgttttttgctcttggcttggacctagcaccctgggtctgtgggaaaccagaactgtcccagagttctggagggtaggccaaggttagatgctggagtgggttctttaatttattgtactgattcttcttgggaagaaagaagattgcttgttagaattttagctacgagagatgactatgaaacagtaaattaactccaacgacctgagtcattttgaaaactcccagtctcaggataaaaaatataatcctatttagaaattcctggtgtgatcacagatgtagcattggttcttttcatgaaacccgtaaattaaaaagtacataatccaaagtcaattaaatagtaagctattataacaaattcttttatttcattagcttttcaaaatgtggataactacacactcaacccaaggaatctacatttttccactgactgctaaaraccaatggaaataactctagtccccgtagcacctcactgtggggtgacctacctttgaaataatgtrttggttctagctgatttttatattgttagtcattaagttaggcttgatgagaaacagatataatytgakttggggattcaagtattatattgcatttstcctcacaactagagataaatttgccatggtttttctcttcataggctcatgccaaagtctggcatctctacaatacttctttccgtcccactcagggaggtcaggtgtccattgccctaagctctcactggatcaatcctcgaagaatgaccgaccacagcatcaaagaatgtcaaaaatctctggactttgtactaggttggtttgccaaacccgtatttattgatggtgactatcccgagagcatgaagaataacctttcatctattctgcctgatkttactgaatctgagaaaaagttcatcaaaggaactgctgacttttttgctctttsctttggacccaccttgagttttcaacttttggaccctcacatgaarttccgccaattggaatctcccaacctgaggcaactgctttcctggattgaccttgaatttaaccatcctcaaatatttattgtggaaaatggctggtttgtctcagggaccaccaagagagatgatgccaaatatatgtattacctcaaaaagttcatcatggaaaccttaaaaggtatgattgtgggtaaagttctcatttcctgccaaaatcttctggaaaaaaatctctaagattatctaacataaatgatgtgaatttatatttttaaatcctaatggagacattcattttggcaatagtagaatgcattcatktaacacctttctcatttggagtcttgaggaacttgaattaatttttaaaaacccatttgtaaatgagaaactgggttataatatttgtaattacttaactttcagttattaatctagatttttagattaaattgaacataaaacaaatcccaggatatctagctctctgcacatgtttttcagttcttgttattttggttgaataaaacactttaaagaaaaaggaatgtccatgttttctagagaaaatagtataaatagatcatgcttttaaagccttcatttatttatttattgcatcagacacaaagctgggtgtctaggatggaaagtggtacaagacatctttccagccctgtagaatatctattataaataaggaactattttttcaaggtgctcagaaatccaaaaaacatattagataggccrattttgagggcatttatttgtagagttatataggtttgattagagtctttcgtcaagaagaaaaatcattggcttaccaaacgagaagcattacactttatttatttaagtaggaaacgctcagctgctcttgaaccatgatgcaagtgcccagcraagggtcatgttgctcttgtcccctcttccctttgcagccatcaagctggatggggtggatgtcatcgggtataccgcatggtccctcatggatggtttcgagtggcacagaggttacagcatcaggcgtggactcttctatgttgactttctaagccaggacaagatgttgttgccaaagtcttcagccttgttctaccaaaagctgatagagaaaaatggcttccctcctttacctgaaaatcagyccctagaagggacatttccctgtgactttgcttggggagttgttgacaactayattcaagtaagtcagctgacaaaaccaatcagcagtctcaccaagccctatcactagtaagtagtgcttccttcctaggctgattgtcatggcacattgtccgttctttgagccaaaaacaattccttatgagtacactaagggcacaatttggaatgctgcacccttctctccaaaactcttccaatcttcatcttgtttaagttagatccaaagataaataaatttaaagcatatcaatatttaagatccgattaagacagtaaaaagataaaacactctcttttcatactgtggtttttgatcctttttaaggcagttgagttttttcatgaacaggatctaacacagaactccaaagcctctgagtttcagtggtgctgctgagactgaggcaggaacattaggcagagtcctccagaggcacaactgtgggctccacaaatgtgcagaaataccctaagaaagtaaaccctagatccaatgattcactggtcagaatgtcttttttagcaatagtcattgaaatgataygaaatttcttcagaatgatcaaccaatatttattgagcatcttctcagtagtaagcccttaacattctttcagayttcctaaattttgaaggggcttgttttccagcatttgactggatactctagtaagcacttattggatgtctagtgtgtccgaagccttgtgttagttgctcgggtcgcttggttaaggggagtgcaggtagagggtatactgagatgagtaagggtaacctttgctttcaaaggagcaaaggagtctactgagcgaaaacaatgtatgcacaaatgatgcaatggagtgaagcgggcatggtggtaagtaacaagggcggggctgggggattgctgctgatagagtcccaagtgtgaaaatagccctcaagacagagacagagttcagtgtccatagacaagcagttggctttgacatgttgggttatggtagccaattaattggttctgcaaatcacagcttgaaaggaaacacttggaagaatgtgaaatgggttgctgttttcttgtaaatatccaattgaaatcttttatttataaggaaataaattaacaccatccttagtacattttttgctggttgggattattcttctttttcagaccacccagttcattttacaggcagtctcagacttaaaccctcgccttccatttaaaagatgactggctcacgcctgtaatcccagcactttgggaggccgaggcgggcggatcatgaggtcaggagatcaagaccatcctgaataacacggtgaaaccccgtctctactaaaaatacaaaaaaaaaaaaaattatccgggtgtggtggcgggcacctgtagtcccagctactctggaggctggggcaggagaatggcatgaacccaggaggcggagcttgcagtgagccgagattgcgccactgcactccagcctgggtgacagagcaagagtccgtctcttaaaaaaaaaaatgactggatgtgtcatcttttatgccaggatatgtgagcccaggagaaaggcttctgagctccctcctgctcggtgtgcaattttctgccctgccccgactctctccttctctcccagcctcctgctatttgaaatctccttatcctaatttccctcctcagagtggattccactgtggggttcagagaggatctgaggtgggagaagtgaggctggtgaggaagaaggggaggagaaagggaagaagacctccgtagccttccttcctcctcctctttactggggttggggatagatcggatggtccctggtccttgttctatctcttgaccttctgcctgctccctgctgagcacggatctctgatagcagcctgagtctggcaggttcagtcctttgtatgcggcacaatctcccagccagcattgctgtgcagatcatgggaacgaatgcagaacaagagtgggggtgtcggagggagccctacttctcctgttctattcctcatcagggggctgtgcgctggctttgggaattggtaaatagtgagaaagtcttaagggtacatcctatttccttgagggagaagagaaaacgctggtcagaagcaataagtatagcagtgaatagcaagggagatgggagataattccttttcctactacactctagaagctattgttttagaatctgacctaaggtcagccactaattggccccagaggtctctctctcagatcacacggtccttttttcctcatcagcttggggaccycacccctcctcctggcagtctcctcctgtgcagaacccaacaaacacaaaattaagtcactctcaaacccacagcagatgagagcttctctggaagctccctggtggggaaaggctgcaattgctattttcttcttctggttttcacctcaggctttgtgttatattgacagtacccttctcaagctaactccctaactgacgtagtcaaaataagttctttgtatgtcagttctgaggtgtgtgtgttttcacttacaaacagtactctacagctttaagacattatattaaagtcctgagaagtgatttttaaaccactgaacttcatcttttccctcctggctagtatttcagactttcagtgtttgaggcatgcatttcacctgaacaacttgaaaaataatatcctaagaagcacacaacctgactttaggctcattcacatggattgtcactttacttggacccactttctcggctgagaggtttgttttcccataaccacggatgctcatagttaatataaatattgaactcactatgtagtgaggacatagagcctctttaacattggtccctgttaggagaaagtttctcccataacatactaaatacatgttttaatagccgttccttctgaaaggtccaacttcactattttatttttttagtaaaatcttagttaacaaattaatggaggttaggtggaattttgccccaaaagtcctgtattttctttttttttttttctttttttttgacagagtcttgctctgtcgcccaggctggagtgcagtggcgtgatctcggctcactgcaagctccgcctcctaaggtcacgccattctcctgcctcagcctcctgagtagctggggctacaggtgcccgccaccgcacccggctaattttttgtatttttagtagagaccgggtttcactgtgttagccaggatggtctcaatctcctgacctcgggatccacccacctcggcctcccaaagtgctgggattacaggcgtgagccaccatgcccggcctgtcctgtattttcaagaaactttttttttcctccagaaatgataccctagtctttcatatttgttttcagatggactgaataaaagctgttgttttggaacaatcacggttaaaaaaaaaagttatgaatttagtcaactcagagctctataaaaataatccaaaaaattccttcaaactctgaacgcttcaaaagagcgtgcaaatattctgtccttcaaagctaaggaaacatgatttgtggggtgcatcacagtggaaaaatactctgacagcattcccacagcattaggggaagtgcatgtgtgggtgttctgcaagggacaattctccagaaaaggcaatttccctttgacatgctgtttttaatgacttttctttataaacacacttatctctccagagaaatagcagtgcatttgcaacaggcccgtaaaatgcaacaaaacctctgctatggtttctgacccctgcttttatacagagcatcagaccaaggaacctgttctaacaggattatttcagaggggaacacaggcttagggtgcagatcttccagctggatttttcactttgcattccctccacagcagacacatgaaggaatgattttgtgattttgattttataatttgcacacttttcctaaatactttttttaaatttttatttgggaggattttatagcatatgattgagaactataatcatcatcattgttacagaagaataatttagaaaaattttttaactacgttaaaaattccactatgggtggatgacaatattgttctttccttccacattctccctccttagactttcttttctttttttctattttttttttgagatgaagtctcgctctgtcactcaggctggagtgcagtgccatgatcctggctcactgcaacctctgcctcccgggttcaagtgattctcccgcctcagcttcctgagtagctgggattacaggtgtgcaccaccacacctggctactttttgtatttttagtagagatggggtttcaccatgttggtcaggctggtctcaaactcctgatctcatgatctgcccgccttggccccgcaaagtgccgggattacaggcgtgagccactgcgcctggcctctctctcrgactttctaccatcagtcagattgaatttgttaaattctgtcactgaccctaaacccaacaaaaggcaagagttatgtttatttagcacttcctctacctatagcaaacctcaatttagagcgtaattttaagcacaatttaattataaatatcttttcattttcttacttaactcactcagttttttaaatcttcttttttgagacaagatcttgctctgtcactgaggccgatgtacagtgatgtgatcatgacttactgcagccttgacctcccaggcttaggtgatcctcatacctcagcctcccgagcaactaggactacaggcccgtgccaccatgccgggccaagacggggtttggacrtgttgccccagctggtctccaactcctggcctcaagtgaccctcccgcctcggcctctcaaagtgctgggattataggcatgagccaccgcacctggccaactcactcacattttaagttttttctttttttcatctagttttttttctttttaaatttgaaagcctcatgacattaatgatttcttacattaaaagaaaaacacccaaaaatactctgcttacataacaccgacaagtagtgtgcaagactcattagcatttgtcatctgaagtgaccaaatccagacttttgggggtcacattaaagaaacagttgaagagttagaactatgggtaaagcgagtgtgcatatcagaaagtggaatattgtcttcctcaggagctgacaatttatgaaaaatagttcacattctcagctagaaaggcttctatttttgctcatattcctggctagttttgctgaaataattgctttgaattacttcctcaggactgcccaggtgacgctaatgtttactctgcccttcacaggtagataccactctgtctcagtttaccgacctgaatgyttacctgtgggatgtccaccacagtaaaaggcttattaaagtggatggggttgtgaccaagaagaggaaatcctactgtgttgactttgctgccatccagccccagatcgctttactccaggaaatgcaygttacacattttcgcttctccctggactgggccctgattctccctctgggtaaccagtcccaggtgaaccacaccatcctgcagtactatygctgcatggccagcgagcttgtccgtgtcaacatcaccccagtggtggccctgtggcagcctatggccccgaaccaaggactgccgcgcctcctggccaggcagggcgcctgggagaacccctacactgccctggcctttgcagagtatgcccgactgtgctttcaagagctcggccatcacgtcaagctttggataacgatgaatgagccgtatacaaggaatatgacatacagtgctggccacaaccttctgaaggcccatgccctggcttggcatgtgtacaatgaaaagtttaggcatgctcagaatgggaaaatatccatagccttgcaggctgattggatagaacctgcctgccctttctcccaaaaggacaaagaggtggcyragagagttttggaatttgacattggctggctggctgagcccattttcggctctggagattatccatgggtgatgagggactggctgaaccaaagaaacaattttcttcttccttatttcactgaagatgaaaaaaagctaatccagggtacctttgactttttggctttaagccattataccaccatccttgtagactcagaaaaagaagatccaataaaatacaatgattacctagaagtgcaagaaatgaccgacatcacrtggctcaactcccccagtcaggtggcggtagtgccctgggggttgcgcaaagtgctgaactggctgaagttcaagtacggagacctccccatgtacataatatccaayggaatcgatgacgggctgcatgctgaggacgaccagctgagggtgtattatatgcagaattacataaacgaagctctcaaaggtaaggagccctagctgcggcwatctcctgaaggttatgtcaccagagggcatgacacttgattaaatctccaacatcaacacacactgccacccttggaatggagggctatccattttgtgcctcactgaaacagtccaagagatatctagcatttccccaaggataaaggagtgtagctaaaagtagaagaccagaaatccctagcccctactctggatctatgcaagcctagattcttgtcttccatcttggatggctccacagcagtcttaactgtttcatgtacataaagcagtacataaagatttaaccttgctgggcatggtggctcacacctgtaatcccagcattttggaaggccaaggcaggaggattgcttgagcctagaagtttgagaccagcctgggcaacatagtgagaccttgtctctactaaaaatcacaaaaattagctgggcacggtggcatatacgcctgcagattcagttacttgggaggagaggcgggaggattgcttgagcttgggaggtccagctgcagtgaatcatgatcacagcactgcaatctggcctgggtgacagagcaagacactatttcaaaaaaaaaaagaccaagcatggtggctcatgcctgtaatcccagcactttgggaggctgaggcaggtggatcatctgaggtcagaagttcaagaccagcctgaccaacatggtgaaaccccgtctctactgaaaatacgaaaattatccaggtgtagtgatgcacacctgtaatctcagctactcgggaggctgaggcagaagaatcacttgaactggggacgtggaggctgcagtgagccaagattgcaccattgcactccagcctgggtgacagagcaagactccatctcaaaaaaaaaaaaaaaaaaaaaaaggatttaacccaagtatatcatagtagattgaattatgtaaaacacccatttaacaaccaggtccaggtttgttctctctgtgtagtaaatcaatcactgtgacacaggttttgcaaaagagaaaagatttatttgtaaggggaccaagcgagggggtgggagaataacttccaatcctgcctctctgaagacaaggcttaggaatatgtatgggttagggaatgggtggtctaaggcatggtgaagagtgattggcagggggggaaaatgaagtaacaggttagacacatgcacagaaaatggtggtgttagcatgatctgagggcagagttttgggccctctgacgtcaaaagaccacctctcaggcacttgtgcaggcccagtggaagggtcagtggtcttaactagtttgaactggacaggagctgccccaagttcttggaaaaacaactgaagtgaccattgccatggtaacctatgaatgtcatcagtaaagtagccagtgaaggttaagtttcagcatacaatgggacaaccttcagcttcatggaaaaaggaaaaaaaaaaaacacatacacacacgaaaagcaagtgaccaaaagcaagcaggacaggcagacctgatccaattaacccctgggtttcaaccctgctaaatgcagctcaatatttgtcttgataatttgcctatttggctttacataaaataaagccttttctgatgaaatctaattgagtctgaagttgtattaaatggtatcggaaacttcccagcaggaaggctacgtaaaagtggccgggcgtggtgactcacgcctgtaatcccagcactttgggaggctgaggcaggcagatcacaaggtcaagaaatcgagaccatcctggccaacatggcgaaatcccatctctactaaaaaaaaaaatacaaaaatttgccaggtgtggtggtgctcacctgtagtcccagctactcaggaggctgaggcaggagaatctgttgaacctgggaggcggaggttgcagtgagtcaagatggtgccattgcactccagcctgtgtgacagagcaagactccgtctcaaaaaaaaaaaaaaagtgatgtgttgtgtgcaaaatacgtaataactactctcctatccttttgtttttccagcccacatactggatggtatcaatctttgcggatactttgcttattcgtttaacgaccgcacagctccgaggtttggcctctatcgttatgctgcagatcagtttgagcccaaggcatccatgaaacattacaggaaaattattgacagcaatggtttcccgggcccagaaactctggaaagattttgtccagaagaattcaccgtgtgtactgagtgcagtttttttcacacccgaaagtctttactggctttcatagcttttctattttttgcttctattatttctctctcccttatattttactrctcgaagaaaggcagaagaagttacaaatagttctgaacatttttctattcattcattttgaaataattatgcagacacatcagctgttaaccatttgcacctctaagtgttgtgaaactgtaaatttcatacatttgacttctagaaaacatttttgtggcttatgacagaggttttgaaatgggcataggtgatcgtaaaatattgaataatgcgaatagtgcctgaatttgttctctttttgggtgattaaaaaactgacaggcactataatttctgtaacacactaacaaaagcatgaaaaataggaaccacaccaatgcaacatttgtgcagaaatttgaatgacaagattaggaatattttcttctgcacccacttctaaatttaatgtttttctggaagtagtaattgcaagagttcgaatagaaagttatgtaccaagtaaccatttctcagctgccataataatgcctagtggcttcccctctgtcaaatctagtttcctatggaaaagaagatggcagatacaggagagacgacagagggtcctaggctggaatgttcctttcgaaagcaatgcttctatcaaatactagtattaatttatgtatctggttaatgacatacttggagagcaaattatggaaatgtgtattttatatgatttttgaggtcctgtctaaaccctgtgtccctgagggatctgtctcactggcatcttgttgagggccttgcacataggaaacttttgataagtatctgcggaaaaacaaacatgaatcctgtgatattgggctcttcaggaagcataaagcaattgtgaaatacagtataccgcagtggctctaggtggaggaaaggaggaaaaagtgcttattatgtgcaacattatgattaatctgattatacaccatttttgagcagatcttggaatgaatgacatgacctttccctagagaataaggatgaaataatcactcattctatgaacagtgacactactttctattctttagctgtactgtaatttctttgagttgatagttttacaaattcttaataggttcaaaagcaatctggtctgaataacactggatttgtttctgtgatctctgaggtctattttatgtttttgctgctacttctgtggaagtagctttgaactagttttactttgaactttcacgctgaaacatgctagtgatatctagaaagggctaattaggtctcatcctttaatgccccttaaataagtcttgctgattttcagacagggaagtctctctattacactggagctgttttatagataagtcaatattgtatcaggcaagataaaccaatgtcataacaggcattgccaacctcactgacacagggtcatagtgtataataatatactgtactatataatatatcatctttagaggtatgattttttcatgaaagataagcttttggtaatattcattttaaagtggacttattaaaattggatgctagagaatcaagtttattttatgtatatatttttctgattataagagtaatatatgttcattgtaaaaatttttaaaacacagaaactatatgcaaagaaaaaataaaaattatctataatctcagaacccagaaatagccactattaacatttcctacgtattttattttacatagatcatattgtatatagttagtatctttattaatttttattatgaaactttcctttgtcattattagtcttcaaaagcatgatttttaatagttgttgagtattccaccacaggaatgtatcacaacttaaccgttcccgtttgttagactagtttcttattaatgttgatgaatgttgtttaaaaataattttgttgctacatttactttaatttccttgactgtaaagagaagtaattttgctccttgataaagtattatattaataataaatctgcctgcaactttttgccttctttcataatcatatgagtggttgctagctaatttttttgtaattaaaaaaacttgagttgactaagccacctaagatgtgatgggagcagtggagaaatgggtgtgactgcaagaggcctgacccacgcggctggaagatggtaggggtgggagggcgacccaggctaggccatgtgtggagcagagagaatttcagagatgagacagcgaaatacacaagagctgaaaaggacaaaacagaagccagagccgcgaagagaagcgacctctgagaaccatccagctaccttctaatgcccgcctcatgctgactctgagtcggtaaaacttcgcaggtagcttggggtgaacgaaaggagggcacctctaggatcagccccgggacactaggcggcggcgctggaggcggggacttcctggccctggtggggcgaagtgcactcattcctccaccgcgtctcagagcaccgcgttctttccactctagtcttcttctctgatgctttcctctcatgaattctggtgtacatataatacagaaaccatcctccagaatgcctacacctcttcttcctttgtgggccaattctacaggggcgctaagtggccgacttgtggttccccagtgtgtctgggctgtttcctacacacttgtattcgccctgcattcgcggcgtattcctttgatcccaggtggacttttatccgccgttcattttgccctgctttggaaggacggttttccagtttcattagtgacacgtcattttatctttgacttccacagtcaatacttagaatctggcttggtcctgttggctcatgcctgtaatccccacactttggcaggccaaggcaggaggatcaattgaggctagaaatttgagaccagcctgggcaacatagtgagacccgtctctacaaaaacttctaaaaattagccgggcgtggtgctgtgcacctgtagtcccagctactcgggaggttgaggtgggaggatcacttgaactcaggaggttgaggctgcagtgaactatgttcatgccattgcactccaacttgggcaacagaatgagacctgtctctgaaataataacaagaagactctattagagccttggaagttttccattaaattatttatgatagtgctgttcaacagatacaagcaagccatgtatttcattttaaattttctagtagtcatattaaaaaataaaaaggcatagaagagataaattttaataatatattttattctttccagtatatccaaaatattgtattttcaacttgtaattgatataaacattattgagatatttcacattttttttggtactaagtaattttggtactaagtaattagattggtctatagcatatttgtttaatatttaatattgagcaatgctgctggaaatttgcacttggaaaggaacatgttaatttggagcatgttggccatcctggatgggaggacctcggttctagaggggaaggcagaggccatgtcttgtctggtatattttttacagtgtttagcgcagtatctcttacatgatattgttcaacaaatgttgattaattgaatacatgacggaataaatgataagcagaattagctcactgccatcacctgtgcccagagactggtttaatagagatcacctgtcagccagcaatgacgatgtgttagatgccacacagctccatcctatatattcagaggaaggaatgataacctgtcttactaggtagagaggcagtaaaacttactgctgtcctaaattgttgcctccagacaaatcactaagtgaaaggttgtaactttttgtcttccttatccacatgtctttcaactagtcagtaatctttctgtctcaggctgagttctttatctgtaaacaaaaacagtattttagaggaaccctttatgtcatctccaaatacttagtttcctagaatgtgtagcttttcccctcagacccattgcatttttccatttttataaccactaaatattgttggagttttgctggttgtaggacatttcctggaacttgttttttccatatctttgtggttaaacacccattgtctgatatcaaggagaaagaggtccagaaaacccacagggaaccttgagcaaagggtggaaatgccactaataatggtgacaggacacctacaatatggtgaaatcttgttttacatgatttctgcataccagaaaagacttggtgactactactcaagtcccccgacctctgcttttttttttttttttttttttttttttttttttttacccattgggttagagaagaaaacaatttcaacctacatattattgagataaaaaggcagagaaagaagaacaagaccaggctcaaaatgaccttacagttgggtagttttgggtaacgcaatccttggtgaacctcagtttcctcatctttgaaatgggagtgtctatcttagcacagtgctgaacataggaaatattcaataccttgggtatctaccccagacgttatttttttcctagactcatacaacttacccttaatgtgcatgtgatttcttgttaatcagatattttgagctcaataatgtaaaactagggactattacagtcaaaatgattcatcctgaagccttctagttattttatttgtgactttgaatatacattttcatagaatacccttggtaaaactaaatttagaaaaacgaagccccacatttacttaataataccaaattaccttcttggattcaaattttacaaatgttggattgatagaattctgaagataatttggcagcagatatttctgtatcaatatgttgaaccatctgctcttttgaaataatctaatgacacagacaaaacattaaaatgtgtatatttgttatttggttggtaaataattgaaggctcattaatttttatgagattcaaaaatctctggtagactttctgattttagtataatttttcaatatgtttactttatggtaaaatgaattaatgttaagtgacctaatttattttgtatacattatcttcaacggaaacattattccttaataaactgctggaatagactgacctttttttctgtttaaaatctcaattgatcagtttataaaattcaatttcctttcgatattataccagttgttgtctaattatggctgtgaccataaattttgcctaagacatttcagttggttttccatgtgaatcaaagctttggataatttatatccaacatgttagatggcaaattcaatagtgttccaaggtcacagtattgcatttaaggcatattggttttataaccatattttttcccctttaaattatgagaaccacgagtctctggtaagtagccccaaggcttcaaaatacaacatttcaatcaacagggggcagtagtggtaagccagagaggacacaacagagatataattagaggaagatggatgggtcagatagagatattttattagtaaaagacgagatgagattgaaccaacttttatcccaaattggtaccatgttaaatgtccttattttacctgtgcctgttatgggcctaacaatccaccaaaacaaacacartgtggggttactacgaccatcatgttgacaggatgagctgcaagattccagcagtgttggcaacatggctgcactggttcactcagacagagaggaaggagctgagggaaaccagaaattaggtaatgggcttgcagccttggggagagccccagagtggagtagtacctctgaatctgcatgctctgggatgtgctgcctaaatgcagaagaccaggccttttcccctcccagcccacgctttcgaaagtgcctttgggggaagatggcggcagcacccatggcttggtaagggatcactcccgactgattctgacaccctgttcatggagaaccacggggctttgtggaagggtgtagtcaagggcagatccagtgaatataagaaggcgagaaagaccagtgcacaggcaattgaacgagaaacaggaatgtcggaattcgagggcttaggagtgaagcatttccagcttgcatcaagaggactgatgaaagagaagccagccgttggaggggaagctcagggagtgttcctccaggatacgaggaaggtcgtgtacaaagaggctgaaaaggctggggatggttttagggcttgtgggagtgggcccagtggaggaagggaggaaagcaaaggatagaggagaactgtaggcaacgaattcaagtgtgtccagaaagtcagagcatgcctgagttgagaaagtggagtggaagggcaaggcagtaatatgccagcttccaggaactacaacagaggccctgggcccaggttttgggtggagcaggctcttatatttattccaaattggtaccagttaggtatctggtacctaaaccaggtagagagcccctattttctagttctacttgcaaatttgctttataacccagaggaagtcaccttaacccacggggcctcattgttttcttgtctataaaaagagggagttaatcaggaccagtgcttttctaccttggttacacatcagaatcgcctgggatttaaaaaattcctcagactaatgaagtcagtttttctggggggcagtggagctagctcccaggtgattgcaatgggaagctgaaattgagaaccagtgatctaatcagtgcgttgctgactttaacacacatatgagtcacctggggatcttagtcaaatgccaattctgattctagaggtctaggatgggcccaagggtttgcatttctaacagcctcccaggagtgcccatgatgctgctcttctgtggaccacagtttgagtagcaaggggctaagggccctctgggttgattgagggatataatttgttctaatagggataacaagagacagagagaaaagaactattagtctgttgttactgaaatggtatcatagaaagcgtcagaatgcaacaagtgccatggatggaaaacaggtactgatttaaggttgccacaatgaaaaccttaagacatgatgtcctaacaaacaaattatcactttaaatgcataatcattgtttgaaacagacgtgttttttaatattttaagttctgtggtacacatgcaggatgtgcacattcgttacataggtaaatgtgtgccatgttggtttgctgcacagatcagcccatcacctaggtattaagcccagcctccattagctattcttcctaatgctctccctccccttgccccacccctgacgggccccagtatgtgttgctccccccagtgtgtccatgtgttcttatcattcagcccgcacttagaagtgagaacatgcagtgttcggttttctgtgaaacagaccttttaggtgcagatgactacaatttaaaatttttaaaacagacttcaaagtctaaatkaccatactttttaaaattggaaataactttaatataaaaaatcatgaaaaaaagtcaaaattatctgctttttttttcttatttttaacatgttggaagagtaactaaatcaagagccttatgctgaaaacatcctatatgctcaaacatcttctggtgatgtatattcaatatgagataacaaaaatgaaaaacagcagatctgtatgataatgcacataatattatgtgcatgtttactgataacagacaagatgtgaattaggagacaaatgttttaaatttattggaacttttttatcattaaaaatatattttaaaatatatgttgaatgaagacagaacgaagctagtcttgaagggagattgctgcgttgggcaggttgaagtctgaaaaaaataatagttctggaacaaactctctaagcctgtcatagacctgctctttctcacctggagacatcgtgagacctaggtttaattgccatttcttttctgtgtttggtgcatccat
